United States Patent Application Publication US 2008/0229439 A1 - sequence listing, part 4

SEQ ID NO: 8089 - protein, 177 aa, Zea mays
  unsure (1)..(177): unsure at all Xaa locations
  Clone ID: TF_ZmC844_7.pep
LHIIWQNATKVSSAFAGTREKCVGCSKTVYPTERVRFCVQPSQSFFRXFEPSSLDNRLSIQVTVNNTMYHKSCFKCCHGGCTISPSNYIAHEGKLYCKHHHIQLIKEXRGTSASLRMTTRRHHRLGHWFHHFHWSEDASSPGSYGLLKLPSPGSRLAHAHLLDPSPIGFPLIPTAPA

SEQ ID NO: 8090 - protein, 82 aa, Zea mays
  unsure (1)..(82): unsure at all Xaa locations
  Clone ID: TF_LIB3601-009-P1-N6-H8.pep
VYPTKRVTVNNTMYHKSCFKCCHGGCTISPSNYIAHEGKLYCKHHHIQLIKEXRGTSASLRMTTRRHHRLGHWRRMNKSIDH

SEQ ID NO: 8091 - protein, 190 aa, Zea mays
  unsure (1)..(190): unsure at all Xaa locations
  Clone ID: TF_LIB4172-053-R1-L1-A4.pep
NSARGRKRDDGGHGDLLQGTTTKCTACDKTVYLVDKLTADNRIYHKACFRCHHCKGTLKXNYNSFEGVLYCRPHFDQLFKRTGSLDKSFEXATKVSSAFAGTREKCVGCSKTVYPTERVTVNNTMYHKSCFKCCHGGCTISPSNYIAHEGKLYCKHHHIQLIKEKGNFSQLENDHEKTSQAGSLEEDEQE

SEQ ID NO: 8092 - protein, 206 aa, Zea mays
  unsure (1)..(206): unsure at all Xaa locations
  Clone ID: TF_LIB5116-045-A1-PF1-G4.pep
MATSFQGTTTKCNACDKTVYLVDKLTADNRVYHKACFRCHHCKGTLKLANYNSFEGVLYCRPHFDQLFKRTGSLDKSFEGTPKVVKPERNVGNENAIKVSSAFAGTREKCFGCTKTVYPIERVTVNNTMYHKSCFKCCHGGCTISPSNYIAHEGKLFCKHHHTQLIKEKGXSASSRTITTRRHRVPGQWMMKTRSISQSLRISRDE

SEQ ID NO: 8093 - protein, 108 aa, Zea mays
  Clone ID: TF_ZmC1143_5.pep
MSFTGTQDKCTACDKTVHFIDLLTADGAIYHKTCFKCSHGGCILTTSSYAALNGVLYCKIHFAQLFMEKGSYNHMNKKSPSQEVLPDVADEEQPPEPAPPQDEKEEDN

SEQ ID NO: 8094 - protein, 198 aa, Zea mays
  unsure (1)..(198): unsure at all Xaa locations
  Clone ID: TF_ZmC844_4.pep
MATSFQGTTTKCTACDKTVYLVDKLTADNRVYHKACFRCHHCKGTLKLANYNSFEGVLYCRPHFDQLFKRTGSLDKSFQGTPKVVKPERNVGNENATKVSSAFAGTREKCVGCSKTVYPIERVTVNNTMYHKSCFKCCHGGCTISPSNYIAHEGKLYCKHHHVQLIKEKGXTSASSRMTTRRHRRLGRWRTTKKKSID

SEQ ID NO: 8095 - protein, 138 aa, Zea mays
  Clone ID: TF_LIB5116-033-A1-PF1-B12.pep
MFSGTQQKCKVCTKTVYPMDQLSTDGAVFHRACFKCHHCRSTLSFSSYSSFEGVPYCKPHFAQLFKETGSYNKSFQSQSPAKSATEKLTPELARSPSKAAGMFSGTQDKCATCGKTAYPLEKVTVEEKSYHKSCFNAL

SEQ ID NO: 8096 - protein, 165 aa, Zea mays
  unsure (1)..(165): unsure at all Xaa locations
  Clone ID: TF_LIB3608-040-Q1-K6-E4.pep
MFSGTQQKCKVCTKTVYPMDQLSTDGVVSFQSQSPVFHRSCFKCQHCKSTLSLSNYSSFEGVPYCKTHFEQLFKETGSYNNKXTPEKLAPELTRSPSKAARMFSGTQDKCATCGKTAYPLEKVTVEEKSYHKSCFKCSHGXGCAITPSNYAALEGILYCKHHFSQ

SEQ ID NO: 8097 - protein, 205 aa, Zea mays
  Clone ID: TF_ZmC1143_3.pep
MSSFTGTQDKCAECDKTVHFIDLLTADGVTYHKTCFKCSHCKGILSMCSYSSMDGVLYCKTHFEQLFKETGSFSKNFTPGGKSSDKGELTRAPSKLSSAFSGTQDKCAACQKTVYPLEKLTLEGESYHKSCFKCSHGGCILTTSSYAALNGVLYCKIHFAQLFMEKGSYSHMMKKSPSQDTLPDMAADEQPPEPAPPQDGEGEDN

SEQ ID NO: 8098 - protein, 205 aa, Zea mays; identical to SEQ ID NO: 8097
  Clone ID: TF_ZmC1143_7.pep

SEQ ID NO: 8099 - protein, 87 aa, Zea mays
  Clone ID: TF_701158756H1.pep
APAAAAPPSHLLECRIWRLGMKCAVCHTTAYFAEEAQCEGISFHKCCLLCMVCKKNLDSTTVAVHGEEIYCKSCYGKKYGPKGYGYG

SEQ ID NO: 8100 - protein, 538 aa, Zea mays
  Clone ID: TF_ZmC26552_1.pep
MGHKGEASKELIVKVPCVFGTGAGRRIVSLSKTINMGWLSKIFKGPVNRVSRGHYNGNSHEGYSTQHTKSYGVHGNEDEDMDHAIALSLSEEDQRKGKAIDTGHHLDEDEQIAQALQENIGHNLAEDEQLARALQESMNDGPPRQHIPVEDVNSESTPASILPSNIFRTSGLRVCAGCRSPIGRGRFLSCMDSVWHPECFRCYACDRPISEYEFAVHENHAYHRPCYKERFHPKCDVCSSFIPTDKNGLIEYRAHPFWMQKYCPSHENDGTPRCCSCERMEPKDSQYITLDDGRRLCLECLHTAIMETNECQPLYIDIQEFYEGMNMKVEQQVPLLLVERQALNEAMEAEKSVHHLPETRGLCLSEEQIVRTILKGPIGPGNRIIDMVTGPYKLIRRCEVTAILILYGLPRLLTGSILAHEMMHAYLRLKGYRTLSPEVEEGICQVLAHLWLESEITSGSGSMSTTSDASSSSSTSSSSKKGAKTEFEKRLGEFFKYQIETDSSVAYGDGFRAGMRAIERYGLRSTLDHIKMTGSFPC

SEQ ID NO: 8101 - protein, 204 aa, Zea mays
  Clone ID: TF_ZmC383_3.pep
MFSGTQQKCKVCTKTVYPMDQLSTDGAVFHRACFKCHHCKSTLSFSSYSPFEGVPYCKPHFAQLFKETGSYNKSFQSQSPAKSATEKLTPELTRSPSKAAGMFSGTQDKCATCGKTAYPLEKVTVEEKSYHKSCFKCSHGGCALSPSNYAALEGILYCKHHFSQLFKEKGSYNHLIKCASVKRAAEAQTAQAAAQAAPAAAESS

SEQ ID NO: 8102 - protein, 504 aa, Zea mays
  Clone ID: TF_ZmC39_1.pep
MSWLNKIFKGSVNRVSRGHYDGDWHEGHSSDHTRDTYDDSDNEDIDRAIALSLAEEDQNKGKSVAIDTDYNLEEDEQLARALQESLNAESPPRQNVPIEDVPVPQWNIPVERVPPRQYVPANEPTPHVYPRGGSRICAGCQNPIGHGRFLSCMDSVWHPQCFRCFACNKPISEYEFAMHDDQPYHKSCYKEFFHPKCDVCNNFIPTNRDGLIEYRAHPFWMQKYCPSHEDDGTPRCCSCERMEPREIKYITLDDGRKLCLECLNSAVMDSPECQHLYMDIQEFFEGLNMKVEQQIPLLLVERQALNEALEAEKNGHHLPETRGLCLSEEQVVRTILKRPQIGPGNRILDMIIGPYKLSRRCEVTAILILYGLPRLQTGSILAHEMMHAYLRLKGFRNLSIEVEEGICQVLSHLWLESEIIAGSSSNVASSSEASSSSSSSAPTSSKKGAKTEFEKKLGAFIKHQIETDSSEAYGGGFRAGYPAVERYGLKRTLDHMKLTGSFPY

SEQ ID NO: 8103 - protein, 202 aa, Zea mays
  Clone ID: TF_ZmC39_5.pep
MSWLNKIFKGSVNRVSRGHYDGDWHEGHSSDHTRDTYDDSDNEDIDRAIALSLAEEDHNKGKSVAIDTDYNLEEDEQLARALQESLNAESPPRQNVPIEDVPVPQWNIPVERVPPRQYVPANEPTPHVYPRGGSRICAGCQNPIGHGRFLSCMDSVWHPQCFRCFACNKPISEYEFAMHDDQPYHKSCYKEFFHPKCDVCNN

SEQ ID NO: 8104 - protein, 91 aa, Zea mays
  unsure (1)..(91): unsure at all Xaa locations
  Clone ID: TF_ZmC844_10.pep
MNISMLIATHRLSIQVTVNNTMYHKSCFKCCHGGCTISPSNYIAHEGKLYCKHHHIQLIKEXRGTSASLRMTTRRHHRLGHWRRMINTLVH

SEQ ID NO: 8105 - protein, 70 aa, Zea mays
  unsure (1)..(70): unsure at all Xaa locations
  Clone ID: TF_700450670H1.pep
MLNLGGGAKCGACEKTVYHAEEIQCNGRSFHKTCFHCMACRKALDSTTVAAHESEIYCKAGYGRRXGPKG

SEQ ID NO: 8106 - protein, 136 aa, Zea mays
  Clone ID: TF_LIB4185-052-R1-L1-E7.pep
IRHEAPLQFLEPSLPLVIPLVTMPALAKPASRTAKPAAAPKPKPAAAKPKAATAGASHAAYFEMIKGAITALRERTGSGSPAMGVGGAVTCGGSLFGVFWIWGATSPLGWGALRPRPRAAGATARLYARGGGSVPG

SEQ ID NO: 8107 - protein, 66 aa, Zea mays
  Clone ID: TF_jC-zmX3059031Q1K1F04b1.pep
MPALAKPTFRTAKPASAPKPNPADIWPKAATAGASHPPNFEMIKEAFTALKERTDPRPCEQPRSLD

SEQ ID NO: 8108 - protein, 69 aa, Zea mays
  unsure (1)..(69): unsure at all Xaa locations
  Clone ID: TF_LIB3332-033-P1-K1-A2.pep
MSTEEAVVPEVPVTEVPAEVPAAHVVDAPNANKAPNEKKAPNENKPSAGXKPAAHPPYAEMIVEAIAAL

SEQ ID NO: 8109 - protein, 73 aa, Zea mays
  Clone ID: TF_LIB143-015-Q1-E1-F7.pep
MSTEEAVVAEVPVTEVPADVPADQVAEAPKANKAPKENKAPKDKNLSAANIPAAQPPYAEIIVQAIAALKERK

SEQ ID NO: 8110 - protein, 298 aa, Zea mays
  Clone ID: TF_ZmC1172_2.pep
MGAPKQRWTSEEEAALRAGIARHGVGKWRTILKDPEFSSTLCYRSNVDLKDKWRNMNVIVSTSSSRDKAKSALKRIRTIPKNNEHTMAITRVTSDIDDEIVDEKPIVSLPSEAKNTSSSKKSHRLDNIIMEAIKNLNEPTGSHRTTIANYIEEQYWPPSDFDHLLSAKLKDLSTSGKLIKVNRKYRIAPSSPNSERRSPKMPLLEDVQREPVKIWSDDTKTLTRSQVDAELARMATMTAEEASVAAARAVAEAEAIMAEAEAAAKEAEAAEAEAQAAQAFAEAAFLTLKNRNAGKLMA

SEQ ID NO: 8111 - protein, 107 aa, Zea mays
  unsure (1)..(107): unsure at all Xaa locations
  Clone ID: TF_jC-zmX700092020b1.pep
MSTEEAVVADVPVTEVPAEVPVAHVAXAPNANKAPKEKKAPNEKKLSVANKPVAHPPYSEMIVEAIAALKERKGFSSVAISMYVEGKHGGKFPSTFCXHFTVQLKKL

SEQ ID NO: 8112 - protein, 116 aa, Zea mays
  unsure (1)..(116): unsure at all Xaa locations
  Clone ID: TF_LIB4729-127-A1-K1-F6.pep
ADMIAELIADPQKRNGSRYACITKYVQVKHGDKVCTILGKDLTVQLKKVADDDKLTRVNNSFKLPATDAKPKXAKPHAPKVAYXTKSSPKGKDKTAAKPKAASTQPKAKAKVKSVA

SEQ ID NO: 8113 - protein, 179 aa, Zea mays
  unsure (1)..(179): unsure at all Xaa locations
  Clone ID: TF_LIB4766-082-R1-K1-G7.pep
SAVSTEEAVVXAEVPVTEVPTEVPSAHVAEGPKDNKAPXKEKKVPKEKKLSAPKKPAAHPPYAEMIVEAISALXERNASSSVAINKYVEGXYGGKLPTIFCWXFTVQLNNVAVVGKLTRLKNSFXWRAPTPRPRTSCPMHSMSRPMPSPXDESDVKTAANSKAVSSQSCAKDMAKPVAP

SEQ ID NO: 8114 - protein, 101 aa, Zea mays
  unsure (1)..(101): unsure at all Xaa locations
  Clone ID: TF_LIB3354-080-Q6-K6-F1.pep
MSTEEAVVAEVPVTEVPAEVPAAHVAXAPKAKKARQENKAPKEKKLFADNKPAAHPTYSEMIVQAIAVFKERNGSSSVAIIKYFXGKHGGKLFHQLTQACY

SEQ ID NO: 8115 - protein, 158 aa, Zea mays
  unsure (1)..(158): unsure at all Xaa locations
  Clone ID: TF_LIB4730-100-Q1-K1-F2.pep
MPARAIPGSRSDKRDEAPKPKRAAANPKARTAGASHPAYFQMIKEAITAEKERIASRLSSASTRKWGTRTMNSLPANLKKMLSIQLRVHXAKGKLGKAKAFXKLSDAAXNASPKTKAKTRKAAAAKNTAPKCGKDDADKSKNERVAKIKKVADAETKG

SEQ ID NO: 8116 - protein, 99 aa, Zea mays
  Clone ID: TF_ZM5033.C5.o1.fg.pep
MPWSSTTADGRRQQQRRTVESSLSEPTIVGREPGLARVTPMIVAALAALAEENGSSQAAIARRIEAEARGDLPASHPALVAAHLSRMSAAGELVAVAGG

SEQ ID NO: 8117 - protein, 125 aa, Zea mays
  Clone ID: TF_ZmC366_3.pep
RSPPRVDPASAPVVTVSEEPAPEAAKEVVKKPEEGKKPDEEGDERKKADPAAEKEKKARKPRSRKPKSAGLHHPPYFEMIKEAILSQDGGKVGASPYAIAKHMGEKHRDVLPPNYRCLGAVEGGT

SEQ ID NO: 8118 - protein, 79 aa, Zea mays
  Clone ID: TF_jC-zmX700095987b1.pep
MPDLAKPATRTAKPAEAPKPKPAAAKPKANTAGANHPPYFEMNKEAITALKERTDSSPQAIAKYEGDKHGAYMAANSKK

SEQ ID NO: 8119 - protein, 148 aa, Zea mays
  unsure (1)..(148): unsure at all Xaa locations
  Clone ID: TF_LIB4741-005-R1-K1-D2.pep
HVRRPGGAEAPETEVPAEVPAVHVAXEAPMVKKAPKEKKAPKENKPSAGKKPTAHPTYAEMIVXAIAALKERKGSSSLAXITKYVEGQHGGELPTNFRTQLTEQLKKLAAAGKLTRVKNSFKLTATXDAKPKAAQVNAPKDGPKPKPS

SEQ ID NO: 8120 - protein, 98 aa, Zea mays
  unsure (1)..(98): unsure at all Xaa locations
  Clone ID: TF_LIB3150-101-P1-N1-A3.pep
SLLSTEEAVVAEDPETEXPVEXXRFMLXEVXNVKKVPKVKKAPKEKKLFAXEKPAAHPSYAEMIVEAIAALQERKGSSSVALNXFFQGKHGGKLPTNF

SEQ ID NO: 8121 - protein, 229 aa, Zea mays
  unsure (1)..(229): unsure at all Xaa locations
  Clone ID: TF_ZmC1172_3.pep
MGAPKQRWTSEEEAALRAGVARHGVGNWRMILNDPELSSTLRYRSNVDLKVKSIHSFLRKIDLVKGLPYLGIPXIMCLLVFKFLDSSSILMLICSFFIYHYLGQWRNMNVIVTSSSTRDRGRTSEELLLMSTPWQLPEXTSDIDDEIVDEKPIVSLPSEAKNTSSSKKSHRLDNIIMEAIKNLNEPTGSHRTTIANYIEEQYWPPSDFDHLLSAKLKDLSTSGKLIKMA

SEQ ID NO: 8122 - protein, 108 aa, Zea mays
  unsure (1)..(108): unsure at all Xaa locations
  Clone ID: TF_LIB3076-019-Q1-K1-B5.pep
TPPKQPHYADMILQSIRLPQRDRGXSSLAISQYIEGKHGDKLVTNFHKQLTAQLKTLTVDDKLTRVNNSFKLPATDANPIASNSKVPNDAPNSNTSHXANANTASKPK

SEQ ID NO: 8123 - protein, 87 aa, Zea mays
  unsure (1)..(87): unsure at all Xaa locations
  Clone ID: TF_LIB4730-055-R1-K1-C2.pep
RSLTSRSPASRNPKTDAATKPKPAVNQXNAITAGGSNPPYLQKIMEAIAELIERTGCSSQAIDMYVGDXHDSYLSDILKSMLYIQLR

SEQ ID NO: 8124 - protein, 169 aa, Zea mays
  unsure (1)..(169): unsure at all Xaa locations
  Clone ID: TF_LIB4740-123-A1-K1-G5.pep
MPALAKPASRTAKPAAAPKPKPAAAKPKAATAGASHPPYFEMIKEAITALKERTGXQLRGSAAKGKLVKVKASYKLSDAAKKASPKTKAKPAKAAAAKTTAPKPAKAAAAKSKKAAAAMPKKAAAAGTKRKVPEKKVVAKPKKSPAAKAKAKPKTLKSPASKKARKASA

SEQ ID NO: 8125 - protein, 80 aa, Zea mays
  unsure (1)..(80): unsure at all Xaa locations
  Clone ID: TF_LIB3354-043-P1-K1-D8.pep
RTADPAGAXESDPVPLKSNAVTVGGCYSADLEMIKEAITALKERTGCSSQAIGKYVGDKHCACMTVNLKXMLCMQLRGFP

SEQ ID NO: 8126 - protein, 87 aa, Zea mays
  unsure (1)..(87): unsure at all Xaa locations
  Clone ID: TF_LIB3732-029-Q1-K6-C1.pep
MSTEEAVVAEVPVTEVPAXVPAAQVAEAPRARRGPKXKKAPKXKKPFVGNNPAVHTAYAEMIVDVIGGLXDRKGFSSWAISKYLEGI

SEQ ID NO: 8127 - protein, 139 aa, Zea mays
  unsure (1)..(139): unsure at all Xaa locations
  Clone ID: TF_LIB4730-140-A1-K1-H11.pep
MSTEEAVMREVAVTEAPADDPPAQEAEDLRSDEXPHHNNPPTEKILSAVKKPARHPPYTEMFVSRIPAPXASTGTSSAAMGXYIQRKYGGEILTNFRKQITVHVYNLADAGNLTMVNNSFKLAVSDAKPDAAIARCSRG

SEQ ID NO: 8128 - protein, 139 aa, Zea mays
  unsure (1)..(139): unsure at all Xaa locations
  Clone ID: TF_ZmC190195_1.pep
MSAAEEAKVPAVEKPVEEVKAPKLAKEKKPKAPKEKKPKQAKTASHPPYLQMIKDALIALNEKGGSSPYAIXKYMEEKHKAVLPANFKKILGLQLKNQAARGKLVKIKASYKLAEAAKKVKESTAKATKESRPKRNKIA

SEQ ID NO: 8129 - protein, 157 aa, Zea mays
  unsure (1)..(157): unsure at all Xaa locations
  Clone ID: TF_LIB4730-130-A1-K1-G9.pep
MAAITKTASGTAXPARHPKPKPAVDNXKASIDVGSHSPYFQMNKEAITELKERTESSSLAIVKYVXKKHDATLMVNFNXMVFIHLGVIAVKVKLVKAEASHKLSDAXKKGSPKSKAKXLKCGAAKSTARRPRKADCAKXKKGAAAKPKKVAAAGTKR

SEQ ID NO: 8130 - protein, 90 aa, Zea mays
  unsure (1)..(90): unsure at all Xaa locations
  Clone ID: TF_LIB84-011-Q1-E1-B9.pep
MPALAKPASRSAKPAAAPTPKPAAANPIAAIAGASHTPYFQMINEVITALKXMTGSNSQAISTXVGEKHRASRPVNFKNMPSNQLRWSAV

SEQ ID NO: 8131 - protein, 90 aa, Zea mays
  Clone ID: TF_LIB3357-015-P1-K1-C2.pep
RRGPSPPPPSPRALRPQFPRAQTRREGRGSDSQQPRRPAQAWPLPLPVATARPRAPLTSCPPPTPRQPYLLSLCSALLLSARSVPICRID

SEQ ID NO: 8132 - protein, 164 aa, Zea mays
  unsure (1)..(164): unsure at all Xaa locations
  Clone ID: TF_LIB3355-019-P1-K1-G4.pep
MPALAKPASRTAKPAAAPKPKPAAAKPKAATAGASHPPYFEMIKEAXTALKERTGSSSQAIAKYVGDKHGPSLPANFKKMLSIQLXGSAGQGKLVKVKASYKLSDAAKKAFPXAKAKPAKAGAAKTPXPKPAQGRRAKSKKGSGLPGQKRAGAAWTKPKVPEKK

SEQ ID NO: 8133 - protein, 112 aa, Zea mays
  Clone ID: TF_ZmC1022_21.pep
YRMLGTLSQSYKDKLPPNFRKLLNVQLKKLVAGGKLTKVKNSYKLSSATKPKAAPKKTKTGVKKPKAAAKPKAKSPAKPKPAAKKAPVAKKAAPAKKAAAPARKAPSRKAKK

SEQ ID NO: 8134 - protein, 70 aa, Zea mays
  Clone ID: TF_LIB4732-048-R1-K1-C12.pep
ARSGSTAPGADAPKVQNAHNEISALNDNELSAANKTASHPPYVEMIVESIPALLERKGASSMDICKYMAA

SEQ ID NO: 8135 - protein, 71 aa, Zea mays
  Clone ID: TF_LIB3245-197-P1-N1-D11.pep
MRLATTPALGKPASRTAKPAAAPKPKPAAAKPKAATAGASHPPYFEMIKEAITALKERTGSSLHCERLVCG

SEQ ID NO: 8136 - protein, 95 aa, Zea mays
  Clone ID: TF_LIB4746-104-R1-K1-C3.pep
LALALALGLGDAALGFAAVLAFAFGEGLGLGAALGALGLAALGLASVAISKYVEGKHGGKLPTNFRKQLTVQLKKLAAAAKLTRVNNSLQLPSSE

SEQ ID NO: 8137 - protein, 100 aa, Zea mays
  unsure (1)..(100): unsure at all Xaa locations
  Clone ID: TF_LIB3732-023-Q1-K6-A11.pep
MSTEEAVVAEVPETXVPAEVPAXYVAAAPKAKRAGRENKAPNEKKPFAEKKPTAHPSYAKIIVEEIDALKERKGLISVGINKYIEGKHGGKLITNFHKHL

SEQ ID NO: 8138 - protein, 299 aa, Zea mays
  Clone ID: TF_ZmC238_1.pep
MGAPKQRWTPEEEAALKAGVAKHGPGKWRTILRDSDFSALLRLRSNVDLKDKWRNLSVTAGGYGSREKARMALKKGRRVVPKLTAEPMDVDVKDMDDAHDTAIDVEPLAMAFESLPTEESPDKSVARLDDLILEAIRKLKEPSGSSKAAIAAYIEDQYWPPADFQRLLSTKLKALVNSGKLIKVNQKYRIAPSPPPSGRIGTKVSSAEGMKAENNNAKRLTKHQVIAELEKMKGMTKEEAAAFAAKAVAEAEVAIAEAEEAARVAEAAENDAEAAKAFLDAVTLSMRNRNAASMMLRAC

SEQ ID NO: 8139 - protein, 180 aa, Zea mays
  unsure (1)..(180): unsure at all Xaa locations
  Clone ID: TF_LIB4762-057-R1-K1-H8.pep
MPALAKPASRTAKPAGVPKPXPAAAKPKAATAGASHPPYFEMIKEAITALKERTGSSSQAIAKYVGDKHGAFLPANFKKMLSIQLRGSAAKGKLVKVKASYKLSDAAKKASPKTKAKPAKAAVAKTTAPKPAKAAAAKSKKAAAAKPKKAAAAGTKRKVPEKKVVAKPKKSPAAKAKAKP

SEQ ID NO: 8140 - protein, 108 aa, Zea mays
  Clone ID: TF_ZmC1022_25.pep
MATDVAETPAPLVDAAPEAPADAPAAPAADAKPAKAKKATAPKKRASPTHPPYAEMVSEAITSLKERTGSSSYAIAKFVEDKHKDKLPPNFRKLLNVQLKKLVAGSKL

SEQ ID NO: 8141 - protein, 154 aa, Zea mays
  Clone ID: TF_LIB3354-104-Q6-K2-F6.pep
GPAAPKPKPAAAKPKAGTGAACHPPYFARIKEAITALNERTASSSKATAKYVRDKHRASLTANSKKMLSIQLLSSTHKGKLIKGKAPYKLSDAVMKASPKTKAKTTQADGAKTTRPKRAKAVAVKSNNAAIANPKKDVAAGTKHKVPEKKDKTK

SEQ ID NO: 8142 - protein, 113 aa, Zea mays
  Clone ID: TF_LIB5116-036-A1-PF1-H4.pep
MPALAKPAARPAKPAAAAPKPKPAAAKPKAAAAGAAHPTYFEMIKEAIAALKDRTGSSSVAIAKYIEEKHGKALPPNFKKMLSVQLRASAAKGKLVKVKASYKLSDAAKKDSP

SEQ ID NO: 8143 - protein, 171 aa, Zea mays
  Clone ID: TF_ZmC159_1.pep
MTTPTPSGDGSPPGSSDLVPPSYPEMIVAAITALAEENGSSQAAIARRIEAQARGDLPASHPALVAAHLSRMSAAGELVAVAGGKYALPPPPAQPAPESPADDGEDDDDDDECADEVDEEEEAPEPLLVPVPVPQPPAKRGRGRPPKPRPAGFPIGVPGAAASPAAAPRRR

SEQ ID NO: 8144 - protein, 185 aa, Zea mays
  Clone ID: TF_ZmC1022_9.pep
MATEVAETPAPLAEAVPETPAEAPAAPAAEANSTKAKKASAPKKRANPTHPPYAEMISEAVTSLKERTGSSQYAIAKFVEDKHKDKLPPNFRKLLLGQLKKLVAAGKLTKVKNSYKLPARAPAAAKPKPKSKTAVKKPKAGAKKPKAATKPKPKAKAKSPAKAKPAAKPKAAAKPKPAAAKPKAA

SEQ ID NO: 8145 - protein, 118 aa, Zea mays
  unsure (1)..(118): unsure at all Xaa locations
  Clone ID: TF_LIB4740-023-R1-K1-D9.pep
MSTEEAVVAEVPVTEVPAEVPAAQVAEAPKAKKAPKEKKAPKEKKPSAAKKPAAHPSYPXMIVEAIAALKERKGSSSVAINKYLEGKHGGKLPTHFXRQLTCKLRNLVAAANLHRVKN

SEQ ID NO: 8146 - protein, 93 aa, Zea mays
  Clone ID: TF_LIB4826-020-A1-N1-C2.pep
MPALAKPASRTAKPAAAPKPKPAAAKPKAATAGASHPPYFEMIKEAITALKERTGSSSQAIAKYVGDKHGASLPANFKKMLSIQLQEVPSRRP

SEQ ID NO: 8147 - protein, 109 aa, Zea mays
  Clone ID: TF_ZmC8559_2.pep
PTARRVGWAFRQMILAAIEDLGDKSGSNKSAISRYIEGKYDGDLPPAHASLLAAHLARMKESGELVFVKNNYFRVDAPDAPPKRGRGRPPKARDPGAPVSPPSGRGRGP

SEQ ID NO: 8148 - protein, 112 aa, Zea mays
  Clone ID: TF_LIB3117-014-Q1-K1-C6.pep
RTPLQFLEPSLRLGIPLVTGRALAKPASRTAKPAAAPKPKPAAAKPKAATAGASHPPYFEMIKEAITALKERTGSSSQAIAKYVGDKHGASLPANFKKMLSIQLRGSATKGK

SEQ ID NO: 8149 - protein, 163 aa, Zea mays
  Clone ID: TF_LIB3354-004-P1-K1-B9.pep
MQFLEPWLPIVIPLDTMPALAKPASRTAKPDEAPKPKPAAAKPKAGTAGASHPPYFEMIKEAITALKERTGSSSQAIAKDVGDKHGACLPANFKKMLSIQLRGSAAKGKLVKGKASYKLSDADKKAYSKTKAKPAKGAGDKTTDPKPDKAGGGKLKKAAGAKP

SEQ ID NO: 8150 - protein, 175 aa, Zea mays
  unsure (1)..(175): unsure at all Xaa locations
  Clone ID: TF_LIB3587-232-Q1-K6-F2.pep
FRRGLGRVVVIRKSTEEAVVAEVPVTEVPAEVPAAQVAQAPKRXAPKEKKAPNEKKLSPAKKPVAHPPYAEMIVEAIAALKERKGSSSVAISKYVXGKHGGKLPTNFRKQITVQLKKLSAARKLTKVKNSFKMTVTDAKPKVGKPKAPKNAPKPKPSPIAKAKTAANPKSAWPKP

SEQ ID NO: 8151 - protein, 261 aa, Zea mays
  Clone ID: TF_ZmC1022_1.pep
MATDVAETPAPLVDAAPEAPADAPAAPAADAKPAKAKKATAPKKRASPTHPPYAEMVSEAITSLKERTGSSSYAIAKFVEDKHKDKLPPNFRKLLNVQLKKLVAGGKLTKVKNSYKLSSAATKPNPKPKAAPKKPKTGAKKPKAAAKTKAKTPAKAKPATKPKPAAKPKAVVKPKTPAKPKAKPAAKAKPKTAGAKPKPLAKKAGRPAKAAKTSAKDTPGKKAPVAKKSAAAAKKAPAKKAAPSKKAATPVRKAPSRKAKK

SEQ ID NO: 8152 - protein, 257 aa, Zea mays
  unsure (1)..(257): unsure at all Xaa locations
  Clone ID: TF_ZmC1022_4.pep
MATDVAETPAPLVDAAPEAPADAPAAPAADAKPAKAKKATAPKKRASPTHPPYAEMVSEAITSLKERTGSSSYAIAKFVEDKHKDKLPPNFRKLLNVQLKKLVAGGKLTKVKNSYKLSSAATKPNPKPKAAPKKPKTGAKKPKAAAKPKAKTPAKAKPATKPKPAAKPKAVVKPXPKAKPAAKAKPKAAAAKPKPAAKKAGRPAKAAKTSAKDTPGKKAAPAKKPAAAAKKAPAKKAAPAKKAPTPSRKVPSRKAKK

SEQ ID NO: 8153 - protein, 239 aa, Zea mays
  Clone ID: TF_ZmC673846_1.pep
MSTEEAVVAEVPVTEVPAEVPAAQVAEAPKAKKAPKEKKAPKEKKLSAAKKPAAHPPYAEVRFSPLRSSRFVASLGSSPLMESVGLILSLCSVHVREFDIESETQPVGSVWLQMIVEAIAALKERKGSSSVAISKYVEGKHGGKLPTNFRKQLTVQLKKLAAAGKLTRVKNSFKLPATDAKPKAAKPKAPKAAPKPKPSPKAKAKTAAKPKAASPKPKAKAKAKPVAPAVAPAASPQAP

SEQ ID NO: 8154 - protein, 294 aa, Zea mays
  unsure (1)..(294): unsure at all Xaa locations
  Clone ID: TF_ZmC1022_5.pep
MATDVAETPAPLVDAAPEAPADAPAAPAADAKPAKAKKATAPKKRASPTHPPYAEVIGALPLILLPCRAVRASPPRLDLTEXWMVGAQMVSEAITSLKERTGSSSYAIAKFVEDKHKDKLPPNFRKLLNVQLKKLVAGGKLTKVKNSYKLSSAATKPNPKPKAAPKKPKTGAKKPKAAAKPKAKTPAKAKPATKPKPAAKPKAVVKPKTPAKPKAKPAAKAKPKTAGAKPKPLAKKAGRPAKAAKTSAKDTPGKKAPVAKKSAAAAKKAPAKKAAPSKKAAALVRKAPSRKAKK

SEQ ID NO: 8155 - protein, 285 aa, Zea mays
  unsure (1)..(285): unsure at all Xaa locations
  Clone ID: TF_ZmC13520_2.pep
MGAPKQKWTSEEEDALRRGVRKHGAGKWRTIQKDPQFSPILSSRSNIDLKDKWRNLSFSASGLGSSKVRVPKITGSSSSPSSSSQALLLPAANNVTEAMLPADADKKPRDGKTPPKYGAMIMEALSELNQPNGSDIDAIFDFIKQRHVVQSTFRRFLPSKLRRLADSNKIEKVDNFYRLPDSFATRTPAQIKVSDPKQKDPSKASKTIXLFAASSPALEAAMAAAVKVTDAEAKAHDAHDQMMEAERMLKMAEDTESILTIAAEIYDRCSRGEITTLVPVAQREF

SEQ ID NO: 8156 - protein, 102 aa, Zea mays
  Clone ID: TF_LIB3357-042-P1-K1-C6.pep
MSTDEAVVADVPVTEVPADVPADHVADAPKAKKAPKEKIAPKEKKLSAAKKPAAHPPYAEMIVEAIAALKERKGSSSVSIIKYVQGNHGGKLPNNFQKQLTV

SEQ ID NO: 8157 - protein, 235 aa, Zea mays
  Clone ID: TF_ZmC366_1.pep
MATVTEEVAPVVTVSEEPAPEAAKEVVEKPEEGKKPDEEGDERKKADPAAEKEKKADPAAEKEKKARKPRSRKPKSAGLHHPPYFEMIKEAILSQDGGKVGASPYAIAKHMGEKHRDVLPPNYRKVLAVQLRGFAAKGRLVKVKASFKLAAAEERKPSKKKASAGMAKRKRAAAPAKMKPAAAASAPSASAPSREARKVRAKRARKVAPAPAQPKPKPARAAASGAGKKVNKASA

SEQ ID NO: 8158 - protein, 222 aa, Zea mays
  Clone ID: TF_ZmC366_2.pep
MATVTEEVAPVVTVSEEPAPEAAKEVVEKPEEGKKPDEEGDERKKADPAAEKEKKARKPRSRKPKSAGLHHPPYFEMIKEAILSQDGGKVGASPYAIAKHMGEKHRDVLPPNYRKVLAVQLRGFAAKGRLVKVKASFKLAAAEERKPSAAAKAKKKASAGMAKRKRAAAPAKKKPAAAASAPSREARKVRAKRARNVAPAPAQPKPKPARAAAFGAGKKVNK

SEQ ID NO: 8159 - protein, 179 aa, Zea mays
  Clone ID: TF_LIB5075-005-R1-XP1-C6.pep
RTPLQFLEPSLPLVIPLVTMPALAKPASRTAKPAAAPKPKPAAAKPKADTAGASHPPYFEMIKEAITALKERTGCQAKEGRCCWDQAQSAREEGRGEAEEVPRRQGQGQAEDREVPCLQEGTEGLRMRWVALGLSSDCGWCQLSTVQTKCVPKVSQAARYVLSKLYLSECFSLVCPEVP

SEQ ID NO: 8160 - protein, 256 aa, Zea mays
  unsure (1)..(256): unsure at all Xaa locations
  Clone ID: TF_ZmC159_3.pep
AVAARRRGTQRLRGRRWXKPAGRGFGGLPRPRLAGGCGTGTGTSRGSGASSSSSTSSAQSSSSSSSSPSSAGDSGAGCAGGGGSAYFPPATATSSPAADMRERWAATSAGCEAGRSPRACASMRRAMAAWLEPFSSARAAIAATIICSSQGRRTGQSIPQIGADLAERSSGEESKEVGLERREGGLPRGRKGARGRRSPGASRRHWEWEWSCLRWRWPPRLLAVASSPARRVWVRGERELGAQRTGEGGGAATTRX

SEQ ID NO: 8161 - protein, 139 aa, Zea mays
  unsure (1)..(139): unsure at all Xaa locations
  Clone ID: TF_jC-zmXLIB3527P017Dg06a1.pep
PLQFLEPSLAVIPLVTLPALAKPASRTXKPAAAPKPKPAAAKPKAXTXGXXXXXYXXMIKEAITALKERTGSSSQAIAKYVGDKHGASLPANFKKMLSIQLRGSAAKGKLVKVKASYKLSDAAXKAXPKTKAKPAKGRA

SEQ ID NO: 8162 - protein, 172 aa, Zea mays
  unsure (1)..(172): unsure at all Xaa locations
  Clone ID: TF_LIB4766-069-R1-K1-F8.pep
MSTEEAVVVDVPVTEVPAEVPAALVAEAPMAKKASKEKNAPKEKKLSAAKKPAAHPPYAEMIVEAISALXERKGSSSVAISKYVKGKHVGKLPSNFRKHLTVHLKKLAAAGKLTRVKNSFMLPATDAKSKGVKSKGPYDAPNIQVLVLREGQYRCRILGGVALTLGQGQGQD

SEQ ID NO: 8163 - protein, 170 aa, Zea mays
  Clone ID: TF_ZmC4197_3.pep
MPALAKPASRTAKPAAAPKPKPAAAKPKAATAGASHPPYFEMIKEAITALKERTGSSSQAIAKYVGDKHGASLPANFKKMLTTQRGGSAAKGKLVKVKASYKLSDAAKKASPKTKAKPAKAAAAKTTAPKRKVPEKKVVAKPKKSPAAKAKAKPKTVKSPASKKARKASA

SEQ ID NO: 8164 - protein, 154 aa, Zea mays
  Clone ID: TF_LIB3912-032-Q6-K6-H10.pep
MPALAKPASRTAKPAAAPKPKPADAKPKAATDGAYHPTYFEMIKEAITALKERTGSSSQAIAKYVGDKHGASLPDNFKKMLSIQLRGSAAKGKLVKVKASYKLSDAAKKASAKTKAKPAKAAAAKTTAHKPAKDADDKSNNAAAAKPNNAAAAG

SEQ ID NO: 8165 - protein, 155 aa, Zea mays
  unsure (1)..(155): unsure at all Xaa locations
  Clone ID: TF_LIB3959-022-Q1-K6-A5.pep
MPALAKPASRTAKPAAGPNXTCPPGGGGTAXASHPPYFEMIKGAITGLKERTGSSSQAIAKYVGDKHGASLPANFKKMLSIQLRGSAAKGKLVKVKASYKLSDAAKKASPKTKAKPAKAGAAKTTGSKPAKPAAAKSKKAAGAKPKKTGAAGTKR

SEQ ID NO: 8166 - protein, 158 aa, Zea mays
  unsure (1)..(158): unsure at all Xaa locations
  Clone ID: TF_ZmC163344_1.pep
MMVTREHPMRSRECQLCHENPLSSPSMTKMIVEAIAALKERKGSSSVAISKYVEGKHGGKLPTNFRKQLTVQLKKLAAAGKLTRVKNSFKLPATDAKPKAAKPKAPKAAPKPKPSPKAKAKTAAKPKAASPKPKAKAKAXEPVAPAAASPKPRGRPPK

SEQ ID NO: 8167 - protein, 185 aa, Zea mays
  unsure (1)..(185): unsure at all Xaa locations
  Clone ID: TF_ZmC163344_2.pep
MMVTREHPMRSRECQLCHENPLSSPSMTKMIVEAIAALKERKGSSSVAISKYVEGKHGGKLPTNFRKQLTVQLKKLAAAGKLTRVKNSFKLPATDAKPKAAKPKAPKAAPKPKPSPKAKAKTAAKPKAASPKPKAKAKAKPVAPAAASKXXPXGRPSKVAKTSAKASPAKPAKKAAAPCQEGKGS

SEQ ID NO: 8168 - protein, 108 aa, Zea mays
  unsure (1)..(108): unsure at all Xaa locations
  Clone ID: TF_LIB4730-062-R1-K1-F6.pep
QRRLKTNKAPKEKKPSAAXKKPAAHPPYAVMIGEAIAALKERKGSSSEAINKYVXERNHCGKLPTNFRKQLNVQVKKVAYVSKLTRVKNCLKLPCTDAKPKAGKPKAP

SEQ ID NO: 8169 - protein, 137 aa, Zea mays
  Clone ID: TF_cC-zmle189061e03d1.pep
QTPLQFLEPSLPLEIPLVTKPALAKPASRTAKPAEAPKPKPAAAKPKAATAGASHPPYFEMIKEAITALKERTGSSSQAIAKYEGDKHGASLPANFKKKLSIQLRGSAAKGKLEKVKASYKLSDAAKKASPKTNAKP

SEQ ID NO: 8170 - protein, 115 aa, Zea mays
  Clone ID: TF_jC-zmX189017Q1E1C8b1.pep
MATDVAETPAPLVDAAPEAPADAPAAPAADAKPAKAKKATAPKKRASPTHPPYAEMVSEAITSLKERTGSSSYAIAKFVEDKHKDKLPPNFRKLLNVQFKKLVAGGKLTKVKNLY

SEQ ID NO: 8171 - protein, 196 aa, Zea mays
  Clone ID: TF_ZmC4197_1.pep
MPALAKPASRTAKPAAAPKPKPAAAKPKAATAGASHPPYFEMIKEAITALKERTGSSSQAIAKYVGDKHGASLPANFKKMLSIQLRGSAAKGKLVKVKASYKLSDAAKKASPKTKAKPAKAAAAKTTAPKPAKAAAAKSKKAAAAKPKKAAAAGTKRKVPEKKVVAKPKKSPAAKAKAKPKTVKSPASKKARKASA

SEQ ID NO: 8172 - protein, 196 aa, Zea mays; identical to SEQ ID NO: 8171
  Clone ID: TF_ZmC4197_2.pep

SEQ ID NO: 8173 - protein, 178 aa, Zea mays
  Clone ID: TF_ZmC4197_4.pep
MPALAKPASRTAKPAAAPKPKPAAAKPKAATAGASHPPYFEMIKEAITALKERTGSSSQAIAKYVGDKHGASLPANFKKMLSIQLRGSAAKGKLVKVKASYKLSDAAKKASPKTKAAAAKSKKAAAAKPKKTAAAGTKRKVSEKKVVAKPKKSPAAKAKAKPKTVKSPASKKARKASA

SEQ ID NO: 8174 - protein, 196 aa, Zea mays; identical to SEQ ID NO: 8171
  Clone ID: TF_ZmC4197_5.pep

SEQ ID NO: 8175 - protein, 194 aa, Zea mays
  unsure (1)..(194): unsure at all Xaa locations
  Clone ID: TF_LIB4730-076-R1-K1-C7.pep
MSTEEVVVAEVPVTEVPSEVPAAQVAEAPKAKKAPKENKAPNEKKPSAANKPAEHPPYADMIVQAIAALKERXIGSSSVAISKYVEGNHGGKLPTNFRKHLTVQLKKLAAAGKLTRVKNSFKLPATDAXPKAAKPKAPNAAPKPKSSSKAKVKTAAKPKAASAXPNAKDKVKAKAKPVVPAAASPKPRGRPPKV

SEQ ID NO: 8176 - protein, 103 aa, Zea mays
  Clone ID: TF_9462059.pep
KEAITALKERTGSSSQAIAKYVGDKHGASLPANFKKMLSIQLRGSAAKGKLVKVKASYKLSDAAKKASPKTKAKPAKAAAAKTTASKPAKAAAAKSKKAAAAK

SEQ ID NO: 8177 - protein, 179 aa, Zea mays
  Clone ID: TF_ZmC1022_20.pep
LGFGLVADDSLYEFFTLVSLPPYAEMVSEAITSLKERTGSSSYAIAKFVEDKHKAKLPPNFRKLLNVQLKKLVAGGKLTKVKNSYKLSSATKPNPKPDPAPKKPKTGVKKPKAAAKPKAKSPAKPKKAKTSAKATPGKKAPVTKKPAAPAKKAPVAKRAAPAKKAAAPARKAPSRKAKK

SEQ ID NO: 8178 - protein, 142 aa, Zea mays
  Clone ID: TF_LIB4729-137-A1-K1-H11.pep
MSTEEAVVAEVPVTEVPAEVPAAQVAEAPKAKKAPKEKKAPKEKKLSAAKKPAAHPPYAEMIVEAIAALKERKGSSSVAISKYVEGKHGGKLPTNFRKAAKKAAAPAKKGKAAAAPKKVATPKKAAAAAAPARKGVARKAKK

SEQ ID NO: 8179 - protein, 186 aa, Zea mays
  Clone ID: TF_ZmC1022_10.pep
MATEVAETPAPLAEAVPETPAEAPAAPAAEAKPTKAKKASAPKKRANPTHPPYAEMISEAVTSLKERTGSSQYAIAKFVEDKHKDKLPPNFRKLLLGQLKKLVAGGKLTKVKNSYKLPARAPAAAKPKPKSKTAVKKPKAGAKKPKAATKPKPKPKAKSPAKAKPAAKPKAAAKPAAKPKPAAAKP

SEQ ID NO: 8180 - protein, 108 aa, Zea mays
  unsure (1)..(108): unsure at all Xaa locations
  Clone ID: TF_LIB3150-009-Q1-N1-D8.pep
MSTDEAVVAEVPKTEVPSKVPAAQVADAPKAKKAPKEKKAPNEKKLSEAKKPAAHPPYTEMIVEAIAALKERKGSSSVAISKYVXGNHGCKLPTNFLKQLTVQLMKLT

SEQ ID NO: 8181 - protein, 105 aa, Zea mays
  Clone ID: TF_LIB3060-018-Q1-K1-D2.pep
MPALAKPASRTAKPAAAPKPKPAAAKPKAATAGASHPPYFEMIKEAITALKERTGSSSQAIATYVGDKHGTCLTANFKKMLSIQLRGSAAKVKHVKVKASYKLSD

SEQ ID NO: 8182 - protein, 191 aa, Zea mays
  Clone ID: TF_11544761.pep
MATDEATKPSPIPPYPEMILAAIEGLDDKSGSNKSAISKYIEGKYGSLPPAHASLLTAHLARMKESGELVFLKNNYFRAGAPDAPPKRGRGRPPKARDPNAPAPAPKSPSSTGRGRGRPPKAKSPLEAAVKQATAGMPKPRGRPPKKAKTEGAASPSPSPAPAGDGSTPGKRGRGRPPKVRPAVPSETAAA

SEQ ID NO: 8183 - protein, 193 aa, Zea mays
  unsure (1)..(193): unsure at all Xaa locations
  Clone ID: TF_ZmC8319_1.pep
MATDEATKPSPIPPYPEMILAAIEGLDDKSGSNKSAISKYIEGKYGSLPPAHASLLTAHLARMKESGELVFLKNNYFRAGAPDAPPKRGRGRPPKARDPNAPAPAPKSPSSTGQLECCVGRLIIXAEAAVKQATAGMPKPRGRPPKKAKTDGAASPSPSPAPAPAGDGSTPGKRGRGRPPKVRPAVPSETAAA

SEQ ID NO: 8184 - protein, 288 aa, Zea mays
  Clone ID: TF_ZmC13520_1.pep
MGAPKQKWTSEEEDALRAGVRKHGAGKWRTIQKDPEFSPVLSSRSNIDLKDKWRNLSFSASGLGSSKLRVPKITGPSSSPSSSSQPLLLPAANKFTEATLPADAEKKPQDGKTLPKYGAMIMEALLELNEPNGSDIAAIFGFIEQRYAVQPTFRRFLASKLRRLADSNKIEKIDKSYRLPDSLATRTPAPMNASAPKQKDPSKPSKVSKAIGLFSASSPALEAAMAAAVKVADAEAKAHDAHDQTMEAERIFKMAEDTESLLIIAAEIYDRCSRGEITTLVPVAQREI

SEQ ID NO: 8185 - protein, 189 aa, Zea mays
  Clone ID: TF_ZmC1022_11.pep
MATEVAETPAPLAEAVPETPAEAPAAPAAEAKPAKAKKASAPKKRANPTHPPYAEMISEAVTSLKERTGSSQYAIAKFVEDKHKDKLPPNFRKLLLGQLKKLVAGGKLTKVKNSYKLPARAPAAAKPKPKSKTAVKKPKAGAKKPKAATKPKPKPKAKSPAKAKPAAKTKAAAKPTAKPKPAAAKPKAA

SEQ ID NO: 8186 - protein, 179 aa, Zea mays
  Clone ID: TF_ZmC1022_13.pep
MATEVAETPAPLAEAVPETPAEAPAAPAAEAKPTKAKKASAPKKRANPTHPPYAEMISEAVTSLKERTGSSQYAIAKFVEDKHKDKLPPNFRKLLLGQLKKLVAGGKLTKVKNSYKLPARAPAAAKPKPKSKTAVKKPKAGAKKPKAATKPKPKPKGKSPAKAKPGAKPKAAAKPKPAA

SEQ ID NO: 8187 - protein, 183 aa, Zea mays
  Clone ID: TF_ZmC1022_18.pep
MATEVAETPAPLAEAVPETPAEAPAAPAAEAKPTKAKKASAPKKRANPTHPPYAEMISEAVTSLKERTGSSQYAIAKFVEDKHKDKLPPNFRKLLLGQLKKLVAGGKLTKVKNSYKLPARAPAAAKPKPKSKTAVKKPKAGAKKPKAATKPKPKPKAKSPAKAKPAAKPKAAAKPKPAAAKPK

SEQ ID NO: 8188 - protein, 273 aa, Zea mays
  Clone ID: TF_ZmC1022_2.pep
MATEVAETPAPLAEAVPETPAEAPAAPAAEAKPTKAKKASAPKKRANPTHPPYAEMISEAVTSLKERTGSSQYAIAKFVEDKHKDKLPPNFRKLLLGQLKKLVAGGKLTKVKNSYKLPARAPAAAKPKPKSKTAVKKPKAGAKKPKAATKPKPKPKAKSPAKAKPAAKPKAAAKPAAKPKPAAAKPKAAAKPKAKPAAKAKPKAAAAKPKPAAKKAGRPAKAAKTSAKDTPGKKAAPAKKPAAAAKKAPAKKAAPAKKAATPSRKVPSRKAKK

SEQ ID NO: 8189 - protein, 151 aa, Zea mays
  Clone ID: TF_LIB4730-130-A1-K1-A1.pep
MPAIAKPASRTAKAAGFPKPKTAAAKPKADTAGASHPAYFEMIEEVITEIKEMTGSSSQVIAKYVGDKHGASLPVNFKKMLSIQLRGSAAKGKLVKVKDSYKLSDAAKKASPKTKAKPAKAAAAKTTAPKPAKAAAAKSKNAAAVKPKKAA

SEQ ID NO: 8190 - protein, 158 aa, Zea mays
  unsure (1)..(158): unsure at all Xaa locations
  Clone ID: TF_LIB5026-070-Q1-XP1-H9.pep
MPALVKSASRTAKSDASPNTKSVAAXSKASTAGASHPPYFYMVWEVISMLMERTASXHXAIAEDVMDIDATILPPDFNKMLSIHIRGSVCXGKLEKVKASYKLSDTANIASPXNKGNSAKDDAAKTTATXPDNAVDVKSKNAATGKTMNDGAAETNRK

SEQ ID NO: 8191 - protein, 170 aa, Zea mays
  Clone ID: TF_ZmC159_2.pep
MATPTSSGDGSPPGSSDLVPPSYPEMIVAALAALAEENGSSQAAIARRIEAEARGDLPASHPALVAAHLSRMSAAGELVAVAGGKYALPPPVPPPPESPADDEEDDYADDEEEEEEAPEPEPLPQPPAKRGRGRPPKPRPTGFPAGVPGAAGPGPIGVPGAAAAAAAPRR

SEQ ID NO: 8192 - protein, 131 aa, Zea mays
  unsure (1)..(131): unsure at all Xaa locations
  Clone ID: TF_LIB4766-078-R1-K1-E1.pep
MSTEEDVVAEVXVTEVAAEDPAAQVVEVPKAKKASKEKKAPKEKKLSAAKKPAAYPTYAEMIVEAVAALKERKGSSSVVISEYAEGKYGGKQHTNYRKQXTVQMKKLAAARQLTRVKKFLKLPAIDRKPRP

SEQ ID NO: 8193 - protein, 180 aa, Zea mays
  unsure (1)..(180): unsure at all Xaa locations
  Clone ID: TF_LIB4732-039-R1-K1-A11.pep
MSTEDAVVAEVPETEVPVDVPADQVDEVAQVQXAPKDKKAPKENNLSAGNKPAAHPPYAEMIVDAIAALKERKGSSSVAISKYVEVKHGGKLPTNFGKKLTVQLKKLAAVVKLTMVKNSFKLADTDVKAKAAMPKEPKDVPMTKPSPKANAKTAAKLKATSSKSNVNDYVKANVNSVAPD

SEQ ID NO: 8194 - protein, 180 aa, Zea mays
  Clone ID: TF_LIB5116-004-A1-PF1-B7.pep
MPALAKPAAAAPKPKPAAAKPKAAAAGAAHPTYFEMIKEAIAALKDRTGSSSVAIAKYIEEKHGKALPANFKKMLSVQLRASAAKGKLVKVKASYKLSDAAKKDAPKPKAAAKPSKDAAKPKKKAAEKPKKTAAAGTKRKAPEKKKLVTKAKKSPAAKAKAKPKTVRSPAAKKARKVAAA

SEQ ID NO: 8195 - protein, 190 aa, Zea mays
  unsure (1)..(190): unsure at all Xaa locations
  Clone ID: TF_LIB4172-047-R1-L1-C9.pep
FGTRLQMIVEAIAALKERKGSSSVAISKYVEGKHGGKLPTNFRKQLTVQLKKLAAAGKLTRVKNSFKLPATDAKPKAAKPKAPKAAPKPKPSPKAKAKTAAKPKAASPKPKAKAKAKPVAPAAASPKPRGRPPKVAKTSAKASPAKAAKKAAAPAKKGKAAAAPKKVATPKKXAAAAXPARKGVARKAKK

SEQ ID NO: 8196 - protein, 162 aa, Zea mays
  Clone ID: TF_LIB4767-003-R1-N1-F9.pep
DLKKKKKKKKKKKKKKKKKKKKKKKKKKKKKKKKKIQFSPTASAAKKREGKGISEKGWEKKKEPQMSTKKVFGVKAPGTKGPGKAPGAKGAKAPKGKKAPKEKKAPKEKKFSGEKKPGGNPPYPKKIEKAILALKKRKGSTSGAIKKYVKGNNGGKFPTNFR

SEQ ID NO: 8197 - protein, 136 aa, Zea mays
  Clone ID: TF_ZmC8559_1.pep
MATEEVAKPSPIPPYPEMILAAIEDLGDKSGSNKSAISRHIEGKYDGDLPPAHASLLAAHLARMKESGELVFVKNNYFRADAPDAPPKRGRGRPPKARDPGTPVSPPSGRGRGRPPKPKDPLDAAVKQATAGMPRA

SEQ ID NO: 8198 - protein, 298 aa, Zea mays
  Clone ID: TF_ZmC238_3.pep
MGVPKQRWTPEEEAALKAGVAKHGPGKWRTILRDSDFSALLRLRSNVDLKDKWRNLSVTAGGYGSREKARMALKKGRRVVPKLTAEPMDVDEKDMDNAHDTVIDVEPLAMAFEPLPLLESPDKSVARLDDLIVEAIRKLNEPSGSNKAVISGYIEDQYWPPADFQYLLSTKLKSLVNSGKLIKVNQKYRIAPSSSLGGISTKVSSSEGMNTENNNVKRLTKPQVVAELEKMKGMTREEAAAFAAKAVAEAEVAMAEAEEAARVAEAAENDAEAAKAFLDAVILSMRNRNAASMILRAC

SEQ ID NO: 8199 - protein, 109 aa, Zea mays
  unsure (1)..(109): unsure at all Xaa locations
  Clone ID: TF_LIB4730-072-R1-K1-F11.pep
APKEKKLSAAKKPAAHPSYAEMIGEAIAALKERKGASSVAISKYVEGKHGGKLPTNFREQLTVQLKKLAAAGKLTRVKNSFKVPATDAXPKPAKPKAPQGRAQDPKPSP

SEQ ID NO: 8200 - protein, 110 aa, Zea mays
  unsure (1)..(110): unsure at all Xaa locations
  Clone ID: TF_LIB3060-027-Q1-K1-F9.pep
YPQCPREEAVDAEVXLTDVPAEVPAVQVADAPKAKNAPTEKKAPKEKKLSAAKKPAAHPTYAEMIVEAIAALKERKVSSSVAIIKYVXGEHGGKAHTNLRKQLTVQLKKL

SEQ ID NO: 8201 - protein, 133 aa, Zea mays
  unsure (1)..(133): unsure at all Xaa locations
  Clone ID: TF_LIB4766-079-R1-K1-A11.pep
MSTEEDVVGEVPVTDVPWEVPEAQADEEPKAKNAPKEKNVPKEKKISXAVNKPVACPPYAEMIVQAIAALNDRKGSSSAYINKYIQVKHGDKLPCNFCKELTVHVKKVAGVGKLTREKNCFKMASTDVKPEAA

SEQ ID NO: 8202 - protein, 183 aa, Zea mays
  unsure (1)..(183): unsure at all Xaa locations
  Clone ID: TF_LIB4742-052-R1-K1-C9.pep
MSTEEAVVAEVPVTEVPAEVPAAQVGEAPKAKKASKEKKAPKENKLSAAKKSEVHPPYAEMIVEAIAALKERKGSSSVAISKYLEGKHGGKLPTNFRKQLTVQLNKLAAAGKLTRLKNSFKLPATDVKPKGAKPXAPMAAPKLKSSPKAKAKTSAKTMVASTKPKAKAKVKSVAPAVASPKPR

SEQ ID NO: 8203 - protein, 97 aa, Zea mays
  unsure (1)..(97): unsure at all Xaa locations
  Clone ID: TF_LIB5116-023-A1-PF1-D3.pep
FRSWQMIKEAIAALKDRTGSSSVAIGKYIEEKHGKSLPANFKXMLSVQLRSFASKGKLVKVKASYKLSDAAKKDAPKPKPKAKPAAPKGRGEARQGR

SEQ ID NO: 8204 - protein, 128 aa, Zea mays
  unsure (1)..(128): unsure at all Xaa locations
  Clone ID: TF_LIB4729-008-R1-K1-B2.pep
MSTEEAVVAEVPVTEVPAEVPAAQVAEAPKANKAPKEKKAPGEKKLSAAKKPAAHPPYAEMIVEAIAALXERFGSRSVAISKSSEGIHGGGLPXXLRTQVSVRLVRLPAARPLSRLVHCFQLXATFAC

SEQ ID NO: 8205 - protein, 158 aa, Zea mays
  Clone ID: TF_ZmC1022_12.pep
MTTDVAETPAPLVDAAPEAPADTPAAPAADAKPAKAKKATAPKKRASPTHPPYAEMVSEAIASLKERTGSSSFAIAKFLEDKHKDKLPPNFRKLLNVQLKKLVAGGKLTKVKNSYKLSSATKPKAAPKKPKTGVKKPKAAAKPKAKSPAKPKPATNPK

SEQ ID NO: 8206 - protein, 161 aa, Zea mays
  Clone ID: TF_ZmC1022_14.pep
MATDVAETPAPLVDAAPEAPADTPAAPAADAKPAKAKKATAPKKRASPTHPPYAEMVSEAIASLKERTGSSSFAIAKFLEDKHKDKLPPNFRKLLNVQLKKLVAGGKLTKVKNSYKLSSATKPKPKPKAATKKPKTGVKKPKAAAKPKAKSPAKPKPATKP

SEQ ID NO: 8207 - protein, 237 aa, Zea mays
  unsure (1)..(237): unsure at all Xaa locations
  Clone ID: TF_ZmC1022_7.pep
MATDVAETPAPLVDAAPEAPADTPAAPAVDAKPAKAKKATAPKKRASPTHPPYAEMVSEAIASLKERTGSSSFAIAKFLEDKHKDKLPPNFRKLLNVQLKKLVAGGKLTKVKNSYKLSSATKPKAAPKKTKTGVKKPKAAAKPKAKSPAKPKPATKPKAAAKSXAPKTPGVKPKPLAKKAGRPAKAAKTSAKDTPGKKAPVAKKSAAAAKKAPAKKAAPSKKAATPARKAPSRKAKK

SEQ ID NO: 8208 - protein, 161 aa, Zea mays
  Clone ID: TF_ZmC1022_8.pep
MATDVAETPAPLVDAAPEAPADTPAAPAVDAKPAKAKKATAPKKRASPTHPPYAEMVSEAIASLKERTGSSSFAIAKFLEDKHKDKLPPNFRKLLNVQLKKLVAGGKLTKVKNSYKLSSATKPKAAPKKTKTGVKKPKAAAKPKAKSPAKPKPATKPKAAL

SEQ ID NO: 8209 - protein, 194 aa, Zea mays
  unsure (1)..(194): unsure at all Xaa locations
  Clone ID: TF_ZmC4197_8.pep
MPALAKPASRTAKPAAAPKPKPAAAKPKAATAGASHPPYFEMIKEAITALKERTGSSSQAIAKYVGDKHGASLPANFKKMLSIQLRGSAAKGKLVKVKASYKLSDAAKKASPKTKAKPAKAAAAKTTAPKPAKAAAAKSKKAAAAKPKKAAAAGTKRKVPEXKVVAKPKXKSPAAKAKAKPKDLGSPWPPERHG

SEQ ID NO: 8210 - protein, 95 aa, Zea mays
  Clone ID: TF_LIB3245-307-P1-N1-F12.pep
MPPKKASTSAAASSASKKAAPSHSSYRDMIKDAIINLKDRNGSSRQSIKKYVQNNNKITVVSQAAFDAQFNKAIKAGVEKGEFSQPKGPSGPVKL

SEQ ID NO: 8211 - protein, 150 aa, Zea mays
  unsure (1)..(150): unsure at all Xaa locations
  Clone ID: TF_LIB3354-039-P1-K1-B7.pep
GKAGGDHAAEKPGNQQRTEEAGAGHAPATEEPAEGPRAQAAEXAPKANKAPKENKAPKEKKLSAANKPAAHPPYAETTAEASATLKERKGSSSVAISKYFXGNHSGKLPTNFRKQLTTQLKKLAANTKLTRVKNSFKLTGTDAKPKAAKP

SEQ ID NO: 8212 - protein, 164 aa, Zea mays
  Clone ID: TF_ZmC366_4.pep
IRHEGLLGTWGDRGQMIKEAILSQDGGKVGASPYAIAKHMGEKHRDVLPPNYRKVLAVQLRGFAAKGRLVKVKASFKLAAAEERKPSAAAKAKKKASAGMAKRKRAAAPAKKKPAAAASAPSREARKVRAKRARKVAPAPAQPKPKPARAAASGAGKKVNKASA

SEQ ID NO: 8213 - protein, 130 aa, Zea mays
  unsure (1)..(130): unsure at all Xaa locations
  Clone ID: TF_LIB4602-009-Q1-K1-G5.pep
SALSTEDAVVADVPVTDVPSDVPAAHVADAPKANNAPKENMAPKEKKPSAAINPAAHPPYAEMIVDAIAALMERKGSSSVAIMLYVEGIHGGXLPTIFRMLLTVQLMMLAAAGXLARVMFSFXLPASVAL

SEQ ID NO: 8214 - protein, 96 aa, Zea mays
  unsure (1)..(96): unsure at all Xaa locations
  Clone ID: TF_LIB3076-020-Q1-K1-B1.pep
PRDHSSYSDMFEEAIVALKQMISSSCGGIIKYVDGNHDTXLPTKLLKHLTAHLKKLDDALKLTKVKNSLKLPVTDANPKADKSKAPKVAPNPNPSS

SEQ ID NO: 8215 - protein, 339 aa, Zea mays
  unsure (1)..(339): unsure at all Xaa locations
  Clone ID: TF_ZmC154725_1.pep
IVQTPLTATSRRIHGRQRRLRPFPASSPGLNFTAAPTENPHFLFSKPHSPQRAAGSMAGKDGSPPPPPLPSYPEMIVEAIRALGLENGCNKTAISDYIKGSYGSNLPAQHNAVLTGHLARMKATGELAFLRNNYLLPNEDEASPLSTGGHKGPAAAEEESTGVLDVGDDVLLASPLVIDADAVDIDVPAPAPVVTADVDDIDVPAPAPVVTADVNPVHTKRGRGRPPKPKDPVAEGYGGKPATAPVAAAAVPVKRGRGRPPKPKNPVAEDSAPTAASVVTTDGNAVPXKRGRGRPPKLKDPINVATDQATSGMLSPTWPWAPAQAAQVLVEDPRGDLLN

SEQ ID NO: 8216 - protein, 84 aa, Zea mays
  Clone ID: TF_LIB3958-009-Q1-K6-G6.pep
MMVTREHPMRSRECQLCHENPLSSPSMTKMIVEAIAALKERKGSSSVAISKYVEGKHGGKLPTNFRKQLTVQLKKLAAAGKLTR

SEQ ID NO: 8217 - protein, 88 aa, Zea mays
  unsure (1)..(88): unsure at all Xaa locations
  Clone ID: TF_LIB4765-025-R1-K1-H5.pep
MVAAVASPSSAAPSAGRPHPTYKEMIMQALTELRDPSGSSRSAIASYIADHFSXLHSRHDALLSVHLRSLKSHGQLRLVSGNYFVSTA

SEQ ID NO: 8218 - protein, 168 aa, Zea mays
  Clone ID: TF_ZmC1022_15.pep
MATDVAETPAPLVDAAPEAPADAPAAPAADAKPAKAKKAAAPKKRASPTHPPYAEMVSEAVTSLKERTGSSSYAIAKFVEDKHKDKLPPNFRKLLNVQLKKLVAGGKLTKVKNSYKLSSATKPNPKPKAAPKKAPDNARPLPRRSRRPRCGKRRPPRKAAKPGRDAKI

SEQ ID NO: 8219 - protein, 216 aa, Zea mays
  unsure (1)..(216): unsure at all Xaa locations
  Clone ID: TF_LIB4729-085-Q1-K1-C11.pep
MSTEEVVVAEVPVTEVPAXVPAVQVAEAPMANKAPXEKKAPKDKNLSAAKKPAAHPPYAEMIVEAIAALKERKGSSSVFISKYVEGKHGGKLPTNFRKQLSVQLKKLAASVKLSRLNNSFXLPATDAKPKGAKPKAPKGASKPKPSPKVKGXTAAKSKAASPKXKVKVNDKPVSPAAASPKLSRGXPPKVAKTSAKVSPVQAAKKASAPAYKGKAA

SEQ ID NO: 8220 - protein, 361 aa, Zea mays
  Clone ID: TF_ZmC13520_3.pep
MGAPKQKWTSEEEDALRRGVRKHGAGKWRTIQKDPQFSPILSSRSNIDLKDFRVLGGLPAGCCSFVGSTVVDLGHRRRDFVFGVTDKCRRRLKWPCYAAEGCFDVIILLKDNDAVVVMDTQCRITCGTCQRRGTLVSDSTCSAVIAVGIGFSVINLKDILLMIPHCTGIHGWEDIALKKFLRVFNLSNLRPWYGAMIMEALSELNQPNGSDIDAIFDFIKQRHVVQSTFRRFLPSKLRRLADSNKIEKVDNFYRLPDSFATRTPAQIKVSDPKQKDPSKASKTIGLFAASSPALEAAMAAAVKVTDAEAKAHDAHDQMMEAERMLKMAEDTESILTIAAEIYDRCSRGEITTLVPVAQREF

SEQ ID NO: 8221 - protein, 174 aa, Zea mays
  unsure (1)..(174): unsure at all Xaa locations
  Clone ID: TF_LIB4730-078-R1-K1-C8.pep
LLSSLRHIHYDPQCSREDGDVDDVPATDPAAEVPEVHVAXAPKVNKAPKENKAPNEKKPSAAKKPAAHPPYAEMIVQAIAALKERKGSSSVAITKYVEGKHGGKLPTNFRKQLTVQLKKLAAAGKLTRVKNSFKLPATDAKPKGAKPKAPKAAPKPKPSPKAKAKTAAKPKAAS

SEQ ID NO: 8222 - protein, 185 aa, Zea mays
  Clone ID: TF_LIB3689-248-Q1-K6-E3.pep
MSTEEAVVAEVPVTEVPAEVPAAHVADAPKAKKAPKEKKAPKEKKLSAANKPAAHPPYAEMIVEAIAALKERKGSSSVAISKYVEGKHGGKLPTNFRKQLTVQLKKLAAAGKLTRVKNSFKLPATDANPNAAKPIAPIAAPNPKPSPNAIAKTAAKPKAASPKPNANANAKPVAPAAASPNPRWR

SEQ ID NO: 8223 - protein, 178 aa, Zea mays
  Clone ID: TF_LIB4762-093-Q1-K1-C4.pep
MSTEEAVVAEVPVTEVPAEVPAAQVAEAPKAKKAPKEKKAPKEKKLSAAKKPAAHPPYAEMIVEAIAALKERKGSSSVAISKYVEGKHGGKLPTNFRKQLTVQLKKLAAAGKLTRVKNSFKLPATDAKPKAAKPKAPKAAPKPKPSPKAKAKTAAKPKAASPKPKAKAKAKPVAPAAA

SEQ ID NO: 8224 - protein, 244 aa, Zea mays
  Clone ID: TF_ZmC2187_1.pep
MSTEEAVVAEVPVTEVPAEVPAAQVAEAPKAKKAPKEKKAPKEKKLSAAKKPAAHPPYAEMIVEAIAALKERKGSSSVAISKYVEGKHGGKLPTNFRKQLTVQLKKLAAAGKLTRVKNSFKLPATDAKPKAAKPKAPKAAPKPKPSPKAKAKTAAKPKAASPKPKAKAKAKPVAPAAASPKPRGRPPKVAKTSAKASPAKAAKKAAAPAKKGKAAAAPKKVATPKKAAAAAAPARKGVARKAKK

SEQ ID NO: 8225 - protein, 247 aa, Zea mays
  Clone ID: TF_ZmC1022_3.pep
MATDVTETPAPLVDAAPEAPADAPAAPAADAKPAKAKKATAPKKRASPTHPPYAEMVSEAITSLKERTGSSSYAIAKFVEDKHKAKLPPNFRKLLNVQLKKLVAGGKLTKVKNSYKLSSATKPNPKPKAAPKKPKTGAKKPKAAAKPKAKTPAKAKPATKPKPAAKPKAVVKPKTPAKPKAKPAAKAKPKTAGAKPKPLAKKAGRPAKAAKTSAKDTPGKKAPAKKAAPSKKAATPVRKAPSRKAKK

SEQ ID NO: 8226 - protein, 270 aa, Zea mays
  Clone ID: TF_ZmC238_2.pep
MGVPKQRWTPEEEAALKAGVAKHGPGKWRTILRDSDFSALLRLRSNVDLKDKWRNLSVTAGGYGSREKARMALKKGRRVVPKLTADPMDVDEKDMDNAHDTVIDVEPLAMAFEPLPLLESPDKSVARLDDLIVEAIRKLNEPSGSNKAVIAGYIEVNQKYRIAPSSSLGGISTKVSSSEGMNTENNNVKRLTKPQVVAELEKMKGMTREEAAAFAAKAVAEAEVAMAEAEEAARVAEAAENDAEAAKAFLDAVILSMRNRNAASMILRAC

SEQ ID NO: 8227 - protein, 66 aa, Zea mays
  Clone ID: TF_uC-zmflteosinte082a08a1.pep
LPPPGNKNTKRRKTRRWSLFEEETLRKGVEEYGVGNWRDILDNNAEALTGRTPVDLKDKWRNMLFR

SEQ ID NO: 8228 - protein, 199 aa, Zea mays
  Clone ID: TF_ZmC38422_4.pep
MCTRMSFTGSAPESSDPNKQPAKKQTRQWAAWTHQEEENFFNALRQVGKNFDKITHRVQSKNKDQVRHYYYRLVRRMKKLLGPRFSLDAKNSKDTIAAMLRWWSLLEKFSCSASKLHLKPRRFKTFVEALGKQLLKDRNKSRKKHSRVDMCISSPSPVISKAPGDETPPVKLLSIDSQNGSRVASPKGTIFQADCRTNF

SEQ ID NO: 8229 - protein, 149 aa, Zea mays
  Clone ID: TF_LIB4980-057-A1-K1-E1.pep
MGRHSCCYKQKLRKGLWSPEEDEKLMNHITKHGHGCWSSVPKLAGMYNEIFLPLVLSYQLSILPFSSLCIFLISNCQLKPLLQIVAGLQRCGKSCRLRWINYLRPDLKRGAFAQDEEDLIIELHAVLRERWSQIAAQLARETDNEIKNL

SEQ ID NO: 8230 - protein, 157 aa, Zea mays
  Clone ID: TF_ZmC42_44.pep
EEEHRLFLLGLKKYGKGDWRNISRNFVQTRTPTQVASHAQKYFIRLNSGGKDKRRSSIHDITTVNLTDDQPPSPSQSSLITSQSNAPAPSPAPAPAAGICQVPLAADVKRHGAGTLPFSSPNRTSAVPAYRMEFHDQQGLQCGPLHDQLLASQSVLF

SEQ ID NO: 8231 - protein, 86 aa, Zea mays
  unsure (1)..(86): unsure at all Xaa locations
  Clone ID: TF_LIB4744-001-R1-K1-D4.pep
DGVHPARDHRRPGGDAGVLPDAAAGHLPDDVLLCGRAIWPALPIHARLLRSGKRCLLRWINYLRPNLXRGNFTAAEEEALIKLHAS

SEQ ID NO: 8232 - protein, 879 aa, Zea mays
  Clone ID: TF_ZmC720_1.pep
MGPAKGSRTINKTTVKGYEDQQQHDDPSSSSKAKQKKRKISDLDPKWSKDELTRFYEAYRQHGKDWKKISIAIGGKSSDMVRSLYSAHRTFLSLPEHQATAMGFIALVTGHHNASEKTTSHRGYDHIARASGKARKHGEQQKSIDGPDLHNCHEGEITGFSASFKKRYYGELVRNSRNHAVQRRTPLIPVIAPADRSTIDEPTPGIENVINFNSTKRKYEAANHGCAVAPTNKYSSDRVSGFAETYKADQGHSYLDTMEIGDIAMCQQHFKKTRIQQTVEESQTGIVEHETTMASKEGNKLVSSVNNNQILIDSISEDDMLVLDVLNSLVNAPSKMSELEINIPSGSLGKTDSVLREEGHPTIDLSKQGKPVRKSSASKTRKKKPKKILGAEVPAEAQKKCDDNLVLPETLRVGITDDSSLCTDSGRARTPEASEDISAEVPNTQTEAKPEFIMSGRTRLKSQMHCKTKPMSCNEGSDNFQAKKLLHCLSSEPLRRWCTYEWFYSAVDYPWFSNNEFVHYLDHAKLSHLSRLTRSEWSAIRSSLGKPRRFSNHFLAVEKEKLEDYREKVRKIYAQLNDGSRDSLPADLARPFSIGQQVIVRHPSSRELCDGKVVMMGPDCYKVHFDDPDLGVDTVKDTDCMPVNWLHNRPDNMRRNYLSNDVYNILEMDHIPDLTPSENGNHAINGTTVFEELKSLRLTSDRQPKAESIIHSERPPYRSTSDGPTSSSGFSCPDNNAGHNGELESYVAAFFENSLSQARQMVDDYIQANSGGSDDEKVCMLNQVTGCLGSDSRGVQLPSDLISNCIATVISIKRLSDSRHPFGNVAGVLEHALSMLRPSCPQNLGVYTEIKRDLCTIANQIFALVPTASGNCSPPVSPM

SEQ ID NO: 8233 - protein, 422 aa, Zea mays
  Clone ID: TF_ZmC5585_1.pep
MPRLTPAHATLILDHVLGDPSIPTAVTIALIAGIPSPSDPTPRLRRGVLLRRLATDPVSESSLETLHLLASLPACASPIAAAHIAVAAFLAASAPDFDAVARALFARPDGRARQAVHGGSSPALASDDAIATVDQFEAAVGMSSSQTILRVLWGNRAAVEERVQELLAAEWAAIGPSRLEALAMRIVGDGAVETWGAADEAMRANLRILAGEAKTREILDKLEKTTCNTNPISTPAVEKVMDALKASCADLHSIVEDPLPAAKAVADELLTARMEKLVSLNAQEVGGQPTTCGVAGPSIHNDKDNGPGIGKPHSLMERNATARTSQWEESLGLDGSEPPSPPRPHLPSPRRLPPSPLSPPGNKNNNRRKARRWSLFEEETLRKGVEEYGVGNWRDILDNNAEAFTGRTPVDLKDKWRNMLFR

SEQ ID NO: 8234 - protein, 87 aa, Zea mays
  Clone ID: TF_LIB4073-010-Q6-K1-H9.pep
MSGSRNSSRNVNIDSNWSKKENKLFEEALGGYGEGTPDRWHKVARAMGGIKTADEVRRHYEILNDDVTLIESGGVPFPNYNTQGAWN

SEQ ID NO: 8235 - protein, 111 aa, Zea mays
  Clone ID: TF_ZmC2063_4.pep
MGRHSCCYKQKLRKGLWSPEEDEKLMNHITKHGHGCWSTVPKLAGLQRCGKSCRLRWINYLRPDLKRGAFSEEEEDLIVELHAVLGNRWSQIATRLPGRTDNEIKNLWNSS

SEQ ID NO: 8236 - protein, 78 aa, Zea mays
  Clone ID: TF_ZmC141670_1.pep
MDSSSGSQDKKFRDNDRPEAKEANSTAQHLVDFTEAEEDLVSRMHRLVGNRWEIIAGRIPGRTAEEVEMFWSKKYQER

SEQ ID NO: 8237 - protein, 78 aa, Zea mays; identical to SEQ ID NO: 8236
  Clone ID: TF_ZmC141670_2.pep

SEQ ID NO: 8238 - protein, 75 aa, Zea mays
  Clone ID: TF_ZmC141670_3.pep
CFFFSYSRDQLYPFTIIAEANSTAQHLVDFTEAEEDLVSRMHRLVGNRWEIIAGRIPGRTAEEVEMFWSKKYQER

SEQ ID NO: 8239 - protein, 43 aa, Zea mays
  Clone ID: TF_6165685.pep
INYLRADVKRGNISKEEEDLIIRLHRLLGNRWSLIASHLPGRT

SEQ ID NO: 8240 - protein, 164 aa, Zea mays
  Clone ID: TF_LIB4835-010-R1-M1-G2.pep
VPLKVSSENEHAEAVDSKGVRNLQAKVCSAVSKPKIKHGLTRKHHRAWTLSEVVKLVDGVARYGAGKWSEIRKLSFASYSYRTSVDLKDKWRNLIRATQTQLPAQKDGACPRKTNPSIIPIPPSILLRVKELHELQSQGGGFTAPVKFSGQDGKVLQGKGSGFL

SEQ ID NO: 8241 - protein, 204 aa, Zea mays
  unsure (1)..(204): unsure at all Xaa locations
  Clone ID: TF_ZmC152_4.pep
MVSASAPPPQAQSDAAGSGEEVSKKVRKPYTITKSRESWTEQEHDKFLEALQLFDRDWKKIEAFVGSKTVIQIHLPXHRNSGMNVPVSSWAHSSIPQAVASSMVKDLGAGTPGSNNFCSSSTEGLPRTWQPGETNDPINQIPSLRLMPDFAGVXSFLGSVFDPSTSGHLQKLKEMNPIDVETALLLMRNLSINLTSPDFEDQRF

SEQ ID NO: 8242 - protein, 651 aa, Zea mays
  unsure (1)..(651): unsure at all Xaa locations
  Clone ID: TF_ZmC21713_1.pep
MKFDLSMEMDDSHGTMVNKSEENDFEKKGTSDPVVYQLVRVEGDGTLVPATEDDVLQFEHFLHNEKVDLPPIEDADHVEEFFNNDCMLLKKPDLEDGSSKLETVEAHTQKLGANLEENILQSLDDSLSPPSDFRIHSQHSDKLLTEQGANVTRQDNASTETTKSTVLNDSCCAEKYKADACSRSVCDTSTDPSVSGVNSSMPDFSILRGEVCLDDLTIRELQEAFRATFGRQTNVKDKIWLKRRITMGLTNSYDVPSSSCVLKDYKIEGXDAKNDMSDLDERAKTGLRATSVVIYQGNEGDSPSSSYYQSEDQEDSSKRVPIHNDEPQGNLLGEQCTDKRTRKPTKRYIEELSDIETHDSTVKNSSPAKKACXDELLMKPRVAPFNETGSLGTIYPTRKDTFGGFSVHVPYVSRMRRGRPRKDFISFADKGPSVEPKGIQPSVEMILVKDGDKGNHLRKVPEVPLKVSSENGHVEAVDSKGVRNLQAKVCSAVSKPKIKHGLTRKHHRAWTLSEVVKLVDGVARYGAGKWSEIRKLSFASYSYRTSVDLKDKWRNLIRATQTQLPAQKDGACPRKTNPSIIPIPPSILLRVKELHELQSQGGGFTAPVKFSGQDGKVLQGKGSGFFVIRVMQIYVYASGRCGIYTSKYYLK

SEQ ID NO: 8243 - protein, 93 aa, Zea mays
  Clone ID: TF_ZmC881404_1.pep
MASMSLSSSRAQWTAKQNKLFEQALAVYDRDTPDRWHNIARAVGGKSADEVRRYYELLVKDLEHIEAGKVAFPAYRCPGGYDDADSDRLKHLT

SEQ ID NO: 8244 - protein, 100 aa, Zea mays
  Clone ID: TF_LIB4742-061-R1-K1-D4.pep
LTQRRRQLLPVRLRPAERLPPLSTGPSSSPPPAPAAAAAYHCCRCPYYYCHYYAHHRPAASCSSCLLLPVSPSTTDDEDNDRPSVSLRPLPLIFRQRGQD

SEQ ID NO: 8245 - protein, 685 aa, Zea mays
  Clone ID: TF_ZmC12732_1.pep
MASARKVRNANKRYAKINEDWQDKDTPSVPKSKVRKKKLSDMLGSQWSKDELERFYGAYRKYGKDWRKVAGTIRDRTSDMVKALYNMNKAYLSLPEGTATAAGLIAMMTDHYNILDGSNSDRESSDSPKASRRLQKRGRAKLQSVSKTSDTHFTDLLQPQPASSSYGCLSLWKKKRSGDLFVGNRPRAVGKRTPRVPVASMYHRDDRGAPNRQAKPDANDGDDEGAHVAALALAEVHQRGGSPQISHTPRRSGDHMFLSPAKSSGRKNADSEMGSSKLHGFQLDADYPEGSLGSREAETGDYTKGTSYLIANKGSPSSKPQKKVKRPQKRRKKAVRRTDDQFEDDREACSGTEEGCSMKKAKEEPELETLGTKTAWPSSTSNKRSRQLFFDDESLARPALHTLADLSVNILQPSSVVESESSAQIKDEKRDNDSDGKPGIPAAAVSVYEQKDNSKSTSKKLKRQPEMASTDMVTRKKGKLAKDTHPDGSTTSEVKQQACTCGVKTEKKKKSSMGKILKDEKKMPKDVEKTEVSPEEEKTSSNKTMDIAETTTQVATTLHADLMAKGKSRRKLGIQKSLTQECKPAEGAGDSGSDKLSYSLSNIIDLKDKLSHCLSSRLLRRWCMFEWFYSAIDYPWFAKSEFVEYLNHVKLGHVPRLTHVEWGVIRSSLGKPRRLSKQFLHEERE

SEQ ID NO: 8246 - protein, 43 aa, Zea mays
  Clone ID: TF_6165699.pep
LNYLRPNIKHGGYTDEEDRIIWSLYSSIGSRWSIIASKLPGRT

SEQ ID NO: 8247 - protein, 196 aa, Zea mays
  Clone ID: TF_ZmC11324_3.pep
PAGLLPFAPRGGRPPCPFFPAAATGQCARLRCICISKHLSGRTDNEIKNYWNTRFKRRQRAGLPPYPPDVERQIKLLRAQNVNPFADADADAAPLRRRKPVRVALQHTVTVADGLALALATDQPELPASEPDAGVPPPRRQSAAVVPHASRTAARRLSATSSPLACRHCQPPERRRSYIRTNSTPPAAAGCWISRC

SEQ ID NO: 8248 - protein, 328 aa, Zea mays
  Clone ID: TF_ZmC9414_16.pep
RTIVALQREFAMKDLGLLHHFLGITAERRPQGLFLHQRQYAIDILERADMSDCKPCSTPVDTQAKLSEDDGPPVADATSYRSLTGALQYLTFFRPDIAYVVQQVCLHMHTLREPHFTALKRILRYLRGSLDHGLLLRPSPMLELVVYTDADWAGCPDTRRSTSGYAVFLGANLVSWAAKRQPVVSCSSAEAEYRAVANGVAEASWLRQLLHELNSPLQRATLVYYDNVSAVYLSTNPVQHQRTKHVENDLHFVRERVAAGDVRVLSVPTMLQFADIFTKGLPTSVFLEFRFSLNICTGQSCDCGGVRLSLCNGPGPSTLIYQYNSNPG

SEQ ID NO: 8249 - protein, 1079 aa, Zea mays
  unsure (1)..(1079): unsure at all Xaa locations
  Clone ID: TF_ZmC27529_1.pep
MKLEISDDLPVKKWTYHDHKSDLLSSVTSANSAIAKEINEVLFKSLPADTPRLDLFASSHLLSQRKSDLIVKERLGVCKTRLRLKEQMLTMKFKAYCHLWKDVQLFSANKQRSKSNKRTDQSNRTSQIGSQRQRSSNRSRLTMPAGNLSTFSTPEMSDVAMRLFSEFKIKRCRNYLKMPALIIDEKEKEWLKLMNKNGLVEDPVLVEEDRMMINPYTKEERTRSRTGRAFEAXSRPTSSDGVQKQKRPGDVKLFGQILSHQSTLQSSGLSCFGNKSKPPSPLDDTSXHKWNPESNARSRDMLGVASVIAAHGLEYAKQVEKISAKSLIRTAYGPSVTSVANKSSDKECIDHVPLHERESVAADVLAGICGTLSPDGMGSCITSSADPGQKISMKRVEHVLSQENDKTVEEEDTLSDQECEVDPVDWNDDEKSIFIEAMNNYGKDFARISSCVKSKSYEQCKVFFSKARKSLGLDLIHQGAADVSMPASDTNGGKSDTDEACAVEMDSAICSTQSCSKIAMDVCPTEGAIGGPNSVIISKQAEAYISNGCNADVKIEEDEKVADKNCSIVDDKRSSDATHEAGPIDINCPGSTDKLQGTDDVVDLVNMHSNSGISSSAKHAVAIHSEMRSTLHSVEVLQTDKGEGTGTDLSWVEECSHHALDNTPMKNGNSGAPAFLASDSGIKDNVRISNITAASTVSPAFTSSYQHSVPGDMPLPKPKPLVTPLTPKDLMPVQFSSVLPDPTAIRFEGIASITTPNFEDTGNRVSGALGAKEMSKYPAFRDPSGNQQSTLFCNIDGYMNHRLTTELPFFSERTASGTVNTSQADRLTQTKLQNGRSSSLCLQNNSDGIQWPRDHEGGLEGSLRPCSRNTSSEGDEQQKRPGDVKLFGQILSHQSTLQSSGLSCNGNKSKPPSPKIDTSVRSMNNPMDRVVCSSRPGTTPHLGLEERLARCYGHLDGSTAQPEPLLVMAKRQRSLAGVQFYSAKNGTLGVLPDYQQPSTQPQQSDPKRVERLSDPQKRNVLELISGFQQPGRVARFGGAGILVSGNVSDPVAAALKAQYGPGSKIMGSDVDPWTDIGSR

SEQ ID NO: 8250 - protein, 143 aa, Zea mays
  Clone ID: TF_ZmC42_15.pep
MMAEAWTPVLLPATAPCFWQQDTHSVLWRRGDAWTVEENKLFEKALAQIDRNAPDRWEKVAAVLPWKTVDDVRSQYHALEKDVGVIEAGGLVPFPRYSGSVPPPSGFALEDWGGGDRGFRRARGSEEMQERKKGVPWTEEEHK

SEQ ID NO: 8251 - protein, 442 aa, Zea mays
  unsure (1)..(442): unsure at all Xaa locations
  Clone ID: TF_ZmC10388_1.pep
MDAKDILGLPKTPFSSSQEKKSRPPKEPQRKPDGVSREVYALTGGVGMPPLMPTIEASHLKRRPAAEKEKVAWQWLPFTSSARTDNLQLYHWVRVVNGIQPTGDYQFAKYNKRADVLKYTDEEYEKYLVDPVXAWSKEETDQLFELCERFDLRFIVIADRFPTARSVEDLKSRYYSASRALLIHRARSFEDVSGNPLVKDAYDAAHETERKRALSALLSQTKQQERKDAETLAEAKRIMESRAASKNVDVAVMPPNSDNAMVPVDGVSPSSSTHPSLAHPNTSANILIPNSLRTLRVYLRTHALDQMVQAVGASAGLRVIKRVDQTLQELAVNLKPKVPTKAVCIEHIELRNELLTLLNLQKQLQNKEAEVSANRESSFTEAPSTPKRSNRDIDRPFIPDTSGFTGERAGKRDHKRKSTGRFIDAPPSPPQSKRPRKLKGSD

SEQ ID NO: 8252 - protein, 153 aa, Zea mays
  Clone ID: TF_ZmC602324_1.pep
MDPMFSSEWSVSEIKMAKSLIASRNTSSNLASDDDASNKKHSDIVDELQARFPWKGKHEVIGLYVDLTMEMINTPPEVGDDGLVLDDDNFGMPVEEQPQMKYTGRFWTREEHRNFLRGLNMYGRGNWMYISRDFVPTKTPMQIYSHAQKFFRR

SEQ ID NO: 8253 - protein, 68 aa, Zea mays
  Clone ID: TF_LIB5025-072-A1-XP1-D8.pep
MGRSPCCEKAHTNKGAWTKEEDQRLIAYIKAHGEGCWRSLPKACSCKSPSPAAAGFRFLRPLEEGQYI

SEQ ID NO: 8254 - protein, 88 aa, Zea mays
  Clone ID: TF_ZmC87815_2.pep
MSGSRSSSSHNVTIDSEWSKKENKLFEEALACYGAGTPDRWHKVARAMGGIKTADEVRRHHEILNEDVTLIESGRVPFPNYNTQGAWN

SEQ ID NO: 8255 - protein, 502 aa, Zea mays
  Clone ID: TF_ZmC9414_14.pep
MYKEPKDQETITGPVAWSPQAVHADVDLDNHNEPINPPIDGTQSMFGEVPGREKGKSKSVSFALSDVSGIASPIDTNSEMGNIGDSCSDKLTDENLSNSSRHIAEKHSITKDQYSNEQDHEREPLDHAVQQQPKSDVGERASSMKRRCRKKVQKVGTPNHTVDDYFGEDCVEPSLAEEDNDTGDHYTTGNKHKARKKSRGGVEESQQQKAQKNKSKVSSRGRKRTLKDESTEKPEKKLTHRIRQRIPKEVKALLETPREQIKPMKLCASHLRLLQEARERVDPKGIPSGPSSNTRNFQLDDMDDLGYRDEEARFFDNDITEEHVQNATKLNYHSYMNKPARGKWSKSDTDLFYEGLRQFGIDFAMIQQLFPDKTRHQVRQKFKSEERKNPLLVHDAIVHRSGDNLYFKKVIKQLNIEDVVLPDIKSTQKQDGASSERGPGNENVLDDLNEEENSSNWLNEEHDVQMADVEEEHGEQMDDVEEERDLGNDGGDDDLGDVFDWY

SEQ ID NO: 8256 - protein, 87 aa, Zea mays
  Clone ID: TF_ZmC2209_2.pep
MSASRSSSPNSMSQWSQKENKMFEEALAYYGEGTPNRWDKVSSAMGGIKSAEEVRCHYENLDYDVKMIESGNVPYPKYKTQGFWTRG

SEQ ID NO: 8257 - protein, 101 aa, Zea mays
  Clone ID: TF_ZmC2209_3.pep
MSASRSSSPNSMSQWSQKENKMFEEALAYYGEGTPNRWDKVSSAMGGIKSAEEVRCHYENLDYDVKMIESGNVPYPKYKTQGFWTRGKVHGTSKANWKHIT

SEQ ID NO: 8258 - protein, 108 aa, Zea mays
  unsure (1)..(108): unsure at all Xaa locations
  Clone ID: TF_LIB3245-012-P2-N1-A9.pep
EEANTKVLKPYTITKWRESXTEHELNKLLXALQLFDRDWHKIEAPVGCKTVIQIRSHAQKYFLKVQKNRTSEHVPPSRPKATAAHTYPQKAHKTEPHYSLKTERSSIH

SEQ ID NO: 8259 - protein, 492 aa, Zea mays
  Clone ID: TF_ZmC395_1.pep
MLSTHEANADQFDLLSYGNLRGLEASRSSEESNFGNDLKDGSSVSSENFGSSCLPGESYQSATVDHEKRPLSDVKTCQIACKRPKQTDHCTWLYSFEEHPLTSEVGISSPALYDGLVEIKQPNDIPAINGATTCSGSSVIPCRNHDQSILVENLDIPDWATSFPGYFEDCGPVVTYSHVDDIGSPRKGVPIGPEHQADIPEWRPLNSMIVPGASEFCANLDCSSASTSESVPRGDDYVSDKWIRYCVVPVTCCSSPVDWAGDSKIDCNCSDEGSMRCSRQHIIEARDNLKMILGQDRFRELGLCEMGEDVALRWTDEEEKLFQRVVFLNPVSLGKNFWDHLPDAFPNKTSQELVSYYFNVFMLRKRAQQNRSDVLAVDSDDDELHGEPLAERVEGDPAVESSTHEHSVSNSLPMDDDHKEFEGAQFDGSLCEKSVYNAVECRHLPNQMPADSNTVNTALDVCDQDNGAQCSEFHMSLPSDTSNSLGDQSASV

SEQ ID NO: 8260 - protein, 205 aa, Zea mays
  Clone ID: TF_ZmC344_7.pep
MLLISYLLFFPICMFSCRWSKIAAKLPGRTDNEIKNRWNTHIKKKLIKMGIDPVTHEPLDRKTTSSGPATTSQSTKSDEATKEQSPQNDDAVIRDVPADGCSPTESSTNTVSTGGSSSSGGGGHDQDPLVKWLLEEEPATGDEAWLNFTGSVDVDEFSSIAAGPELLPWDGATDWLLDYQDFGLGDSSLVDGYMVNNNSSNGAKF

SEQ ID NO: 8261 - protein, 169 aa, Zea mays
  Clone ID: TF_ZmC42_33.pep
MMRETYMDVLPPVDHIAASRSGGWFPGAARLWTAAENKQFERALAGLDLCRPDWEKVARAIPGRTVREVVSHFKSLQVDVQQIESGLVPMPVYGAGAGAGSFTLQWDGCYGPADSRHNGYRFGSGGCGRRHHGRTPEQDRKKGVPWTEEEHRSYILYVVMMRELHQTPV

SEQ ID NO: 8262 - protein, 307 aa, Zea mays
  Clone ID: TF_ZmC29713_8.pep
MGSQPLSDRLQNTVIQQRTGLDGKWCSGSSSRYWTGLPEVMALVGVLSISLCCLAITAGRWSLIASHLPGRTDNEIKNYWNSHLSRQIHTYRRKYTAGPDDTAIAIDMSKLQSADRRRGGRTPGRPPKASASRTKQADADQPGGEAKGPAAAASSPRHSDVVNPGPNQPNSSSGSTGTAEEEGPSSEDASGPWVLEPIELGDLVWGEADSEMDALMPIGPGGHDSAALEGLGAVGCEAQVDDLFDMDWDGFAAHLWGGPEQDEHSAQLRQAAEPLEVAAAAAAATAARTPDDRELEAFETWLLSDSF

SEQ ID NO: 8263 - protein, 43 aa, Zea mays
  Clone ID: TF_6165769.pep
TNYLRPGIRRGNFTPREERVIVHLHSLLGNRWAAIASHLPQRT

SEQ ID NO: 8264 - protein, 114 aa, Zea mays
  unsure (1)..(114): unsure at all Xaa locations
  Clone ID: TF_LIB4742-048-R1-K1-D6.pep
NAHRWSLIAAQLPGRTDNEIKNYWNTHIKRKLIARGIDPRTHQPASAAAXPPPPPPPPPRKAAFATMATTRRWRGAAARETAAASRRTAATTTTARPGPCHTNMLSAASTSTSR

SEQ ID NO: 8265 - protein, 138 aa, Zea mays
  Clone ID: TF_ZmC14429_2.pep
AHAQRRSRARQERERKEMLINTHRHSPFLHQSIPTHACIYICMHACMLGDRMHPPPRKPETFAKKSPPAFTKQADEPYQLSVFLLCPRALPHRRRRHCCCCCLSLLPLPLLLLPLLRSPPPCSFLLILLAAAGVAIDD

SEQ ID NO: 8266 - protein, 43 aa, Zea mays
  Clone ID: TF_6165743.pep
GAVGEVGGDGGPAVAEERLEVDDEPVLLVGEAAAADARAEVVG

SEQ ID NO: 8267 - protein, 176 aa, Zea mays
  unsure (1)..(176): unsure at all Xaa locations
  Clone ID: TF_LIB5117-013-A1-PF1-C4.pep
MMAEAWVDVLPPPAPYFAGQPCWAVQQERRGGGAWTLEENKVFEEALAAIDLDAPDRWEMVALMLPRKTVADVVNHYRALENDVGFIEAGLVPFPHYDSSSPSSGFTLDWXDGGAAGAGGFRRGYCLKRGRADQERKKGVPWTEEEHRLFLKGLKKYGIGDWRNISRNYLTSRTPT

SEQ ID NO: 8268 - protein, 157 aa, Zea mays
  unsure (1)..(157): unsure at all Xaa locations
  Clone ID: TF_LIB3732-036-Q1-K6-G4.pep
KKSPFTPGEDPAILAPHALLGNRWAGLSRLLPERSYNSAKNHFIWGGGLNLATDSXDLHRRGSADHPCKRSTPGPGSPSASDRNDLSHCCSTIHVFLPVPRALGFNAIIAENVRPLFSTAILDDDPLTILSLSLPELDHSPSGFHHYSARSHFQELS

SEQ ID NO: 8269 - protein, 164 aa, Zea mays
  unsure (1)..(164): unsure at all Xaa locations
  Clone ID: TF_ZmC344_3.pep
WRSLPKXAGLLRCGKSCRLRWINYLRPDLKRGNFTADEDDLIVKLHSLLGNKWSLIAARLPGRTDNEIKNYWNTHVRRKLLGRGIDPVTHRPIAADAVTVTTVSFQPSPSAAAAAAAEAEATAAKAPRCPDLNLDLCISPPCQSGEEEEVDLKPSAAVVKREVL

SEQ ID NO: 8270 - protein, 221 aa, Zea mays
  unsure (1)..(221): unsure at all Xaa locations
  Clone ID: TF_LIB3592-067-Q6-K6-D3.pep
XRXMINPWTXNERXIFMEMLAKFGKDFSKISSFITHKTTADCVEFYYKHHKSDSFREVKKLLDLHQQLPASNYLGAKSGQKWNPESNAASLDMLGVASAEAAHDLEYANKVEKISVKSLIRTAYGSNVSFVTKKSSDKECIDNVPLHERESVAADVLAGICGTPSPDGMGSCITSSADPGLKISMKRVEHVLSQENDKNVNEEESLSDQECEXDPVDWNDD

SEQ ID NO: 8271 - protein, 43 aa, Zea mays
  Clone ID: TF_6165689.pep
TNYLRPDIKRGHFTPEEHNSILQLHAIIGNRWSTIAAQLPGRT

SEQ ID NO: 8272 - protein, 224 aa, Zea mays
  unsure (1)..(224): unsure at all Xaa locations
  Clone ID: TF_LIB4758-049-R2-K1-E6.pep
PLLRYAGEESSAATPEGSGSAASAPKDAGGGGGGGGGHRREERKSGVGVDVGKSSSKAEQERRKGIPWTEEEHRLFLLGLDKFGKGDWRSISRNFVISRTPTQVASHAQKYFIRLNSMNRDRRRSSIHDITSVSAGEVAAAGAPITGGPTTAGAMPMGPAGMKHHHHHPAPPMGMYGHAPMGHPVSGHMVAPAXRRTPVMFPXGHHSPYVMPVGYPAPXGQMHP

SEQ ID NO: 8273 - protein, 162 aa, Zea mays
  Clone ID: TF_ZmC42_27.pep
RRSSCFCSSRLFLLGLKKYGKGDWRNISRNFVQTRTPTQVASHAQKYFIRLNSGGKDKRRSSIHDITTVNLTDDQPPSPSQSSLITSQSNAPAPAPGPAPAAGICQVPLAADAKRHGARTLPFSSPNRTSAAPAYRMEFHDQQGLQCGPLHDQLLASQSVLF

SEQ ID NO: 8274 - protein, 81 aa, Zea mays
  Clone ID: TF_LIB4978-036-R1-K1-C1.pep
MGAPKQRWTPEEEAALKAGVAKHGPGKWRTILRDSDFSALLRLRSNVDLKVTLGSPGRVGGWVFGDQLRGVWRKSPVFLVG

SEQ ID NO: 8275 - protein, 128 aa, Zea mays
  Clone ID: TF_ZmC42_28.pep
SKVSSTEQDHVFFVVDVLGARLFLLGLKKYGKGDWRNISRNYVQTRTPTQVASHAQKYFIRLNSGGKDKRRSSIHDITTVNLTDDERAPSPSRSSLITTTTSQPNAPAPAAVVIGGPFSSSSAAAAEA

SEQ ID NO: 8276 - protein, 324 aa, Zea mays
  Clone ID: TF_ZmC11324_2.pep
MARSGGGMEGNKWARISKHLSGRTDNEIKNYWNTRFKRRQRAGLPPYPPDVERQIKLLRAQNVNPFADADADAAHANASAGLPAPPLLYDVGNPFALLSSIPSLSQTASHSHSPLINQNYPLLNQMQVFHHLGGSQQPSFHQDGSAAAFGDIVSSRLPPLPTARTQAELHSNQFDTSISGGLVDQSMLIGDEHLLRPNPSMVKVSSMPALSYREPDGSRMLPAHGAGSDGDVSSLGQCPPGQDLHRGATWDFTFAAVKPAKRRTASEVGFSDMFAVAPPGDWFGGGSTAPSPGPSSAVTDEEFNLEMQQFMSMLPLSDEHGWNA

SEQ ID NO: 8277 - protein, 322 aa, Zea mays
  Clone ID: TF_ZmC5904_1.pep
GQLDEVDVDDDAVVAGVARPPAPAQVRVPVVLDLVVSSARQMTGDQGPPGKKKETWHSENGQSSNSKKLAKLMSISKNRKIMFKTQSNKLSFFFAILFYSVSVQFTRHLWLARPPRHLPSFMRALTYFCSRTPSRRSEGPRARCHRRRSDGRWRGRAQSAATATASRETSWPGAPLHRLWRLHAPPRRLPQSHCKPPSGQAQGRGRARLPGRRRGTRTGPAPPRQVRRVLRWLPRHCGPAFVILLALGTQRQERREHKGHRLVEPLELGLGASEHHEGTEADQLLVQQEHHGRANNHVNATMHARFASWVDRRAFIRATPRD

SEQ ID NO: 8278 - protein, 412 aa, Zea mays
  unsure (1)..(412): unsure at all Xaa locations
  Clone ID: TF_ZmC9939_1.pep
EFPDDDEYDLEQAESREHKRWMERQNAKLQEKAKKVEYARVRTLVDNAYKKDPRIQRRKEEEKAEKQRRREAKYLAKKLQEEEAAKAVEEERIRKEEESKKAAEAALHQKKLKEKEKKLLRKEKTRLRTLAAPVIADSHFGLSEANVESACASLDMEQLKKLCDGMDGKDAAGKARLLSNVLRNESSSKEAKKIEGNGVEPSAPKSNSTGGRATEGSNSILNSYEKKERPWGKEEIEMLRKAIQKYPKGTSRRWEVVSEFIGTSRSVEEILKATKTVLLQKPDSSKAFDSFLEKRKPTQSIASPLSTRDEISSTEGAGTASSKAAAQSANSQTANEKAAADPVTDGGPSVSDPDAWTDAQVLALVQALKAFPKDASQRWERVAAAVPCKTVVQCKKKXAAMRENFRSKKSGE

SEQ ID NO: 8279 - protein, 85 aa, Zea mays
  Clone ID: TF_jC-zmXLIB3527P015Be03d1.pep
GGGSGSGSGEERRRGVPWTEDEHRLFLEGLEKYGRGDWRNISRWSVKTRTPTQVASHAQKYFIRQASAASRGDTKRKSIHDITTP

SEQ ID NO: 8280 - protein, 495 aa, Zea mays
  Clone ID: TF_ZmC1981_1.pep
MATTATTMAPVTAPVATANLEPTPTPLHPRPAAPPHLRALSTLAPVKSEAPPTPSSSTAITAAAGAEDPSYIITVPSYSAWFSFDSIHDTERRLLPEFFVGEAAAASGCRGPHAYKYYRDSLIRRFRARPGRRLTLTEARRGLVGDVGSVRRVFDFLEEWGLINYGALPSGSKQAKEKREEAAQQSSLPSGAIAPRKLCTGCRTVCGLAYYACDKADISLCARCYVNNNYRPGLSPANFKRVEITEDAKPDWTDKETLHLLEAVLHYGEDWKKVSEHVSSRSEKDCIARFIRLPFGEQFMGHKEDRMRFENTDDNTDEPGANVSKRLRLTPLADASNPIMAQVAFLSAIVGSDVASAAAQAAISAQSRVDLNDGEIETSINSIKQEESSHTNGLSANVLLKEAAANARAQLEKERNSIEQSLSNIVDVQMKEIQDKICRFEQKEMLMEKERQQLHFLRDLLFTDQLAVMQHQQRSPAVATECKGDEKPKPVASMS

SEQ ID NO: 8281 - protein, 342 aa, Zea mays
  Clone ID: TF_ZmC5277_1.pep
MPRDSRPAGMRLFGVTIAPAPEADPPVRDPSPNPPVAAREDVMRKCKSMGNLAALGAVVDGGGGGADGGGAGDGYLSDGGLMQSSGKRRRAQERKKAVPWTEEEHRTFLAGLEKLGKGDWRGIAKNFVTTRTPTQVASHAQKYFLRQTNPNKKKRRSSLFDMMPRELSPAPNCPILPPSMAKVHDVVAMTKQLQNSNLEGTSSSNAASQVGRDLPPVPSFKATNMDPSFSKFSHMERVWRTPYPFGPVPRAPEGTPSPTAAAAAAAAAAANAAVPVSQANLTTACTSNTFLSQPKPSDTPSLPPKGGPPSEEDGLELTVAPPSQQNMTNMSSQNAVGVIQVI

SEQ ID NO: 8282 - protein, 181 aa, Zea mays
  unsure (1)..(181): unsure at all Xaa locations
  Clone ID: TF_LIB3900-001-Q1-N6-F1.pep
MLELGLKRTGKSCRLRWLNYLKPDIKRGNLTPEEQLLILELHSKWGNRWSRIAQHLPGRTDNEIKNYWRTRVQKQARQLRVDANSAVFRDAVRCYWMPRLLEKMAAHHHGDGELPPPLHPSHNIAGTASSRSPPAHXSQQEDPSSSAPAASGHYLQQVDPSPSTSTTSGSTTSAALPPVPC

SEQ ID NO: 8283 - protein, 127 aa, Zea mays
  unsure (1)..(127): unsure at all Xaa locations
  Clone ID: TF_ZmC40061_1.pep
MGRQPAXDKEGVKRGPWTAEXDKKLISFILTHGRCCWRAVPKLAGLLRCGKSCRLRWTNYLRPDLKRGLLSTAEEQLVIDLHAKLGNRWSQIAAKLPXRTDNEIKNHWNTHIKKKLVKMGVDPATHE

SEQ ID NO: 8284 - protein, 201 aa, Zea mays
  Clone ID: TF_ZmC2941_8.pep
MGSEADCDRIRGPWSPEEDDALRRLVERHGARNWTAIGREIPGRSGKSCRLRWCNQLSPQVERRPFTPEEDAAILAAHARLGNRWAAIARLLPGRTDNAVKNHDSARSHFQELSPSSSPSPQSTPPAFPPQAAPSQSSYAFSGELVAAMQEMIRAEVRKYMSGAGLRAGCGPGAVGEVCMPQLVEGVMRAAAERVGVVTRP

SEQ ID NO: 8285 - protein, 122 aa, Zea mays
  Clone ID: TF_ZmC8104_2.pep
MGRTPCCDRAAVKRGPWSPEEDEALRSYVQRHGSGGNWITMPKKAGLKRCGKSCRLRWLNYLRPDIRHGGFTAEEDAVIMSLYAQLGSKWSLIASQMEGRTDNDVKNHWNTKLKKRLLAAAA

SEQ ID NO: 8286 - protein, 191 aa, Zea mays
  Clone ID: TF_ZmC3484_3.pep
MGRHAASGGGVQQKLRKGLWSPEEDEKLYNHIIRYGVGCWSSVPKLAGLQRCGKSCRLRWINYLRPDLKRGSFSQQEEDAIVGLHQILGNRWSQIASHLPGRTDNEIKNFWNSCLKKKLRQRGIDTSTHKPAVSASVPASEQPVSQDRKPLAAAAADGGSDMKHQQVFDPFPLTDSFGGGFGAALYGHTGG

SEQ ID NO: 8287 - protein, 221 aa, Zea mays
  Clone ID: TF_ZmC864203_1.pep
MRKPECPAANSSNAGAAAAKLRKGLWSPEEDERLVAYMLRSGQGSWSDVARNAGLQRCGKSCRLRWINYLRPDLKRGAFSPQEEELIVSLHAILGNRWSQIAARLPGRTDNEIKNFWNSTIKKRLKNSSAASSPAATDCASPEPNNKVAAAGSCPDLSVLDHQDGGHHHAMTTTTAGLWMVDSSSSCTSSTSPMHQFQRPTTTMAAAVASGSYGGLVPFLT

SEQ ID NO: 8288 - protein, 285 aa, Zea mays
  Clone ID: TF_ZmC8091_1.pep
MAASPSPSGSGGGKAGVDRIKGPWSPEEDEALQRLVRRHGARNWSLISRSVPGRSGKSCRLRWCNQLSPRVEHRPFTPDEDDAILRAHARFGNKWATIARLLSGRTDNAIKNHWNSTLKREREREREYYADARPGPGDQRSLKRTSSDGPPGSPSGSDLSDSSHQSLPTVMPSAASTAVTSQQQLQHVYYRPVPRAGGVVLLPVAPPSPQAPPATSLSLSLSLPGLDQQPEPSPPPPPTPQAQASSPLSAEFLLMMQEMIRIEVRNYMSGSGFDARAVMGMAEID

SEQ ID NO: 8289 - protein, 215 aa, Zea mays
  unsure (1)..(215): unsure at all Xaa locations
  Clone ID: TF_ZmC659_2.pep
MGRAPCCEKMGLKRGPWTPEEDKILVAHIHSHGHGNWRALPKQAGLLRCGKSCRLRWINYLRPDIKRGNFTDEEEQSIIQLHQLLGNRWSAIAARLPGRTDNEIKNVWHTHLKKRLDLSAQEQHEEAKKRKKPAAAARKRDGKVKMRKLDALTAKAAPVLSSPERSVSSTVTESTSTXXPAAAEQHGNSGSSASASASVKEECFTSSKESEESRS

SEQ ID NO: 8290 - protein, 190 aa, Zea mays
  Clone ID: TF_ZmC42_26.pep
MDFHHGCHSSSIHAAAPPPARPWSKEENKMFESALVMWPEHTPERWALVAAQLHGRTPREAWEHYEALVADIALIERGGVDVPACWNDDNQVRGGCGSEGGTGNSRRAGADRAHREGRRPGKPWSEEEHRLFLQGLEKYGRGDWRNISRFTVRTRTPAQVASHAQKYFNRQLNPASRNSKRKSIHDITTP

SEQ ID NO: 8291 - protein, 142 aa, Zea mays
  Clone ID: TF_ZmC14064_1.pep
MGRAPCCDKTSVKRGPWSPEEDEVLRSYVQNHGTGGNWIALPHKAGLNRCGKSCRLRWLNYLRPDIKHGGYTEQEDRVICSLYSSIGSRWSIIASKLPGRTDNDVKNYWNTKLKKKAIAMQQQQQEYYHHQQQQHSSGGRGR

SEQ ID NO: 8292 - protein, 232 aa, Zea mays
  unsure (1)..(232): unsure at all Xaa locations
  Clone ID: TF_ZmC3484_1.pep
MGRHAASGGGVQQKLRKGLWSPEEDEKLYNHIIHYGVGCWSSVPKLSGLQRCGKSCRLRWINYLRPDLKRGSFSQQEEDAIVGLHEILGNRWSQIASHLPGRTDNEIKNFWNSCLKKKLRQRGIDPSTHKPISADAAALEQPASRDRKPSLATAAAGGGLDVKQQQQQQQVFDPFPLTDSFGGGFDDAAGAALYGHMGGGGGKQQDAAATAVDVLXVSENLGYGESSSTAAH

SEQ ID NO: 8293 - protein, 331 aa, Zea mays
  Clone ID: TF_ZmC2013_1.pep
MDMAHERSDASSEEEVMAGELRRGPWTVEEDLQLVNYVDAHGEGRWNSLARSAGLKRTGKSCRLRWLNYLRPDLRRGNITPQEQLLILELHSRWGNRWSKIAQHLPGRTDNEIKNYWRTRVQKHAKQLKCDVNSQQFKDVMRYLWMPRLVERIQNAAAMAGTPQQHKAGAADTPLSSPSSWQPGGGGGLYASPDLPTDACWPPADCYYYPAAADHQLLNNPAAAAVVPDLSSTTAGSASPSSDSGAGTAQPWPAPMGGAEWLTTAACDASSAAAAVLLGGQQQQSCLVGETSWASSELPELGVADFEIGSFDVESIWSMDDSLWFTQAQGV

SEQ ID NO: 8294 - protein, 340 aa, Zea mays
  Clone ID: TF_ZmC2013_2.pep
MDMAHERSDASSEEEVMAGELRRGPWTVEEDLQLVNYVDAHGEGRWNSLARSAGLKRTGKSCRLRWLNYLRPDLRRGNITPQEQLLILELHSRWGNRWSKIAQHLPGRTDNEIKNYWRTRVQKHAKQLKCDVNSQQFKDVMRYLWMPRLVERIQAAAANNNASGAGVPPAGAAADDTPLSSSWQHGGGADDDGGLYASPELPTDACWPPADCYYYPAAADHQLLNNPAAAAVFPDLSSTTAGSSSPSSDSGAGTAQPWPAPLGGGAEWLTTGACCDASSAAAAAVVLGGQQQQSCLVGETSWASSELPELGVADFEIGSFDVESIWSMDDSLWFTQAQGV

SEQ ID NO: 8295 - protein, 330 aa, Zea mays
  Clone ID: TF_ZmC3584_1.pep
MVRPPCCDKEGVKKGPWTPEEDLVLVSYIQDHGPGNWRAVPTRTGLMRCSKSCRLRWTNYLRPGIRRGNFTEQEEKLIVHLQALLGNRWAAIASYLPERTDNDVKNYWNTHLKRKLQAGGGDGDGDGAAKPPAHRPPSSNSKGQWERRLQTDINLARRALREALTPLGDLKPQPQPQRAGAGVGTGGGDSPAPSSSSSQSSPAPAAFAAAAAGPYVLTAENISRMLDGWAGRKVRGGGTPGTPGGAESASTGSSDASEVSYGGAAVASAAPAPACGGPVFEYEAKPGVPTSHQQMPLSAIESWLFDDDSHLHHAVQSASLLDAAPMDYPF

SEQ ID NO: 8296 - protein, 135 aa, Zea mays
  unsure (1)..(135): unsure at all Xaa locations
  Clone ID: TF_LIB4767-042-R1-K1-D8.pep
NGARILCCYKLNLTKALWXADDYEKVMKQITKDVHGCXRSIPGLSVLQRCAKKXTLMRIHYLRPELQRGAFSQDQEDFIIELHAVLGNRXIXIAAQMPRRTDNEIKNLWNSXINKKLRQKGIDLHTPQALTERDP

SEQ ID NO: 8297 - protein, 138 aa, Zea mays
  Clone ID: TF_LIB3608-060-Q6-N6-G11.pep
MWSLPLLADFDLCCDCYNEGKFDPGMAKTDFILMDSAGVSGASGTSWTDEETLLLLEGLEIFGGKWAEIAEHVATKTKAQCMLHFLQMQIEDRFHDGKDINQNIPVKTEQATTEKAIAETSEKMEVEDKVEGRGTVDE

SEQ ID NO: 8298 - protein, 339 aa, Zea mays
  Clone ID: TF_ZmC27878_1.pep
MVSMNTTPNPLDSAAGSAAVAGGSVDEGGGGGGRKKRMRGAVAAAMVPPPMAVPLPAAAPAAGEEVRKVRKPYTITKSRESWTEPEHDKFLEALQLFDRDWKKIEAYVGSKTVIQIRSHAQKYFLKVQKNGTGEHLPPPRPKRKAAHPYPQKSSKNVSQTILLQEQPTQREQGSVMPMDTATVRNTNANVAVPSWDNTLAQPFSAGHVQGAAATNNCSSSMESPSGTWPTSEAVEQENMVPPLRAMPDFAQVYNFLGSIFDPDTSGHLQRLKAMDPVDIETALLLMRNLSMNLRSPDFEQHRRLLSSYSYGGADHVKSEAMENLGSPQSGHLPSLVTSE

SEQ ID NO: 8299 - protein, 312 aa, Zea mays
  Clone ID: TF_ZmC9324_3.pep
HASEYHCNSCSVDCSRKRYHCRTQADFDLCCVCYNEGKFDPGMAKTDFILMDSAEVSGASGTSWTDEETLLLLEGLEIFGGKWAEIAEHVATKTKAQCMLHFLQMQIEDRFHDGDDINQNIPVSTEQATTEKAIVETPEKMEVGDKVEGRDNADEKASEKTEGSCEETKTEDANVVNKDTQKSGGKDSGASPSTEEAKQSSDDQPIVKENSVDVDTSGEKLSNVAIDILKCAFEAAGHSPEYEGSFADAGNPVMALAAYLAGLVEDDNTTTSFRSSLKSVSDVSPALQLSSRHCFILEDPPDELKDICASVR

SEQ ID NO: 8300 - protein, 279 aa, Zea mays
  Clone ID: TF_ZmC1193_7.pep
GSTPLSRRGSPCCEKAHTNKGAWTKEEDERLVAHIRAHGEGCWRSLPKAAGLLRCGKSCRLRWINYLRPDLKRGNFTEEEDELIVKLHSVLGNKWSLIAGRLPGRTDNEIKNYWNTHIRRKLLSRGIDPVTHRPVTEHHASNITISFETEVAAAARDDKKGAVFRLEEEEERNKATMVVGRDRQSQSQSHSHPAGEWGQGKRPLKCPDLNLDLCISPPCQEEEEMEEAAMRVRPAVKREAGLCFGCSLGLPRTADCKCSSSSFLGLRTAMLDFRSLEMK

SEQ ID NO: 8301 - protein, 137 aa, Zea mays
  Clone ID: TF_ZmC16180_2.pep
MCTRGHWRPSEDEKLKELVALYGPHNWNAIAEKLQGRSGKSCRLRWFNQLDPRINRSPFSEEEEELLLASHRVHGNRWAVIARLFPGRTDNAVKNHWHVIMARRCRERMRLSNRRAGGAAAAGARRRRHRCCCRRWQ

SEQ ID NO: 8302 - protein, 204 aa, Zea mays
  Clone ID: TF_ZmC39745_1.pep
MGRPPCCDNGVGVKKGPWTPEEDIVLVSYIQQHGPGNWRSVPENTGLMRCSKSCRLRWTNYLRPGIKRGNFTPHEEGIIIHLQALLGNKWAAIASYLPQRTDNDIKNYWNTHLKKKVKRLQQPAADSFQTTASNAVTCSPNYYSPSSSHHSLQGMQPMSSYPHTTCSGGAPSNNEATTGYYYRRRLPLSPAWMRASPAAATANC

SEQ ID NO: 8303 - protein, 226 aa, Zea mays
  Clone ID: TF_ZmC7195_1.pep
MGRSPCCEKAHTNKGAWTKEEDQRLVAYIKAHGEGCWRSLPKAAGLLRCGKSCRLRWINYLRPDLKRGNFTQEEDDVIIKLHQVLGNKWSLIAAQLPGRTDNEIKNYWNTHIKRKLIARGIDPRTHQPASAAAVAPAAAAAAAAQSSFRHHGDDEAVARRSCSRDSGCIAAHSSDDDDSTSGSLPHQHAVGGIDLNLSLSPPTSQPSSPAAAKGVVASGYGQGSES

SEQ ID NO: 8304 - protein, 106 aa, Zea mays
  unsure (1)..(106): unsure at all Xaa locations
  Clone ID: TF_LIB4746-133-Q1-K1-A11.pep
GYLEAGRKVVELSSLRRRCSTEQGSKRCVKSCRLRYTNYRALIWATNCVRVCRGSLIAKQLPRRTGNDVRNRWNTKLXKQLRQRGIDPTAPIAGLMHIFVGALSLR

SEQ ID NO: 8305 - protein, 353 aa, Zea mays
  unsure (1)..(353): unsure at all Xaa locations
  Clone ID: TF_ZmC1193_6.pep
MYALRCTCTAPPVCPHPSALAYLFPLPPVIIATKPNQTRAQEELRKLRGGARKQAHEGEPGRQPAMGRSPCCEKAHTNKGAWTKEEDQRLIAYIRAHGEGSWRSLPKAAPRVRGXGLLRCGKSCRLRWMNYLRPDLKRGNFTDDDDEVIIKLHALLGNKXALSLSSPPARRYHYFPPPRLNHFPIVGRPVARRWSLIAGQLPGRTDNEIKNYWNTHIKRKLLTRGIDPQTHRPLSAAAALTAGFPSPARPPTVLFARPAPSEDGGHSSGGGSADAPRCPDLNLDLSVGPPCSPPKTPAATASTPTSQQQQRTTTICLCYHLGVRSGEACSCKSPSPAAAGFRFLRPLEEGQYI

SEQ ID NO: 8306 - protein, 334 aa, Zea mays
  Clone ID: TF_ZmC42_43.pep
PRARRLPCPPTPTGKGETLGRLASGVQGTLMTELWMEVLPPPYFAGQAAGGWFLPDRRAGPGAWTLEENKMFERALARVDWDAPDRWERVAAMLPGRTASDVAAHYDDLECDVGCIEAGFVPFPCYGSGGGGGASQSAGFTFDWDAGGLGFKRSCYVVGGGKRERGPDQERKKGVPWTEEEHKQFLMGLKKYGRGDWRNISRNFVTSRTPTQVASHAQKYFIRLNSGGKDKRRSSIHDITTVNLPDDDAGGTASASPPSVLTSASAPSSTGGGGPVVSEQFGVLVDSKPPAPHHHFVPHPYGNVKLEPVSSHHGGFLDDSVLMQMHCGQLQPLG

SEQ ID NO: 8307 - protein, 308 aa, Zea mays
  Clone ID: TF_ZmC3584_2.pep
WTPEEDLVLVSYIQDHGPGNWRAVPTRTGLMRCSKSCRLRWTNYLRPGIRRGNFTEQEEKLIVHLQALLGNRWAAIASYLPERTDNDVKNYWNTHLKRKLQAGGGDGDGDGAAKPPAHRPPPSNSKGQWERRLQTDINLARRALREALTPLGDLKPQPQPQRDGAGVGIVGGDSPAASSLSSQCSPPPAPAALGTYVLTADNVSRMLDGWAGLNGKRRGGAPGTPGGAETASTGSSSEVSYGGGTAVVAPAAGGPVFEYETKPPAAPFQLMMPLSAIESWLFDDDTHFHRPVQSASLLDAAPMDYYLL

SEQ ID NO: 8308 - protein, 362 aa, Zea mays
  Clone ID: TF_ZM4497.C3.o9.fg.pep
MGRAPCCEKVGLKRGRWTAEEDQLLANYIAEHGEGSWRSLPKNAGLLRCGKSCRLRWINYLRADVKRGNISKEEEDIIIKLHATLGNRQAKKHDRYHAFGSHYEAAAAQPAAMITWSLIASHLPGRTDNEIKNYWNSHLSRQIHTYRRKYTAGPDDTAIAIDMSKLQSADRRRGGRTPGRPPKTSASRTKHSDADQPGGEAKGAAASSPRHSDAVNPGPNQPNSSSGSTGTAEEEGPSSEDASGPWVLEPIELGDLWGEADSEMDALMPIGPGGHDSAALQGLGAVGGEAQVDDLFDMDWDGFAAHLWGGPEQDDHSAQLRQAAEPMEAAAVAAAAAAATAACTPDDRELEAFETWLLSDSF

SEQ ID NO: 8309 - protein, 229 aa, Zea mays
  Clone ID: TF_ZmC17859_2.pep
HASVLLQQGWRKGPWTALEDRLLTEYVQQHGEGCWNSVAKLTGLRRSGKSCRLRWVNYLRPDLKRGKITPDEETVILHLHAMLGNRWSAIARCLPGRTDNEIKNYWRTHFKKVRPSRRARAQLLHQYQLQQQEQRRQYLQLLQPQQLQQQQLGVVKQQQLEQQSPPEPHHQAMMDSLQSTAACYCSPVPEECCPLPADDDAVLWDSLWRLVDGDGCGDGDGDGSSGGDY

SEQ ID NO: 8310 - protein, 322 aa, Zea mays
  Clone ID: TF_ZmC1302_1.pep
MGRSPCCDENGLKKGPWTPEEDQKLMEYIQKNGHGSWRALPRLAGLNRCGKSCRLRWTNYLRPDIKRGKFTQEEEQTILQLHSVLGNKWSAIAKHLPGRTDNEIKNFWNTHLKKKLIQMGFDPMTHRPRTDFFAALPQLIALANLRQLVEQRPWDDHAARIQVEAVQAAKLQCLQNLLQSAASITTTPSSSSMNTIPSDLGLLSPPQMSSLSTLPSPSFLESISGQDMVAGQLSDIQIPSSFFEQPTSNEANQQSDFTPKSSVEGENGTPKTLLSENSLPPLADFPISNLGDACGASSCDGSSIQFPSWPELFDEQFMCEFV

SEQ ID NO: 8311 - protein, 438 aa, Zea mays
  Clone ID: TF_ZmC984_1.pep
MEQSSDGLPISQRRANSSTKHSSKSDEVAEDMLQSNIPHETVRLCQGVESEEIEGPPHKKIVQNFTESSSSKNKKHRWSSEEDEALKQMVKKYGTKNWRTIACAIPGRNANSCLSRWNSLKIPESTKGKWLAEEDEILIKMVTKHGKNWQTVAFAIPGREAKQCQIRWTRSLDPAIKKQDWSEQEDLKLIRAHQIYGSQWLKMVKHFPGRTNHALKEHWRNRIKGKLNFYLASGLLEQVPDLEEGGISVPESSQSEIPKDSQGSADRSGPPPVLRAQPKSKPELPENAGTSGEGTSDSIRLKGPNAHPTEVSEKVLAKSKQRARARRRLDFLSTPVELKLCTAAASCQRPPQKMDQPGPVAENISPSDACQDISQNVPPERADAITPLAASNHHSPATPVDPFSLEMHEANASDLLDMSYCDGLIIDSPRDPHDGSLM

SEQ ID NO: 8312 - protein, 273 aa, Zea mays
  Clone ID: TF_ZmC39133_1.pep
MPSDKAKAPKKKGEEDPGIPPAPCEGEISHEPHRQRSLNGRTTGPTRRSTKGNWTPEEDAILSRAVQTYQGKNWKKIAESFPDRTDVQWLHRWQKVLNPELVKGPWSKEEDEIIVQMVNKYGPKKWSAIAQALPGRIGKQCRERWHNHLNPAINKEAWTQEEEITLIHAHRMYGNKWAELTKFLPGRTDNAIKNHWNSSVKKKVDSYISSGLLSQVPCLSLIECPAQCDSLSAMDQQNNGGTDCNDQNTSVGLSSDLQVNVDANKKEHMTLTR

SEQ ID NO: 8313 - protein, 88 aa, Zea mays
  unsure (1)..(88): unsure at all Xaa locations
  Clone ID: TF_uC-zmflteosinte056a06b1.pep
EWIQDEEDLIIHLHPMMGNKWAHIARHVPGRTDNEVXKNFWNCATKRTSVMIGSGLSPNTLLRVDYNGIQRRPGMFNHCELIHVVLSS

SEQ ID NO: 8314 - protein, 120 aa, Zea mays
  Clone ID: TF_ZmC8104_1.pep
MGRTPCCDRAAVKRGPWSPEEDEALRSYVQRHGSGGNWITMPKKAGLKRCGKSCRLRWLNYLRPDIRHGGFTAEEDAVIMSLYAQLGSKWSLIASQMEGRTDNDVKNHWNTKLKKRLLAA

SEQ ID NO: 8315 - protein, 96 aa, Zea mays
  Clone ID: TF_LIB4767-058-R1-K1-G8.pep
MGRAPCCEKMGLKRGPWTPEEDKILVAHIQSFGHSNWRALPKQAGLLRCGKSCRLRWINYLRPDIKRGNFSKEEEDAIITLHEQLGNRYVTYLPLC

SEQ ID NO: 8316 - protein, 108 aa, Zea mays
  Clone ID: TF_ZmC659_6.pep
MGRAPCCEKMGLKKGPWTPEEDKVLVAHIQSFGHSNWRALPKQAGLLRCGKSCRLRWINYLRPDIKRGNFSKEEEDAIISLHEQLGNRYFLLTPLFFPFVLALLSSRV

SEQ ID NO: 8317 - protein, 220 aa, Zea mays
  Clone ID: TF_ZmC11324_1.pep
MARSGGGMEGSGGLKKGPWTQAEDKLLRDHVRRHGEGNWNAVRRETRLQRCGKSCRLRWANHLRPNLRKCPFSPEEERQILLLHGLIGNKWARISKHLSGRTDNEIKNYWNTRFKRRQRAGLPPYPPDVERQIKLLRAQRQPFAAAALASPEQLPAAVSRRRKPVRVALQHTVTVADGLALALATDQPELPASEPDAGVPPPRRQSAAVVPPGRQRGGFR

SEQ ID NO: 8318 - protein, 277 aa, Zea mays
  Clone ID: TF_ZmC4021_2.pep
MASSSTTNTSDGGAKSSSCPRGHWRPGEDEKLKQLVEKYGPQNWNSIAEKLEGRSGKSCRLRWFNQLDPRINKRPFTEEEEERLLNAHRAHGNKWALIARHFPGRTDNAVKNHWHVVMARRSRERSRLLARAASSSSSPSTGGYLFGAVTPATSSLCFGFSKLGGAGSASGSGGLFRSPVPAPPTSLFKNFGTATASKGLLGSSFEASGRYSYSGKQPTAPLSITFSSPREALGMDIGHHGRHEHHQKDYHASESADEPLKKKDVPFFDFLGVGVSS

SEQ ID NO: 8319 - protein, 195 aa, Zea mays
  Clone ID: TF_ZmC2251_1.pep
MSAAVNKSSAGTKKSRKPYVVSRPRERWTADEHGRFLHALLLFGRDWKRVQAFVATKTGTQIRSHAQKHFLRADKKLGLAVPPPHPRRSAADYGGALAPDVETVQLPLSQDDLRFAQVYRFVGDVFGCGAMWPVEAQLQRLLGADPVVVDTILRVLANLQDKTSLPVACRSTIFCSQLRYGGIGFESCDYKFPAR

SEQ ID NO: 8320 - protein, 150 aa, Zea mays
  Clone ID: TF_ZmC2251_2.pep
AVNKSSAGTKKSRKPYVVSRPRERWTADEHGRFLHALLLFGRDWKRVQAFVATKTGTQIRSHAQKHFLRADKKLGLAVPPPDVETVQLPLSPDDLRFAQVYRFVGDVFGCGAMWPVEAQLQRLLGADPVVVDTILRVLANLQDNFPPCSL

SEQ ID NO: 8321 - protein, 139 aa, Zea mays
  unsure (1)..(139): unsure at all Xaa locations
  Clone ID: TF_LIB4977-051-Q1-K1-D10.pep
MGRQPCCDKVGLKKGPWTAEEDQKLVSFILGNRQCCWRAVPKLAGLLRCGKSCRLRWTNYLRPDLKRGLLSDAEEKLVIDLHAQLGNRWSKIASHMPGRTDNEIKNHWNTXIKKKLRKMGIDPLTHKPLPAPDPHPPKD

SEQ ID NO: 8322 - protein, 328 aa, Zea mays
  Clone ID: TF_ZmC1497_3.pep
MATTQSRGGGGVVPVEVDEEHGRRRQGGAAPQEEEEEEAAEKPELRRGPWTVDEDHTLVNYIADNGEGRWNSLARAAGLKRTGKSCRLRWLNYLRPDVKRGNFTADEQLLILDLHTRWGNRWSKIAQHLPGRTDNEIKNYWRTRVQKHAKQLNCDASSKRFKDAMRYLWMPHLVDATATTADDEYHHHQHQHQAAAAGNIDGLLAGGDVDDVQNALAAGVAAAMASSSSDSLASEPYSYEDGGLLASVRAGEDMQLVMSGGGWAMAQEANDQGLWPSSSGHGLSSSVQAAAGGAGQFEDPELSGWVQGFSDSIITGNLWALEEIWKMQ

SEQ ID NO: 8323 - protein, 280 aa, Zea mays
  Clone ID: TF_ZmC20189_2.pep
MGCKACDKPKPSYRKGLWSPEEDQKLRDYILLHGHGCWSALPAKAGLQRNGKSCRLRWINYLRPGLKHGTFSPEEEETVMSLHATLGNKWSRIAKHLPGRTDNEVKNHWNSYLKKRVEGPSTPPSDSDDSHCAKPGRGGSTARETGDDRPADYSGSSEPREPSSSPDTSCLTGTPKVMFVDWLDMDCMGGGGGGPPGAAAAAAAPGLGAAAGVARVSTGDDQMTMDDGSASGRADVSLHGTFGDSGGAGCWEFHESFDQMQAAGFCDLLSSIGEYYFGLD

SEQ ID NO: 8324 - protein, 345 aa, Zea mays
  Clone ID: TF_ZmC16443_1.pep
MGRAPCCEKVGLKKGRWTKEEDEVLARYIKEHGEGSWRSLPKNAGLLRCGKSCRLRWINYLRAGLKRGNISEEEEDMIIKLHATLGNRWSLIAGHLPGRTDNEIKNYWNSHLSRRAADFRDGVVVDIDLSKLPGGGKRRGGRASRGAVVAAAKEKKAKEKDDRGNSKVAEAEQQLRDTEDDDGGSVSTPRPQSDDCGTAQSEEEQAQASASDLTSDGHGPEEEEEEDPLALSEEMVSALLAPESPKLEVGPDGSCMDSYSGPPSGESGCGSSGPSGDVAQDLDLDDDKAIMDWDLMGLDISTAGDMWDQLVWDYDETLVTEPEGGEEGHQQQDDVMSDLFFLDNL

SEQ ID NO: 8325 - protein, 67 aa, Zea mays
  Clone ID: TF_ZmC11751_1.pep
MGRSPCCDQDAGVKKGPWTPEEDKLLVDYINGNGHGSWRRLPKHAGLNRCGKSCRLRWTNYLRPDIK

SEQ ID NO: 8326 - protein, 317 aa, Zea mays
  Clone ID: TF_ZmC19314_1.pep
MGRPPCCDKANVKKGPWTPEEDAKLLAYTSTHGTGNWTNVPQRAGLKRCGKSCRLRYTNYLRPNLKHENFTQEEEDLIVTLHAMLGSRWSLIANQLPGRTDNDVKNYWNTKLSKKLRQRGIDPLTHRPIADLMHSIGALAIRPPQPATSPNGSAAYLPAPALPLVHDVAYHAAGMLPPTPAPQRQVVIARVEADAPASPTEHGHELKWSDFLADDAAAAAAAAAEAQQQLAVVGQYHHEANAGSSSAAAGGNDGCGIGVGGDDGAAAFIDAILDCDKETGVDQLIAELLADPAYYAGSSSSSSPGMGWASMGLLNAD

SEQ ID NO: 8327 - protein, 73 aa, Zea mays
  Clone ID: TF_LIB3245-455-P1-K1-H9.pep
MGRPPCCDKAGVKKGPWTPEEDIVLVSYVQEHGPGNWRAVPVSTGLMRCSKSCRLRWTNYLQPGIRRGNFTPH

SEQ ID NO: 8328 - protein, 228 aa, Zea mays
  Clone ID: TF_ZmC2204_1.pep
MVTVREEMRKGPWTEQEDIQLVCTVRLFGDHRWDFIAQVSGLNRTGKSCRLRWVNYLHPGLKHGRMSPQEERIIIELHARWGNRWSRIARRLPGRTDNEIKNYWRTHMRKKAQERKMGMPSPSSSSSSLTYQTCLLDTIPVIGMGSGDTHNGSCVTSTLENTQSVMDGYPMDQIWKEIEAPHAPNLLSIAEGKEKTCSSIPCHLPSPVMWDYKCPEIFWKMGDQEIMM

SEQ ID NO: 8329 - protein, 358 aa, Zea mays
  Clone ID: TF_ZmC152_1.pep
MLEVGGGRRSLVIVSSCCLALPRQHQHAARSHHTTRHVTTAPSFVLSCLTSHASRSAKHQQRTTTPTLGLRGRRGEGGAAQRQPMVSMSSTPHPLDPSVPAVVGGGKEEEEAVESCAAAAPLPPVGIDDDEEGPRRVRKPYTITKSRESWTDPEHDKFLEALQLFDRDWKKIEAYVGSKTVIQIRSHAQKYFLKVQKNGTGEHLPPPRPKRKAAHPYPHKSSKKALQVVLPQQVSHIMEQGCGTPMDVATVATDSSVNNAFPVQHFSPRHTQAMPDFARVYNFLGSIFDPETNGHLQKLKEMDPIDAETVLLLMKNLSINLTSPNFEEHRRLLSSDASSMDQKSGSSRVHLPFMITSK

SEQ ID NO: 8330 - protein, 276 aa, Zea mays
  Clone ID: TF_ZmC42_55.pep
MMAEAWTPVPFPPTAPCFWLHDTHSVFWRGGDAWTAAENKLFEKALAQIDRNAPDRWEKVAEVVRTKTVDDVRNHYHDLENDVGFIEAGLVPFPHYSGSVPSFGFTHHEDWDGGFRRGYCLKRARGSDPERKKGVPWTEEEHKLFLMGLKKYGRGDWRNISRKYVTTRTPTQVASHAQKYFIRLNSGGKDKRRSSIHDITTVNLPDEDRGNAPPSAVTTTTNPSVALPDMKPFIAPLQDALGVSHPYGNVKLEPKSSLVAGLGFNDSVLLMHCGQL

SEQ ID NO: 8331 - protein, 132 aa, Zea mays
  Clone ID: TF_ZmC256743_2.pep
MSQRKGAMAAAVTASKHREDQEAMMVELRRGPWTLEEDNLLMNYIACHGEGRWNLLARCSGLKRTGKSCRLRWLNYLKPDIKRGNLTPEEQLLILELHSKWGNRWSRIAQHLPGRTGHQIKNYWRTRVQKQA

SEQ ID NO: 8332 - protein, 226 aa, Zea mays
  Clone ID: TF_ZmC14101_1.pep
MGRPPCCDRAGVNKGPWTPEEDIVLVSYVQEHGPGNWRAVPVSTGLMRCSKSCRLRWTNYLRPGIRRGNFTPHEEGIIVHLQALLGNRWAAIASYLPQRTDNDIKNYWNTHLKKKLRKQQAIGAIFAPPPPSEPTAGHADCRRHDMTRSSKDSHACLADSTPAADEVVTQLIAQQFAATDGDTSSSSSYSYASSTDNISKLLNGFMKSAFAGAGRRYRHHQDFLGH

SEQ ID NO: 8333 - protein, 171 aa, Zea mays
  Clone ID: TF_LIB5116-021-A1-PF1-H6.pep
MGRSPCCDKTGIKRGPWTAEEDMTLVAHIEQHGHSNWRALPKQAGLLRCGKSCRLRWINYLRPDIKRGNFTGEEEDAIIQLHAMLGNRWSTIAARLPGRTDNEIKNVWHTHLKKRLDSSSSKTSGQAAPKRKAKKPVAAASTADGPVSMPVSSPEQPISSSATDYSMASSL

SEQ ID NO: 8334 - protein, 332 aa, Zea mays
  Clone ID: TF_ZmC16901_1.pep
MGRSPCCEKEAGLKKGPWTAEEDQKLLAFIEQHGHGCWRSLPAKAGLRRCGKSCRLRWTNYLRPDIKRGKFTLQEEQTIIQLHALLGNRWSSIATHLPKRTDNEIKNYWNTHLKKRLAKMGIDPVTHKARADVVGGSSGAGNNSGARYRAAAHLSHTAQWESARLEAEARLAREARLRALASPPPPPGPGPGPAFSGLESPTSTLSFSESVLFASAAHDTHALTSRAYAEAFGAEQQQRFADTAAAADAAPGFLAGVLLGCSVAGAEKGFAASSTDASVCEQQQEEEDKGYWSSILNMVNSSMSSSTSSLTSDAVTDPAAAYLPPATAAAEF

SEQ ID NO: 8335 - protein, 186 aa, Zea mays
  Clone ID: TF_ZmC741467_1.pep
MTVVEAGEVLNLKVGENPLLEGEAKTGYVSPDDQDGETASEKPCGAPQLKKGPWSPDEDKLLKNYVEAHGEGKWNKVQRNSGLNRCGKSCRLRWTNHLMPDLKKGSFDNEEIDKILKFYLKWGPKWAKIASRLPGRTDNEINFWNTSETDLPIYLSQAPAVSSLLPTCFLGVVGMCSLHPGTDLLC

SEQ ID NO: 8336 - protein, 44 aa, Zea mays
  Clone ID: TF_6165807.pep
LNYLRPNIRRGNISYDEEDLMIIRLHRLLGNRWSLIAGRLPGRT

SEQ ID NO: 8337 - protein, 93 aa, Zea mays
  Clone ID: TF_LIB3079-030-Q1-K1-F3.pep
GRVGARRPFTVDEDAAIARADARLGNRWAVIARLLPGRTDNAVKNHWNCSLKRKLGAADAASGSAVAADDCVADGETEARRGKMMMMSISPAD

SEQ ID NO: 8338 - protein, 319 aa, Zea mays
  unsure (1)..(319): unsure at all Xaa locations
  Clone ID: TF_ZmC764246_1.pep
LCSYCSXPLPSLHYESQKEADIALCSDCFHDARFVPGHSSLDFQRVDGTKDGSDNDGDSWTHEETLLLLEGLEKYNDNWNAIAEHVGTKSKAQCIHHFIRIPVEDGLLESIEVPEASVSSRVQSNGFSYSNSNGGISGSVPQSSQPGQQLPFVNSANPVMSLVAFLASAVGPRIAASCANAALSVLTRDDSRMCSEGNDVMGQAARPNYDASSSVSPENVKYAAMCGLSAAATKCKLFADQEEREIQRLAATIINHQLKRLELKLKQFAEVETLLLKESEQVERARQNXTAQRVRXMSARLLSSGVPPGAAAAPWHQIQ

SEQ ID NO: 8339 - protein, 179 aa, Zea mays
  unsure (1)..(179): unsure at all Xaa locations
  Clone ID: TF_LIB4764-028-R1-K1-B7.pep
IGSLEAGLQRCWKSCRLRWINYLRPDIRRGRFTAEEEKLIISLHAIVGNRWAHIASHLPGRTDNEIKNYWNSWIKKKIRKPAMSTTTSSAVTAASPPCSTAALDAALGRHLQTPFSAAEHRLDAILSQSLALPPPKLGSGXRRAAAAKSXPPLPPHCPFFMFDTSVSVSPPSSLASPAA

SEQ ID NO: 8340 - protein, 359 aa, Zea mays
  Clone ID: TF_ZmC21035_1.pep
MGRAPCCDKNNVKKGPWSPEEDAKLKEFIEKHGTGGNWIALPQKAGLRRCGKSCRLRWLNYLRPNIKHGEFTETEDRVICSMYASIGSRWSIIASQLPGRTDNDIKNYWNTKLKKKLLGSTAAPHPHRAPRQQQQHHHHRPGLNLMLQQTLPSLPQLATYNSFFSVAGGGALHHDDPIIPALALPPPHQDYMLSPGGGGGGLGIPTSLLHAQQQFQQQHQQHVVKEESGSMIVFGRDQQSCSSSDGGGGAHSQHQQPQYGNGHGKELSFDGYLFGYSNGGSGMEHDNCGRLMQQLQDAHQQQAHQHLVPVEYNYEEIKQLLMSTAAADTLHAAGSHDDDDDNGGIEGFGGSQGNKVTMM

SEQ ID NO: 8341 - protein, 241 aa, Zea mays
  unsure (1)..(241): unsure at all Xaa locations
  Clone ID: TF_ZmC2041_1.pep
MGRQPCCDKVGLKKGPWSAEEDEKLVTFLLTNGQCCWRAVPKLAGLLRCGKSCRLRWTNYLRPDLKRGLLSSEEETTVIDLHAQLGNRWSKIASHLPGRTDNEIKNHWNTHIKKKLRKMGIDPATHKPLHPQPAAPPPTQQEQDTGGSPEEEGEKADAVMMAAATPIIGHETAPFFTDEEEMLAHLLDDIDDFPPAAYSPDDXFFALLLLLRVPVVSLGLRRHSAVVERSWWKQRRRRRAA

SEQ ID NO: 8342 - protein, 241 aa, Zea mays
  Clone ID: TF_ZmC14028_2.pep
MGRAPCCEKKGLRRGAWSPEEDQRLVAYVRQNGHPNWRALPQQAGLPRCGKSCRLRWINYLRPDIKRGNFTREEEDAVIQLHQMLGNRWSAIAARLPGRTDNEIKNVWHTHLKKRLEPKTATQAPKRKPKKQQQPEAVTLAAPVSPEQSAVSTSTTSTTTDYSAASSSLENADSFTSEEEDYQIDDSFWSETLAMAVDSSDSGMEEAEGAFGASPPAPSTNDDVDFWLKLFMQASDMQNSP

SEQ ID NO: 8343 - protein, 289 aa, Zea mays
  unsure (1)..(289): unsure at all Xaa locations
  Clone ID: TF_ZmC17037_2.pep
MGRSPCCEQAHTNKGAWTKEEDQRLVAYIKAHGEGCWRSLPKAAGLLRCGKSCRLRWINYLRPDLKRGNFTEEEDDLIIKFHELFGNKWSLIAGRLPGRTDNEIKNYWNTHIKRKLLARGMDPQTHRPLASATAGQQHYQLQEPQKRAAGGGPAGHPHQDHLXGRRHLQLAGRGLQXVAATTXPRSATPPRRHLDIDLNLSISLAAYQPPEETGIIKQPLVMKQEQETAAGGTNAAAVCLCLNSLGYRPGVECVCGDGSSSSSSWHSHSHSHQWALNFLQAAAPCYRGQ

SEQ ID NO: 8344 - protein, 341 aa, Zea mays
  Clone ID: TF_ZmC1497_1.pep
MAATQSCQAAACFPAAVAVDEEHGHHSHQLKGGAQEEAENDNKPELRRGPWTVDEDLTLVNYIADNGEGRWNNLARAAGLKRTGKSCRLRWLNYLRPDVKRGNFSADEQLLILDLHTRWGNRWSKIAQHLPGRTDNEIKNYWRTRVQKHAKQLNCDANSKRFKDAMRYLWMPHLADDVDTIAAANDDDEDHHHHLRLLVLHHHQAQHLQQAAAAAGGAANDLAAGAYDVRQLHALPSSGMAATSSSDSLASESYDDGGLLFANLRAGEMLMDGGDWAAQQEADQGLWPPPPPTSDLDQSVVQAAGAGAGQFQDMELSGWVQGFSESITDNFWALEEIWKMQ

SEQ ID NO: 8345 - protein, 356 aa, Zea mays
  Clone ID: TF_ZmC1497_2.pep
MATTQSCQSRSSACSKAAACFPAAVAVDEEHGHHSHQLKGGAQEEAENDNNKPELRRGPWTVDEDLTLVNYIADNGEGRWNNLARAAGLKRTGKSCRLRWLNYLRPDVKRGNFSADEQLLILDLHTRWGNRWSKIAQHLPGRTDNEIKNYWRTRVQKHAKQINCDANSKRFKDAMRYLWMPHLADDVDTIAAANDDDEDHHHHLRLLVLHHHQAQHLQQAAAAAGGAANDLAAGAYDVRQLHALPSSGMAAVPTTATTSSSDSLASESYDDGGLLFANLRAGEMLMDGGDWAAQQEADQGLWPPPPPTSDLDQSVVQAAGAGAGQFQDMELSGWVQGFSESITDNFWALEEIWKMQ

SEQ ID NO: 8346 - protein, 360 aa, Zea mays
  unsure (1)..(360): unsure at all Xaa locations
  Clone ID: TF_ZmC1497_4.pep
MATTQSCQMATTQSCQSRSSACSKAAACFPAAVAVDEEHGHHSHQLKGGAQEEAENDNNKPELRRGPWTVDEDLTLVNYIADNGEGRWNNLARAAGLKRTGKSCRLRWLNYLRPDVKRGNFSADEQLLILDLHTRWGNRWSKIAQHLPGRTDNEIKNYWRTRVQKHAKQLNCDANSKRFKDAMRYLWMPHLADDVDTIAAANDDDEDHHHHLRLLVLHHHQAQHLQQAAAAAGGAANDLAAGAYDVRQLHALPSSGMAATSSSDSLASESYDDGGLLFANLRAGEMLMDGGDWAAQQEADQGLWPPPPPPPSXXLDQSVVQAAGAGAGQFQDMELSGWVQGFSESITDNFWALEEIWKMQ

SEQ ID NO: 8347 - protein, 106 aa, Zea mays
  unsure (1)..(106): unsure at all Xaa locations
  Clone ID: TF_LIB3245-072-P1-K1-A9.pep
MTDASDASYLAQGFNSLFTKTNRRTGNTHGRTETPQYNNGERLPCCEKIGLNKGPWTHDEDKVLVGHIQSFXHTNWSTLAKQALLFRCTKSSQLRXINYLSHDIKR

SEQ ID NO: 8348 - protein, 299 aa, Zea mays
  Clone ID: TF_ZmC42_25.pep
MMRETYMDVLPPVDHIAARSNWFPAAARLWTAAENKQFERALAGLDLCRPDWEEVARAIPGRTVREVVSHFKHLEVDVQQIESGQVPLPAYGGGASSFTLQWDGYGPGPGDFRHGYRFAGGCGRRHHGRTPEQERKKGVPWTEEEHRLFLLGLKKYGKGDWRNISRNFVQTRTPTQVASHAQKYFIRLNSGGKDKRRSSIHDITTVNLTDDQPPSPSQSSLITSQSNAPAPAPGPAPAAGICQVPLAADAKRHGARTLPFSSPNRTSAAPAYRMEFHDQQGLQCGPLHDQLLASQSVLF

SEQ ID NO: 8349 - protein, 295 aa, Zea mays
  Clone ID: TF_ZmC42_41.pep
MMRETYMDVLPPVDHIAARSNWFPAAARLWTAAENKQFERALAGLDLCRPDWEEVARAIPGRTVREVVSHFKHLEVDVQQIESGQVPLPAYGGGASSFTLQWDGYGPGPGDFRHGYRFAGGCGRRHHGRTPEQERKKGVPWTEEEHRLFLLGLKKYGKGDWRNISRNFVQTRTPTQVASHAQKYFIRLNSGGKDKRRSSIHDITTVNLTDDQPPSPSQSSLITSQSNAPATAPAAGICQVPLAADAKRHGAGTLPFSSPNRTSAAPAYRMEFHDQQGLQCGPLHDQLLASQSVLF

SEQ ID NO: 8350 - protein, 295 aa, Zea mays
  Clone ID: TF_ZmC42_48.pep
MMRETYMDVLPPVDHIAARSNWFPAAARLWTAAENKQFERALAGLDLCRPDWEEVARAIPGRTVREVVSHFKHLEVDVQQIESGQVPLPAYGGGASSFTLQWDGYGPGPGDFRHGYRFAGGCGRRHHGRTPEQERKKGVPWTEEEHRLFLLGLKKYGKGDWRNISRNFVQTRTPTQVASHAQKYFIRLNSGGKDKRRSSIHDITTVNLTDDQPPSPSQSSLITSQSNAPAPAPAAGICQVPLAADAKRHGAGTLPFSSPNRTSAAPAYRMEFHDQQGLQCGPLHDQLLASQSVLF

SEQ ID NO: 8351 - protein, 249 aa, Zea mays
  Clone ID: TF_ZmC17859_1.pep
MDAISSLLLQEGWRKGPWTALEDRLLTEYVQQHGEGSWNSVAKLTGLRRSGKSCRLRWVNYLRPDLKRGKITPDEETVILQLHAMLGCRWSAIARCLPGRTDNEIKNYWRTHFKKARPSRRARAQLLHQYQQQQEEERRQYLQSLQLLQQEQQQQQLLLQQQSQQLVVKQQQLEQQSPPEPDHQAVMAMLDSQQSTAECYCSPVPVVPEQCCALPADDDDAMLWDSLWRLVDGDGRGCGDGDDSSGVAY

SEQ ID NO: 8352 - protein, 236 aa, Zea mays
  unsure (1)..(236): unsure at all Xaa locations
  Clone ID: TF_ZmC1193_2.pep
MGRSPCCEKAHTNKGAWTKEEDDRLIAYIKAHGEGCWRSLPKAAGLLRCGKSCRLRWINYLRPDLKRGNFSDEEDELIIKLHSLLGNKWSLIAGRLPGRTDNEIKNYWNTHIRRKLTSRGIDPVTHRAINSDHAASNITISFEAAAQRDDKGAVFRRDAEPTKAAAAAITHVDHHHRSNPHHQMDXXPGKPLKCPDLNLDLCISPPSHEGPMVDTKPVVKEEAGAGXVGVVGLCFS

SEQ ID NO: 8353 - protein, 432 aa, Zea mays
  Clone ID: TF_ZmC21016_1.pep
MESMAQERDALDSPALSIDKRLRSDAVESPLVDDATQPKEGADGYPVKVRKPYTITKQREKWTEEEHGKFLEALKLYGRSWRQIQEHIGTKTAVQIRSHAQKFFSKVVREPGASNSIEIPPPRPKRKPLHPYPRKCADSTVTNAPMGEPKNAPVSSPSGSDQENGSPVSVLSAMQSDAFGSSISNPSTGGTSPASSDDGNNVPEIVNGEENLLTQQIEDRSHQESKQDNSDGELSEEDSSRVQETSLKLFGKTVIIPDPKKVCSSDGGAGDDTQEVMQTSWVGGGVAAYPAHNGWFLPFHSFPAHMYESGDARISPLHMWWPYYGFPAGHPRGFGTGLLNEGAIESDADNSPSVETNSDRTGNVHVQTTTPTIHNNAVKESVGPVEMPESGPSIELKPSANSAFVRVKPSSSVSGDQSLVRGFVPYKRCKVE

SEQ ID NO: 8354 - protein, 212 aa, Zea mays
  Clone ID: TF_LIB4764-081-R1-K1-H2.pep
MTPVVLRLFGVDVRRVGASGEPEESPMDLRKSSSMPDLTINPLLTPEEKEGCKGYASDDAELASGQQKRRRRKAQDRKKGIPWTEEEHRKFLDGLRQLGKGDWRGISKGFVTTRTATQVASHAQKYFLRQTNPGMKKRRASLFDVGIADYKDNQVPGPQSIVTAKPAPTQEIIHTDRGDVPIPRRYRGLGEILGSNMQVNQLTDYYYFHKNS

SEQ ID NO: 8355 - protein, 281 aa, Zea mays
  Clone ID: TF_ZmC13262_1.pep
MDMDRPEEEGQQRRETMTPVLLRLFGVDVHRGGGSGEPEESPMDLRKSSSMPDLTINPLLSPEEKEGCKGYASDDAELASGQQKRRRRKAQDRKKGIPWTEEEHRKFLDGLRQLGKGDWRGISKGFVTTRTATQVASHAQKYFLRQTNPGMKKRRASLFDVGIADYKDNQVPGPQSIVAAKPAPTQEIIHTDRGDVPIPRYRGLGEILGSNMQVNQLTDYYYFNKNSHVPAGTSLSMASGLETASTVDSLELSIAVNGLELSIAPPSRCVCGGAAGAIKVL

SEQ ID NO: 8356 - protein, 249 aa, Zea mays
  Clone ID: TF_ZmC16180_1.pep
MCTRGHWRPSEDEKLKELVALYGPHNWNAIAEKLQGRSGKSCRLRWFNQLDPRINRSPFSEEEEELLLASHRVHGNRWAVIARLFPGRTDNAVKNHWHVIMARRCRERMRLSNRRAGGAASGAGAGAVVATGAAAEDGSNPRSANKKPRPDASGMASLLDKYRREFSAAVPFAINHDSNQQQGYCSNTNEDANKSVEFYDFLQVNANSSDTKCGSSIEEQEAESRDDDQAEGQVQFIDFLEVGASHRRR

SEQ ID NO: 8357 - protein, 262 aa, Zea mays
  unsure (1)..(262): unsure at all Xaa locations
  Clone ID: TF_ZmC14028_1.pep
MGRSPCCEKMGLKRGPWTAEEDRILVAHVERHGHSNWRALPKLXQAGLLRCGKSCRLRWINYLRPDIKRGNFSREEEDAIIQLHQMLGNRWSTIAARLPGRTDNEIKNVWHTHLKKRLEPKPASQQAPKRKPTKKQQPQPEPEPVTTLEGPAGAVPPVSPERSLSTTTSTTTSTADYSAASSLENAGDSFTSEEDYYQIDDSFWSETLAMTTTVDSFESGVQQAEGSFGKSAAAPSSTNDDMDFWLKLFMQASDMQNLPQII

SEQ ID NO: 8358 - protein, 217 aa, Zea mays
  Clone ID: TF_UC-ZMFLB73085C02_FLI.pep
MGRPPCCDKMGVKKGPWTPEEDLMLVSYVQEHGPGNWRAVPTNTGLMRCSKSCRLRWTNYLRPGIKRGNFTEQEEKLIVHLQALLGNRWAAIASYLPKRTDNDIKNYWNTHLKKKLKNMQGGEGGAGGKRPAVPKGQWERRLQTDIHTARQALRDALSLEPSATPLAKVEPLPTAPGCATYASSADNIARLLEGWLRPGSGKGPEASGSTSTTATTR

SEQ ID NO: 8359 - protein, 242 aa, Zea mays
  Clone ID: TF_ZmC13187_2.pep
MVTVREETRKGPWTEQEDLQLVCTVRLFGERRWDFIAKVSGLNRTGKSCRLRWVNYLHPGLKRGRMSPHEERLILELHARWGNRWSRIARRLPGRTDNEIKNYWRTHMRKKAQERKRNMSPSSSSSSLTYQSGYPDTPSTIGVEGQELHGGSGCITSILKGTPPDMDGYPMDQIWMEIEAPQMPSEESFVGGNHNVCSSLATPLPPPTVWEYYPDACWKVDDEIKMATQFQFGYSEGVGPCF

SEQ ID NO: 8360 - protein, 376 aa, Zea mays
  Clone ID: TF_1491932.pep
MGRAPCCEKVGLKRGRWTAEEDQLLANYIAEHGEGSWRSLPKNAGLLRCGKSCRLRWINYLRADVKRGNISKEEEDIIIKLHATLGNRWSLIASHLPGRTDNEIKNYWNSHLSRQIHTYRRKYTAGPDDTAIAIDMSKLQSADRRRGGRTPGRPPKASASRTKQADADQPGGEAKGPAAAASSPRHSDVVNPGPNQPNSSSGSTGTAEEEGPSSEDASGPWVLEPIELGDLVWGEADSEMDALMPIGPGGTTRLPSKGLARSAERPRWTTCSTWTGMASRPICGAGRSRTSTARSCGRPPSRWKLLLLLLLRRRPAPRTIASWRRSRLGSCPTRSDGSGHRTDQTDQPRWPGHMVDAASRRCSCVQFFFLFCRFCS

SEQ ID NO: 8361 - protein, 201 aa, Zea mays
  Clone ID: TF_ZmC1193_8.pep
MGRSPCCEKAHTNKGAWTKEEDERLVAYVRAHGEGCWRSLPKAAGLLRCGKSCRLRWMNYLRPDLKRGNFTDDEDELIIRLHSLLGNKWSLIAGQLPGRTDNEIKNYWNTHIKRKLLARGIDPKTHRPLGAGADAAAPPGVVAHRALLHRAALVELAVKPAPAESSDDGGRSSGTSSGGGGGASVEEPRCPDLNLDLSVGP

SEQ ID NO: 8362 - protein, 335 aa, Zea mays
  Clone ID: TF_ZmC29713_1.pep
MGRAPCCEKVGLKRGRWTAEEDQLLANYIAEHGEGSWRSLPKNAGLLRCGKSCRLRWINYLRADVKRGNISKEEEDIIIKLHATLGNRWSLIASHLPGRTDNEIKNYWNSHLSRQIHTYRRKYTAGPDDTAIAIDMSKLQSADRRRGGRTPGRPPKASASRTKQADADQPGGEAKGPAAAASSPRHSDVVNPGPNQPNSSSGSTGTAEEEGPSSEDASGPWVLEPIELGDLVWGEADSEMDALMPIGPGGHDSAALEGLGAVGCEAQVDDLFDMDWDGFAAHLWGGPEQDEHSAQLRQAAEPLEVAAAAAAATAARTPDDRELEAFETWLLSDSF

SEQ ID NO: 8363 - protein, 217 aa, Zea mays
  Clone ID: TF_ZmC234163_1.pep
MRAMAEVMQEGCVENRQPLAASSSSVSDGSSCGGGERAGTSPPVSSSGNSISVLRRTSGPIRRTKGGWTLKEDETLRKAVEAFKGRNWKKIAEFFQDRTEVQCLHRWQKVLNPELIKGPWTQEEDEKIIDLVRKYGPTKWSIIAKSLPGRIGKQCRERWHNHLNPEIRKDAWTPEEERALIDAHQVFGNKWAEIAKVLPGRTDNSIKNHWNSSLEKK

SEQ ID NO: 8364 - protein, 169 aa, Zea mays
  Clone ID: TF_LIB4761-014-R1-K1-G7.pep
MMRDGVPPSVAGSGGAAGGDGPRRCSQCGHHGHNARTCTGRPVKLFGVRIGGKPIRKSASMGNIAHLAAEGSGGREEGYGSDGERPHKKRGEAWTEEEHKKFLLGLNKLGKGDWRGISRKYVVSRTPTQVASHAQKYFNRQTNVPGRKRRSSLFGLVIVDPSAQLPLSR

SEQ ID NO: 8365 - protein, 370 aa, Zea mays
  Clone ID: TF_ZmC2821_1.pep
MMRDGVPPSVAGSGGAAGGDGPRRCSQCGHHGHNARTCTARPVKLFGVRIGDKPIRKSASMGNIAHLAAEGSGGREEGYGSDGERPHKKRGEAWTEEEHKKFLLGLNKLGKGDWRGISRKYVVSRTPTQVASHAQKYFNRQTNVHRRKRRSSLFDMVIDDPSDQLPLSRSSSQEMEQQHLDDPQPVAALPAPVVSPATVVPPVPVEVSASVPSPVQVPVPVSAPVMTSQPMEQDSDTTSSIAGEAGTVMPGAMPPYLYPMMIPPPYYHTAFVPMPCYGYVPFYCEPQGAAQAPHEVVKPVAVHSTPPLNAKDLYNMSELSLKGDSNANGGVPASPLPPKPIGRPERQSAFHGKGPTPTGGSSGGLIPAVK

SEQ ID NO: 8366 - protein, 214 aa, Zea mays
  Clone ID: TF_ZmC2204_2.pep
MVTVREEMRKGPWTEQEDIQLVCTVRLFGDHRWDFIAQVSGLNRTGKSCRLRWVNYLHPGLKHGRMSPQEERIIIELHARWGNRWSRIARRLPGRTDNEIKNYWRTHMRKKAQERKMGMPSPSSSSSSLTYQTCLLDTIPVIGMGSGDTHNGSCVTSTLENTQSVMDGYPMDQIWKEIEAPHAPNLLSIAEGKEKTCSSSPCHLPSPCMDYNAL

SEQ ID NO: 8367 - protein, 131 aa, Zea mays
  Clone ID: TF_LIB4739-022-Q2-K1-A2.pep
MATTQSCQSRSSACSKAAACFPAAVAVDEEHGHHSHQLKGGAQEEAENDNNKPELRRGPWTVDEDLTLVNYIADNGEGRWNNLARAAGLKRTGKSCRLRWLNYLRPDVKRGNFSADEQLLILDLHTRWGNR

SEQ ID NO: 8368 - protein, 218 aa, Zea mays
  Clone ID: TF_UC-ZMFLMO17291G03_FLI.pep
MGRSPCCEKAHTNKGAWTKEEDDRLVAYIKAHGEGCWRSLPKAAGLVRCGKSCRLRWINYLRPDLKRGNFTEEEDELIIKLHSLLGNKWSLIAGRLPGRTDNEIKNYWNTHIRRKLLSRGIDPVTHRPINEHTSNITISFEDWGQGKALKCPDLNLDLCISPPCQEEEEAMLLRPVKREEAGLCFSCSLGLPKSADCKCSNFLGLRTAMLDFRRLEMK

SEQ ID NO: 8369 - protein, 308 aa, Zea mays
  Clone ID: TF_ZmC2941_1.pep
MGAEAAERDRIRGPWSPEEDEALRRLVERHGARNWTAIGRGVPGRSGKSCRLRWCNQLSPRVARRPFTADEDAAIARAHARLGNRWAAIARLLPGRTDNAVKNHWNCSLKRKLGAAAAASGSAVSADDSAAAAETEARRGKMMMMSISPPDSPSGSGSGSDRSDLSSHGAGSGSGSGSGQIYRPVAARSGGFEPADCAMSRPQEEDPLTALSLSLPGTDQRFHHHSAAADSHFQELPPSPSSPAPSAYPFSPEFAAAMQQLIRTEVQRYMASAGLRAGCGAVGATDLCMPQLVDGVMRAAAEQVGRMQ

SEQ ID NO: 8370 - protein, 253 aa, Zea mays
  Clone ID: TF_ZmC28328_1.pep
GSDDEPAVRKGPWTLEEDLILVSYISQHGEGSWDNLARAAGLNRNGKSCRLRWLNYLRPGVRRGSITAGEDTVIRELHARWGNKWSKISKHLPGRTDNEIKNYWRTRIQQKKQQGAKTTQQREPSTTASSGAGDDYWCTKPDPNQQAHYCLQKAAMAAATATTSAVVVSSEDDAPSAALTSQDSSAAAGGDWYMHQQQQMCYPYCSELSFVAAGHDETVGLDAVTMQFLSSHFTASFWTNGVDDFWESKPIDY

SEQ ID NO: 8371 - protein, 267 aa, Zea mays
  unsure (1)..(267): unsure at all Xaa locations
  Clone ID: TF_ZmC13262_2.pep
LAATNSASPSASSSSSLVSVEEAXPEKMAHGYLSDGLMGRAAQERKKGVPWTEDEHRRFLAGLEKLGKGDWRGISRHFVTTRTPTQVASHAQKYFLRQSSLTHKKRRSSLFDVVENAERAATSSIKGMERLRLKDAITTATATGSAEPGTGTTAQLPPALSLGVGRPPARPDHAALPPSSLLSLQLPRCSAGIGRTAPSLALAPPKHSHPSSPLTAAKAGGLAPDLELKISTARQSEHQQQVQMGPSLPPPPPPPQRTPFLGTIRVT

SEQ ID NO: 8372 - protein, 192 aa, Zea mays
  Clone ID: TF_ZmC42_22.pep
MMRETYMDVLPPVDHIAASRSGGWFPGAVRLWTAAENKQFERALAGLDLCRPDWEKVARAIPGRTVREVVSHFKSLQVDVQQIESGLVPMPVYGAGAGSFTLQWDGCYGPADSRHNGYRFGNGGCGRRHHGRTPEQERKKGVPWTEEEHRLFLLGLKKYGKGDWRNISRNYVQTRTPTQVASHAQKYFIRLN

SEQ ID NO: 8373 - protein, 324 aa, Zea mays
  Clone ID: TF_ZmC1597_2.pep
MGRPPCCDKVGVKKGPWTPEEDLMLVSYVQEHGPGNWRAVPTNTGLMRCSKSCRLRWTNYLRPGIKRGNFTDQEEKLIIHLQALLGNRWAAIASYLPERTDNDIKNYWNTHLKKKLKKMQAGEGGGGDGDGAAGASEGGAVATAGAGGKRPAVPKGQWERRLQTDIHTARQALRDALSLEPSPSAPPPAKVEPLPATAPGYKTYASSAENIARLLEGWLRPGSGGGKGPEASGSTSTTATTQQRPQCSGEGAASASASHSGGAPANAAAQTPECSTETSKVAGAGSAPPAFSMLESWLLDDGMGHGEDGLMTDVVPLGDPSEFF

SEQ ID NO: 8374 - protein, 548 aa, Zea mays
  Clone ID: TF_ZmC21354_1.pep
ANSGDGTPPSPRELYTIPASSGWFRWDGIHETERRALPEFFGGAGGAGFGTATRNPRIYREYRDFIIAKYREDPARRLTFTEVRRALVGDVTLLRKLFAFLDSSGLINFSASSSSVPASRQQEVGVVVEAPVGLQVTPRPPASYFAEEKRVAAGGEKENEFRLPPLTSYSDVFGEWAPGKAPICGFCGEECNGADVETLQDGFKVCSKCSKSNNDNIKEEANKCPGDKKENMENHASSAWTDTETLLLLEGVLKHGDDWDLIAQHVRTKNKSECIAMLIQLPFGEHMLGTINGKFVSRLHINQTDDGKTNQHIMESSSHSTEMADGMQIDGSEDSADKSVEEYPTKRRRLFFSMDATTSLMEQLAILTTAASPDVAAAAADAAIKAFGNENPQARKAFRLNEQEYKTKAFASNHVQQIDHKVSNKDTAMHGQSGSDKQEKKFIASAYQLRAAVATAVGVAAARAKMLADQEEREMELLMASVIETQLRKMQYKIKHFEELDSLMDQEYTAIQQMKGSLMNEWIKVLEHAFRAGVSLPRDELLTKLLLN

SEQ ID NO: 8375 - protein, 210 aa, Zea mays
  unsure (1)..(210): unsure at all Xaa locations
  Clone ID: TF_LIB4766-044-R1-K1-H8.pep
MTRRCSHCSHNGHNSRTCPNRGVKIFGVHLTDGSAIRKSASMGNLSLLSAGSTSGGASPADGPDLADGGGGYASDDFVQGSSSASRDRKKGVPWTEEEHRRFLLGLQKLGKGDWRGISRNFVVSRTPTQVASHAQKYFIRQSNMSRRKRRSSLFDMVPDESMDLPPLPGSQEPETSMLNQPPLPPAVXGEVGSMESDTSAVAEKSGASAL

SEQ ID NO: 8376 - protein, 283 aa, Zea mays
  Clone ID: TF_ZmC152_2.pep
MVSASAPPPPPQAQSDAAGSGEEASKKVRKPYTITKSRESWTEQEHDKFLEALQLFDRDWKKIEAFVGSKTVIQIRSHAQKYFLKVQKNGTSEHVPPPRPKRKAAHPYPQKASKNEPNYGLKTDSSSIHRNSGMNVSVSSWPHRSIPQAVASSMVKDLGAGTPGPNNFCSSSTEGPPRTWQPGETNGPINQIPSLRLMPDFAGVYSFLGSVFDPSTSDHLQKLKEMNPIDVETALLLMRNLSINLTSPDFEDQRKLLSLYSASDGPELGSSRSSALATSAPFM

SEQ ID NO: 8377 - protein, 317 aa, Zea mays
  unsure (1)..(317): unsure at all Xaa locations
  Clone ID: TF_ZmC34_1.pep
MTRRCSHCSHNGHNSRTCPNRGVKIFGVHLTDGSAIRKSASMGNLSLLSAGSTSGGASPADGPDLADGGGGYASDDFVQGSSSASRDRKKXVFLGLKKNTGXVFAGITKAWERGXWRGISRNFVVSRTPTQVASHAQKYFIRQSNMSRRKRRSSLFDMVPDESMDLPPLPGSQEPETSMLNQPPLPPPVEEEVESMESDTSAVAESSGASALMPESLQPTYPMIVPAYFSPFLQFSVPFWPNQEDGGDLPQETHEIVKPVAVHSQNPINVDELVGMSKLSIWEHGQETVSTSLSLNLLGGQNRQSAFHANPQTRAQA

SEQ ID NO: 8378 - protein, 317 aa, Zea mays
  Clone ID: TF_ZmC34_2.pep
MTRRCSHCSHNGHNSRTCPNRGVKIFGVRLTDGSAIRKSASMGNLSLLSAGSTSGGASPADGPDLADGGGGYASDDFVQGSSSASRERKKGVPWTEEEHRRFLLGLQKLGKGDWRGISRNFVVSRTPTQVASHAQKYFIRQSNMSRRKRRSSLFDMVPDESMDLPPLPGSQEPETSVLNQPPLPPPVEEEEEVESMESDTSAVAESSAASALMPESLQPTYPMIVPAYFSPFLQFSVPFWPNQEDGGDLPQETHEIVKPVAVHSKNPINVDELVSMSKLSIGEPGQETVSTSLSLNLLVGQNRQSAFHANPQTRAQA

SEQ ID NO: 8379 - protein, 215 aa, Zea mays
  Clone ID: TF_ZmC34_3.pep
MTRRCSHCSHNGHNSRTCPNRGVKIFGVHLTDGSAIRESASMGNLSLLSAGSTSGGASPADGPDLADGGGGYASDDFVQGSSSASRDRKKGVPWTEEEHRRFLLGLQKLGKGDWRGISRNFVVSRTPTQVASHAQKYFIRQSNMSRRKRRSSLKPSNPIQTRQARNPPMAHRVLLLLSLASAAVAAAVDAEDPLIRQVVPGGDDNDLELNAESTF

SEQ ID NO: 8380 - protein, 314 aa, Zea mays
  unsure (1)..(314): unsure at all Xaa locations
  Clone ID: TF_ZmC34_4.pep
MTRRCSHCSHNGHNSRTCPNRGVKIFGVRLTDGSIRKSASMGNLSLLGGSTSGGGGASPADVGHDAAAEGYASDDFVQGSSSANREREKGVPWTEEEHRRFLLGLQKLGKGDWRGISRNFVVSRTPTQVASHAQKYFIRQANMSRRKRRSSLFDLVPDESDLPPLPGNQEPEAQILNHPPLPPPXREEEVESMESDTSVIAESSSASAIMPESLQPSYPMIVPAYFSPFLQFSVPFWPNQEDGGDLPQETHEIVKPVAVHSQNPINVDELVGMSKLSIWEHGQETVSTSLSLNLLGGQNRQSAFHANPQTRAQA

SEQ ID NO: 8381 - protein, 90 aa, Zea mays
  Clone ID: TF_LIB3592-047-Q1-N6-E1.pep
MGRAPCCGKVGLKKGRWTREEDEILARYIEEHGEGSWRSLPKNAGLLRCGKSCRLRWINYLRAGLKRGNITEEEEDVIVKLHATLGNRAT

SEQ ID NO: 8382 - protein, 141 aa, Zea mays
  unsure (1)..(141): unsure at all Xaa locations
  Clone ID: TF_LIB4969-013-A1-XP1-F1.pep
MGRHSCCYKQKLRKGLWSPEEDEKLMNHITKHGHGCWSSIPKLAGLQRCGKSCRLRWINYLRPDLKRGAFSQDEEDLIIELHAVLGNRWSQXAAQLPGRTXYEIKNLWNSCIKKELRQKGIDPNTHXPLTXADRSGAAPPS

SEQ ID NO: 8383 - protein, 243 aa, Zea mays
  Clone ID: TF_LIB4742-042-R1-K1-A11.pep
MGRSPCCCHDAGVKKGPWTEEEDRALVDHIQRHGGHVSSWRNLPKAAGLNRCGKSCRLRWTNYLRPDIKRGNFTDDEERLIIGLHAQLGNRWSTIATHLDGRTDNEIKNYWNTHIRKKLLRMGVDPVTHQRLPPDDLLLAVSASPTTTILSAAASQLRGLNTALMQVQALQFLLQAVSGVGNDVNAAAAAANGGGGLVPSLSAAADNNAVLNASRSVVPGFQDLQLTTMTRASSRVSRESRVS

SEQ ID NO: 8384 - protein, 230 aa, Zea mays
  Clone ID: TF_ZmC10786_1.pep
MGCKACQKPKVQYRKGLWSPEEDEKLRDYILRYGHGCWSALPLKAGLQRNGKSCRLRWINYLRPGLKHGVFSREEEETVMSLHAKLGNKWSQIARHLPGRTDNEVKNYWNSYLKKRVEGGAQGKHGAADPATPGRSDVHGSPDDPSENNGQGSVVSRPANSDSSEPAVESSSADDSSCLTVTEPAGARASATAAVRPHAPVLPKVMFADWLDMDYGTSLVALGPDAGVFD

SEQ ID NO: 8385 - protein, 204 aa, Zea mays
  unsure (1)..(204): unsure at all Xaa locations
  Clone ID: TF_21215256.pep
MGRSPCCEKAHTNKGAWTKEEDDRLVAYIKAHGEGCWRSLPKAAGLVRCGKSCRLRWINYLRPDLKRGNFTEEEDELIIKLHSLLGNKWSLIAGRLPGRTDNEIKNYWNTHIRRKLLSXXIDPVTHRPINEHTSNITISFEDWGQGKALKCPDLNLDLCISPPCQEEEEAMLLRPVKREEAGLCFSCSLGLPTAMLDFRRLEMK

SEQ ID NO: 8386 - protein, 218 aa, Zea mays; identical to SEQ ID NO: 8368
  Clone ID: TF_ZmC1193_3.pep

SEQ ID NO: 8387 - protein, 415 aa, Zea mays
  unsure (1)..(415): unsure at all Xaa locations
  Clone ID: TF_ZmC3305_2.pep
MERSRPGAAPKPSPEEEVAAEGHAHGDDVTGQEEEEEATPVVLKKGPWTASEDAMLMDHVRHHGEGNWNAVQRMTGLLRCGKSCRLRWTNHLRPNLKKGSFSPDEELLIAQLHAQLGNKWARMAAHWLAWCAXQLPGRTDNEIKNYWNTRTKRRQRAGLPVYPPEVQLHLALSKRCHYDDYDFPPLASSPQLSATTTTDVQALGAGPGYASSRPAPLDLARSQLAATTTQQTAQFLSPPPFSAPSSPWAKPFARNAQYFQLAHSSPVSPSTPTGPVHPAMPDLSLGGHGARAAAAADQSRLPPLSPSPGPRVELPSNQYGQPAPPTSAAAVAAGLALPDHQNAASLEQMLQELHDVIKVEPQALVPASGGGAALERHDCGVSVPESRISGLQRRGDDMDTLFGLVHPALGAPETA

SEQ ID NO: 8388 - protein, 164 aa, Zea mays
  Clone ID: TF_ZmC3305_1.pep
MERSRPGAAPKPSPEEEVAAEGHAHGDDVTGQEEEEEATPVVLKKGPWTASEDAMLMDHVRHHGEGNWNAVQRMTGLLRCGKSCRLRWTNHLRPNLKKGSFSPDEELLIAQLHAQLGNKWARMAAHVSTLSFALDNKFIYGEWRRPADVTDVCEFVPRANSELT

SEQ ID NO: 8389 - protein, 192 aa, Zea mays
  Clone ID: TF_ZmC659_5.pep
MGRAPCCEKMGLKRGPWTPEEDKILAAHIHSHGHGNWRALPKQAGLLRCGKSCRLRWINYLRPDIKRGNFTDEEEQSIIQLHQLLGNRWSAIAARLPGRTDNEIKNVWHTHLKKRLDPGAQEQLEEASAAKKRKKPAAAARKREGKIKMRKLDALTAKAAPVLSSPRRSVSSTLTESRHRPRAGEEQHGNSG

SEQ ID NO: 8390 - protein, 197 aa, Zea mays
  unsure (1)..(197): unsure at all Xaa locations
  Clone ID: TF_ZmC17037_1.pep
MGRSPCCEQAHTNKGAWTKEEDQRLIAYIKAHGEGCWRSLPKAAGLLRCGKSCRLRWINYLRPDLKRGNFSEEEDELIIKFHELFGNKWSLIAGRLPGRTDNEIKNYWNTHIKRKLLARGMDPQTHRPLAAAPAGGPQQQHCHYQMEPQKRAAAADHXRGRRCHQLAGRPAAAAATTTRRRRWRHRRGGGSATSTST

SEQ ID NO: 8391 - protein, 242 aa, Zea mays
  Clone ID: TF_ZmC30034_1.pep
MNPNFNSVWSAPEINMMNSLITSHIANNTYTNNNQHVVASRSAIVNHNNFGMPTEVVPPVDNMDMMQGYLMDDTDAMRLVQGQQHMPNVVPNQRRHAVKFWTTDEHRNFLRGLEVFGRGKWKNISKYFVPTRTPVQISSHAQKYFRRQECTTEKQRFSINDVGLYDTQPWVRQNNSSSSWEALTFTAGRAYNSTNYCAFNSLPYASSQASNNQVATWITDQQATASSSIAPPATEESQIYNR

SEQ ID NO: 8392 - protein, 297 aa, Zea mays
  unsure (1)..(297): unsure at all Xaa locations
  Clone ID: TF_ZmC337_1.pep
MARKCSHCGNCGHNSRTCGRETMLCEAGDARNGGGGLRLFGVQVRIGGGVGAGSASMKKSYSMDCLQLAAPIGCSASSCQSPSTXSSSSSLLLMSIEEGSERGAPNGYLSDGPHGRAVQERKKGVPWSEEEHRQFLSGLEKLGKGDWRGISRSYVPTRTPTQVASHAQKFFLRQSSLGKKKRRSSLFDMVPICENSASISDPLSSEGASTSLSLNVPRHGVTSVSERAALDLNSTEEDDSGADASSASASGAGTRPPFPAAQTEPLQPSSLGRGRGHHCSPLDLELGMSLPAPSIGT

SEQ ID NO: 8393 - protein, 194 aa, Zea mays
  Clone ID: TF_ZmC337_5.pep
NNRLVGNVAAGVFLSISNTAGVPWSEEEHRQFLSGLEKLGKGDWRGISRSYVPTRTPTQVASHAQKFFLRQSSLGKKKRRSSLFDMVPICENSASISDPLSSEGASTSLSLNVPRHGVTSVSERAALDLNSTEEDDSGADASSASASGAGTRPPFPAAQTEPLQPSSLGRGRGHHCSPLDLELGMSLPAPSIGT

SEQ ID NO: 8394 - protein, 205 aa, Zea mays
  Clone ID: TF_ZmC42_49.pep
MDFHHSSSSSVHAHAAAARPWIKAEDFNPSSSVHAAGPPAVPAAARPWNRAEDKVFESALVAWPEHTPDRWALVAAQLPGRTPRDAWEHYEALVADVDLIERGAVDAPSCWDDDDGDHQVRGAGADRARREARRPGIPWSEEEHRLFLQGLEKYGRGDWRNISRFSVRTRTPTQVASHAQKYFNRQFNPASRNSKRKSIHDITTP

SEQ ID NO: 8395 - protein, 151 aa, Zea mays
  Clone ID: TF_168591.pep
MGRTPCCEKVGLKRGRWTAEEDQLLANYIAEHGEGSWRSLPKNAGLLRCGKSCRLRWINYLRADVKRGNISKEEEDIIIKLHATLGNRRHLMIEADYSPPSTVRCLPRGALAYLTLPRQSPFQTARITYDRIGSALLRSVRFCFRCVPSRW

SEQ ID NO: 8396 - protein, 302 aa, Zea mays
  Clone ID: TF_ZmC20189_1.pep
MGCKACDKPKPNYRKGLWSPEEDQKLRDYILLHGHGCWSALPAKAGLQRNGKSCRLRWINYLRPGLKHGMFSPEEEETVMSLHATLGNKWSRIARHLPGRTDNEVKNYWNSYLKKRVEAKDQGPSTPAPAASNSDDDSHCVKQRRDDGDTAAGANGPADSGASEPRESSSADDSSCLTDPHACRPHAPVPPKVMFADWLDMDMDYVGGALPSTAPAAPGLLGAAGVATASTGDRDRDQHQVMSMSQGSVQVDGPSGADVSLHGFGDSGAGCWEFQEHFDAIDHMQAAGFCDLLSMTDYFGLD

SEQ ID NO: 8397 - protein, 340 aa, Zea mays
  Clone ID: TF_ZmC20189_3.pep
MGCKACDKPKPNYRKGLWSPEEDQKLRDYILLHGHGCWSALPAKAGLQRNGKSCRLRWINYLRPGLKHGMFSPEEEETVMSLHATLGNKWSRIARHLPGRTDNEVKNYWNSYLKKRVEGKDQGPSTPAPAASNSDDDSHCVKQRRDDDGTADSGASEPRESSSADDSSCLTDPHACRPHAPVPPKVMFADWLDMDYVGGALPATAPAAPGLLGAAGVATASTGDRDQHQVMSMSQGSVQVDGPSGADVSLHGFDDSGAGCWEFQEHFDAIDHMQGGRLLRPALHERLLRPRLDSNPGWSSIVGERICVFFYLHFVRSLGERLACVVYCRVRIDRGILKSR

SEQ ID NO: 8398 - protein, 76 aa, Zea mays
  unsure (1)..(76): unsure at all Xaa locations
  Clone ID: TF_LIB3061-045-Q1-K1-A8-R2B.pep
MVMPPCCDKVGEKIGPWTLXEDLMLVCYDQELGPENWRAAPTNSGLMRCSXSCKLRWTIYLRPGMKRVNFTDLEEK

SEQ ID NO: 8399 - protein, 134 aa, Zea mays
  Clone ID: TF_ZmC42_23.pep
MENCEVLFPGGSSGANAFTRPEQERKRGQPWTEEEHKLFLLGLKKYGRGDWRNISRNFVQTRTPTQVVSHAQKYFMRHNSGGKDKRRSSIHDITTVKLSDDQDQPPSSPSQSSLITDQFNALALTSGAAYSPSN

SEQ ID NO: 8400 - protein, 304 aa, Zea mays
  Clone ID: TF_ZmC42_54.pep
MMRETYMDVLPPVDHIAASRSGGWFPGAARLWTAAENKQFERALAGLDLCRPDWEKVARAIPGRTVREVVSHFKSLQVDVQQIESGLVPMPVYGAGAGSFTLQWDGCYGPADSRHNGYRFGSGGCGRRHHGRTPEQDRKKGVPWTEEEHRLFLLGLKKYGKGDWRNISRNYVQTRTPTQVASHAQKYFIRLNSGGKDKRRSSIHDITTVNLTDDERAPSPSRSSLITTTSQPNAPAPAAAVIGGPFSSAAAAEAKQHQHGAGNLPPNRTSVVPAVYRMDDSQDHGLQCGPLRHQLVASHHSVLF

SEQ ID NO: 8401 - protein, 370 aa, Zea mays
  Clone ID: TF_ZmC24814_1.pep
MNSFQSYNTDYFYAHGAQTQNFCAEDLLNFDSTVFLDDSESESISTLQSGSKKITKTSPAVQAKQASYKKSKRARNPWTPKEDAKLMELMKKYGQSWAMISSQLEGRTGKQVRDRYLNKLRPNIKLGDWSVQEDELVVKLLKEVGNRWSLIANHLPGRTEGQVKNRFYSFIKKRLQPDGTLCQISDSRTSSEEYTSFSNSPQPETGFDFGYEFDVNAANGSAINFAPQTFNCAITKGAYVTEEEIYSEGSTTQGPTSQVGNSPFRGEVDPTDVISYDLPEAFFYKQPSQHRHFNLAPIEHDSQVDAILTNVTNYFAENNKFYMPSEVDSFFTQAETQGQAPQDDRLNQLSMRKAYLELALAKTLNEMKSL

SEQ ID NO: 8402 - protein, 223 aa, Zea mays
  unsure (1)..(223): unsure at all Xaa locations
  Clone ID: TF_ZmC13187_3.pep
MVTVREETRKGPWTEQEDLXTGLNRTGKSCRLRWVNYLHPGLKRGRMSPHEERLILELHARWGNRWSRIARRLPGRTDNEIKNYWRTHMRKKAQERKRNMSPSSSSSSLTYQSGYPDTPSTIGVEGQELHGGSGCITSILKGTPPDMDGYPMDQIWMEIEAPQMPSEESFVGGNHNVCSSLATPLPPPTVWEYYPEACWKVDDEIKMAPQFQFGYSEGVGPCF

SEQ ID NO: 8403 - protein, 262 aa, Zea mays
  Clone ID: TF_ZmC13187_4.pep
LEAGREATKTKWRTLLCTSFLLPPPLLLPNRLDFIKIILKLEPTSRQRKKSKKTGSQPIQGLNRTGKSCRLRWVNYLHPGLKRGRMSPHEERLILELHARWGNRWSRIARRLPGRTDNEIKNYWRTHMRKKAQERKRNMSPSSSSSSLTYQSGYPDTPSTIGVEGQELHGGSGCITSILKGTPPDMDGYPMDQIWMEIEAPQMPSEESFVGGNHNVCSSLATPLPPPTVWEYYPDACWKVDDEIKMATQYQFGYSEGVGPCF

SEQ ID NO: 8404 - protein, 258 aa, Zea mays
  Clone ID: TF_ZmC13187_5.pep
LGTSRPAGTAQARSNLSSVASTSVLVFASSLKIDKGSNSARALLYLHAGLNRTGKSCRLRWVNYLHPGLKRGRMSPHEERLILELHARWGNRWSRIARRLPGRTDNEIKNYWRTHMRKKAQERKRNMSPSSSSSSLTYQSGYPDTPSTIGVEGQELHGGSGCITSILKGTHPDMDGYPMDQIWMEIEAPEVPSEESFVGGNENVCSSLATPLPPPTVWEYYPEVCWKLDDEIKMAPQFGYIVKELTPASDTIYIGSDY

SEQ ID NO: 8405 - protein, 208 aa, Zea mays
  Clone ID: TF_LIB4729-111-A1-K1-E11.pep
MAAPPVAAALSALHEAQETHGHDDSRAGHARGHWRPAEDAKLKDLVALYGPKNWNLIASKLHGRSGKSCRLRWFNQLDPRVNRRPFSAAEEQRLVAAHRAHGNKWALIARLFPGRTDNAVKNHWHVLTARRQRERTGAPPRRRKPSSSSPAAHHHRAPSPLPFCAGKATRPRSVRRRRRRRRVRRVRVVHLLRRPLLPRLRVRPRRPL

SEQ ID NO: 8406 - protein, 304 aa, Zea mays
  unsure (1)..(304): unsure at all Xaa locations
  Clone ID: TF_ZmC2941_2.pep
MGVESECDRIKGPWSPEEDEALRRLVERHGARNWTAIGRGIPGRSGKSCRLRWCNQLSPQVERRPFTPEEDAAILAAHARLGNRWAAIARLLPGRTDNAVKNHWNSSLKRKLATATATSSGSDAERACKRASPGPGSPTASDRSDLSHGCGAAQVFRPVPRAGGFDAISAADVRPPPPPAVADEDPLTSLSLSLPGXGPVAVGLPPRQRPEPLPGALPLVVPVAAVYSTRLPSAGGSVSVVVXFSGELVAAMQEMIRAEVRKYMSGAGLRAGCGPGAVGEVCMPQLVEGVMRAAAERVGVVTRP

SEQ ID NO: 8407 - protein, 244 aa, Zea mays
  Clone ID: TF_ZmC42_34.pep
TAEEVRRHYEALVEDVAAIEAGRIPLPRYAGEESSAATPEGSGAAGPSTPKDGGGGSGHRREERKGGVGADAGKSCSKAEQERRKGVPWTEEEHRLFLLGLDKFGKGDWRSISRNFVISRTPTQVASHAQKYFIRLNSMNRDRRRSSIHDITSVTAGEVATAGAPITGGGPTAAGAMPMGPGGMKHHHPVPPMGMYGHAPMGHPVAGHMVAPAAVGTPVMFPPGHHSPYVLPVGYPAPPTKMHQ

SEQ ID NO: 8408 - protein, 77 aa, Zea mays
  Clone ID: TF_ZmC177016_1.pep
DEEKLIIHLHSLLGNKWSAIATKLPGRTDNEIKNYWNTHLRKKLLAMGIDPVTHQRRTDLNLLAAGGFTNLLAAANL

SEQ ID NO: 8409 - protein, 155 aa, Zea mays
  unsure (1)..(155): unsure at all Xaa locations
  Clone ID: TF_LIB3600-012-P1-K6-D11.pep
RWTNHLRPDLXXSVWTEEDDMALIKAHKRCGNHWSTIATFLPGRSENAVKNHWNATKRSLKAKRRLKKKSNAQQVPAGQWSVLEEYIRSLYPDLADGAGADQTPPAAEDSPPSSYNLGSYSYGEVISSPASAAAPPGSFDQMTAMGLYLGASSSS

SEQ ID NO: 8410 - protein, 356 aa, Zea mays
  Clone ID: TF_ZmC17058_1.pep
MARRTSGPKKKLRRGLWSPEEDDKLVNHIAKYGHGCWSSVPKLAGLERCGKSCRLRWINYLRPDLKRGAFSQEEEDLIIHLHSMMGNKWSQIASQLPGRTDNEVKNFWNSYVKKKLRQRGIDPATHKPLPLAAEGISSRTAVFSDAELILSSPAAAAGRHMPPPPVAASAAESYVYSYSHSSGGASDGSLQSLSGYNSNSKQTAADHLGAAAAAGYLQQEQDPAAAAAAADALHCGPSGAPAVVLPSVSSSSTLNSMAGLSPAATTTDEQCTNNCSSCSFHSGLEPWLELGSTSGYYGASAAVDHYGAALDELKWSDYVFDGGYGGQPGQGIYGDSKDAVQFVDANALSSSSWCLN

SEQ ID NO: 8411 - protein, 130 aa, Zea mays
  unsure (1)..(130): unsure at all Xaa locations
  Clone ID: TF_LIB4969-008-A1-XP1-D12.pep
MVTVREETRKGPWTEQEDLQLVCTVRLFGERRWDFIAKVSWLNRTGKSCRLRWVNYLHPGLKRGRMSPHEERLILELHARWGNRWSRIARRLPGRTXHEIXNYWRTHMRKKAQERKENMSPSSSSSSLTY

SEQ ID NO: 8412 - protein, 111 aa, Zea mays
  Clone ID: TF_LIB4764-078-R1-K1-F4.pep
MGRAPCCEKVGLKRGRWTAEEDQLLANYIAEHGEGSWRSLPKNAGLLRCGKSCRLRWINYLRADVKRGNISKEEEDIIIKLHATLGNSLHSSAGPWPSGGRKTSSKLATVS

SEQ ID NO: 8413 - protein, 95 aa, Zea mays
  Clone ID: TF_LIB4767-023-A1-K1-E7.pep
MGRAPCCEKVGLKRGRWTAEEDQLLANYIAEHGEGSWRSLPKNAGLLRCGKSCRLRWINYLRADVKRGNISKEEEDIIIKLHATLGNRDTAAHQS

SEQ ID NO: 8414 - protein, 189 aa, Zea mays
  Clone ID: TF_LIB5117-052-A1-PF1-E5.pep
MAEAEGQLAACWGKQDDEWRKGPWTTQEDKLLLDHVAQHGEGRWNSVSKLTGLKRSGKSCRLRWVNYLRPDLKRGKMTPQEESTIVQLHSLWGNRWSTIARSLPGRTDNEIKNYWRTHYKKGKPSKNIERARARFLMQRREMQQQQQQQQQKLLLGQGKDAELASATAEDDVDEKMTGNVGPAATALAD

SEQ ID NO: 8415 - protein, 222 aa, Zea mays
  unsure (1)..(222): unsure at all Xaa locations
  Clone ID: TF_LIB4744-081-Q1-K1-A2.pep
MYALRCTCTAPPVCPHPSALAYLFPLPPVIIATKPNQTRAQEELPRKLRGGARKQAHEGEPGMGRSPCCEKAHTNKGAWTKEEDQRLIAYIRAHGEGSWRSLPKAAGLLRCGKSCRLRWMNYLRPDLKRGNFTGDDDELIIKLHALLGNKWSLIAGQLPGRTDNEIKNYWNTHIKRKLLSRGIDPQTHRPLSGGAGSALTTTXSTAGFPSPGPRPGPGPRPR

SEQ ID NO: 8416 - protein, 188 aa, Zea mays
  unsure (1)..(188): unsure at all Xaa locations
  Clone ID: TF_ZmC1193_14.pep
MGRSPCCEKAHTNKGAWTKEEDQRLIAYIRAHGEGSWRSLPKAAGLLRCGKSCRLRWMNYLRPDLKRGNFTGDDDELIIKLHALLGNKWSLIAGQLPGRTDNEIKNYWNTHIKRKLLSRGIDPQTHRPLSGGAGSALTTTXSTAGFPSPAPAFRPTPTPPPAVXVVPPNAIFARXAPVVDGHSSSGAS

SEQ ID NO: 8417 - protein, 334 aa, Zea mays
  unsure (1)..(334): unsure at all Xaa locations
  Clone ID: TF_ZmC192589_1.pep
MAKQSCCHKKKLRRGLWSPEEDEKLMNHIAKYGHGCWSSVPKLAGLDRCGKSCRLRWINYLRPDLKRGTFSQEEEDLIIHLHSLLGNKWSQIAAQLPGRTDNEVKNFWNSYIKKRLRERGIDPATHQPLAEPAAAATATTTTTVSRRAVFGDVDLIPTTTTTTIQVPPPSFEGGPMLESVKLAVELDWPVAGDGVTSRPCYLQGGCFDMDALQQHCGPIPPAPVVPSASASASSSTLTSMAEAEHCSTNNVAAGGNLPWLELGANAVADAGGHVVGSCYAGALDELRWSEYFDSAFQAAESQQGALQPGQCVYGGKDDVPGALRVSMXGLSNWC

SEQ ID NO: 8418 - protein, 925 aa, Zea mays
  Clone ID: TF_ZmC335_2.pep
MRIMIKGGVWKNTEDEILKAAVMKYGKNQWARISSLLVRKSAKQCKARWYEWLDPSIKKTEWTREEDEKLLHLAKLMPTQWRTIAPIVGRTPSQCLERYEKLLDAACAKDENYEANDDPRKLRPGEIDPNPESKPARPDPVDMDEDEKEMLSEARARLANTRGKKAKRKAREKQLEEARRLASLQKRRELKAAGIDTRHRKRKRKGIDYNAEIPFEKRPPSGFYDTVGEDRPPEHVQFPTTIEGLEGKRRADIEAQLRKQDIARNKILQRQDAPAAIMQANKLNDPEAVTKRSKLMLPPPQISDHELEEIAKMGSAGDPALADELGEGSTATRTLLASYSQTPRLGMTPLRTPQRTPAGKGDAIMMEAENLARLRESQTPLLGGDNPELHPSDFSGVTPRKKEIQTPNPMATPLASPGPGITPRISMTPSREGHSFGLTPKATPLRDELNINEVEMQDNTKLELRRQAELRKSLRSGFASIPQPKNEYQIVMPPITEDEKEEAEEKIEEDMSDRLARERAEEQARHEALLRKRSKVLQRSLPRPPAVSVEIIRQSLIRSGESRSRSTFMPPTSLEQADELINEELLRLLEHDNAKYPLDEKTQKEKKKGSKRQQNGGPLVPEIDDFDEDELKEASSMVEEEIQYLRVAMGHENESFEDFVKAHDACQDDLMFFPTSNSYGLASVAGNADKISALQNEFETVKKRMDDEAKKASRLEQKIKLLTQGYQIRAGKLWSQVQDTFKQMDTAATELECFQELQKQEHLAASYRIQNLSEEVSKQKALERTLQSRYGELVSGFQRIQEQVEEHKRQLKVQEAVEAESHAQEEEAAASNHAAAEEEDERKEDDERKEEDGSKSLSSEEKPQQTSTATDEEPAGSKGTTEDQMDVDSGNGEGGVVGPVPPAPDTEGGNDEVSVQEISEAQPLP

SEQ ID NO: 8419 - protein, 228 aa, Zea mays
  unsure (1)..(228): unsure at all Xaa locations
  Clone ID: TF_ZmC3484_2.pep
MGRLSCGGVQPKLRKGLWSPEEDERLYGHIIRHGVGCWSSVPKLAGLQRCGKSCRLRWINYLRPDLKRGGFSQQEEDLIVALHEILGNRWSQIASHLPGRTDNEIKNLWNSCLKKKLRQRGIDPATHKPIAAEAGSALLHHDDQSKPQQQPAAAAVFDPFPVTDFGFDLGAAALYGEXSDASSDAGFVADYSSVLDVSENLGYGESSSNSSGWTARRWACRARQRGAA

SEQ ID NO: 8420 - protein, 185 aa, Zea mays
  Clone ID: TF_LIB4741-010-Q1-K1-H11.pep
METALQQSAATTAGGGMRPGAATTVKKARQELEQELRFPQAAPADQGGLDEELRRGPWTVDEDLTLINYIADYGEGRWNALARAAGLKRTGKSCRLRWLNYLRPDVKRGDFTADEQLLILDLHSRWGNRWSKIAAHLPGRTDNEIKNYWRTRVQKHAKQLNCDVNSKRFKDAMRFLWMPRLAERA

SEQ ID NO: 8421 - protein, 158 aa, Zea mays
  Clone ID: TF_ZmC29713_11.pep
PARDGEGRRACKKVGLKRGRWTAEEDQLLANYIAEHGEGSWRSLPKNAGLLRCGKSCRLRWINYLRADVKRGNISKEEEDIIIKLHATLGNRRPLIAGPLPAPPSAVRCHHDNLSLACTDRDAMRSSSGKLINVLFQGLRLVLLYSEILCIVCQKPRC

SEQ ID NO: 8422 - protein, 401 aa, Zea mays
  Clone ID: TF_ZmC2165_1.pep
MSAAETAVSPTTTPQPQLQSDPNAAADAASSNSLWVADETQTLTEVLLQPQPNHLSPPPSGEGDDGITASGAPVGGDAAASASAAAAANATIEERVRGPWSPEEDAVLSNLVEKFGARNWTLIARGIPGRSGKSCRLRWCNQLDPQVKRKPFTEEEDRIIMAAHAVHGNKWASIAKLLDGRTDNAIKNHWNSTLRRRYCNDGQCKHGGSVERSIPKVSREVSEEPWPLNDLNSFTAMDVKDDPVQTAPDTSPRARHITDHCSITQVVDPPYLSRPAAKIGAFRPYYLGHTEPTQQEMPGAVVMFDSTHKVSTPESEVFKFVDPICFAAEVPDKCGYGCCGAHEQHRKNSLLGPEFSEFEGHPPVLNISFASLVSEISSIAWMRSGMQSSDSSNLMQSIPPT

SEQ ID NO: 8423 - protein, 264 aa, Zea mays
  Clone ID: TF_ZmC22694_1.pep
MMKNYPGPASSSSVAVEVKKGSWSPEEDALLTRLVEQHGPHRWSLISAPIPGRSGKSCRLRWCNQLSPDVHHRPFTPHEDALILAAHARYGNKWATIARLLPGRTDNSIKNHWNSNLRRCRRRAAAAAVASRPQVQDSDDAPAAAAAHDDQPAAVVAAGGLGGGNSSSGLPPAAAGAATAEAEPSLSLSLGLPLPAAEPAEAAADDESRNSQGQASPLLEEGEGNAQLLAVVRRMVREEVQRQTGQLAYSLMAAAAARAKGHHR

SEQ ID NO: 8424 - protein, 318 aa, Zea mays
  Clone ID: TF_LIB4732-032-F12_FLI.pep
MGRSPCCDENGLKKGPWTQEEDEKLLHYIQKNGHGSWRTLPRLAGLNRCGKSCRLRWTNYLRPDIKRGKFSREEEQTILHLHSVLGNKWSAIATHLPGRTDNEIKNFWNTHLRKRLIQMGFDPMTHRPRTDFFAALPQLIALAALRGQLPADPDPPQQAGTTAAAAAALAGLIGALCSPPQLTLLDTTTATTAAAAPPVVSSSSADDDAAHQYYLPRTTFPDAPGSGEAAHQRQQQAAGLISYGRRPDDAGGDVDVFACYGGGGGSSLPPLTDLSDDAATLLQLQVDTASSEFGSGGSSPLLPWPEFFPDDPFITDFL

SEQ ID NO: 8425 - protein, 168 aa, Zea mays
  Clone ID: TF_ZmC344_2.pep
MGRSPCCEKAHTNRGAWTKEEDERLVAYVRAHGEGCWRSLPRAAGLLRCGKSCRLRWINYLRPDLKRGNFTADEDDLIVKLHSLLGNKWSLIAARLPGRTDNEIKNYWNTHIRRKLLGSGIDPVTHRRVAGGAATTISFQPSPNTAVAAAAETAAQAPIKAEETAAVK

SEQ ID NO: 8426 - protein, 340 aa, Zea mays
  Clone ID: TF_UC-ZMFLB73162H04_FLI.pep
MGRGRAPCCAKVGLNRGSWTPQEDMRLIAYIQKHGHTNWRALPKQAGLLRCGKSCRLRWINYLRPDLKRGNFTDEEEEAIIRLHGLLGNKWSKIAACLPGRTDNEIKNVWNTHLKKKVAQREKKKAGAGSGDAGTPATAPLSSATSSTTTHNSSGGSDSGDQCGTSREPDATDVCPLQLEDMDVSDMLVDGAPPAAQPMPSPSSSSSLTTCVGGVEELIELPVIDIEPEIWSIIDGESAVARHGGDAAAPCTGTGTAVSTSEAEEAAANDWWLENLEKELGLWGYAEEDTQAHPDLLDHYTGLSPLCALEGDPVSTYFQTGPAAAEPELLVVVEPSAVLL

SEQ ID NO: 8427 - protein, 324 aa, Zea mays
  Clone ID: TF_ZmC372_1.pep
TRPVSSPHLLSWKPPRSDPDKMAAFFGAAPPPALASFRHEEEEEQHQDAAEEVYHVDDVDEGSGDGRGHGGAGQGKLCARGHWRPAEDAKLKELVAQFGPQNWNLIAERLDGRSGKSCRLRWFNQLDPRINRRAFSEEEEERLLAAHRAYGNKWALIARLFPGRTDNAVKNHWHVLMARRQREHSGALRRRKPSSTSPSPAPAPAPHLAPVVVLHHHHHYAGGSPPMPPLHAADAHTQYTAAAAAADTRAHSGGESDETASTCTTDLSLASAAPCFYQSGYDVAPRAAAFAPSARSAFSAPPATARSDDKVSLPFFDFLGVGAA

SEQ ID NO: 8428 - protein, 114 aa, Zea mays
  Clone ID: TF_LIB3245-422-P1-N1-B11.pep
GKSCRLRWVNYLRPDLKRCKITPQEESVIVQLHALWGNSTVLRWSTIARSLPGRTDNEIKNYWRTHFKKGKPSKNVERARARFLKQRREMMMQQQSLGGSTCTSTRAVTSAAAR

SEQ ID NO: 8429 - protein, 123 aa, Zea mays
  unsure (1)..(123): unsure at all Xaa locations
  Clone ID: TF_jC-zmX700203880a1.pep
QGEFNYRKALWSPEEDXKLKHYILTDGLGCXSAGPVKAAVQRNGKSXRLGXINYLRPGLNRGMMSQEEEXDVLIYLQAKLGNKWAQIAIHLPGRTDNEAKNYWNSYLTKRVTPEAQSAVVQFQ

SEQ ID NO: 8430 - protein, 233 aa, Zea mays
  Clone ID: TF_ZmC42_31.pep
MMAEAWTPVLLPATAPCFWQQDTHSVLWRRGDAWTAEENKLFEKALAQIDRNAPDRWEKVAAVLPWKTVDDVRSQYHALEKDVGVIEAGGLVPFPRYSGSVPPPSGFALEDWGGGDRGFRRARGSEEMQERKKGVPWTEEEHKLFLMGLRKYGRGDWRNISRKYVTTRTPTQVASHAQKYFIRLSSGGKDKRRSSIHDITTVNLPGDAPRSSPPAATTNPSAGALVVDVKPFV

SEQ ID NO: 8431 - protein, 773 aa, Zea mays
  Clone ID: TF_ZmC54113_1.pep
MPRKASSNSDARAKSRKRKRAAASASPSKQPDDHSDDSDTAAAANGDDETSRAASVNGGGGTLAGVGGDDDPVLDLRAAEVLSSSAEPVSAFPAAVRRAVSRPHPSVLAVIAAERAAASSDDAPVTPASVPVLENISHGQLQVISAMLPDHPSLSYDPDKPSTYVCTPPPLMEGCGVHKQFYDKLHIVPRHSDWFVPQTVHRLERQVVPQYFSGKSQGQTPEKYIMLRNKVIAKYLERPGKRLVFAECQGLVTSTPELYDLSRIVRFLESWGIINYLATGSVYRGPRTASSLIKEETTGELQLVSAPMKSIDGLILFDRPKCSIQANDISSLVSTSSAPFVVNHDGDSANLDEKIWERLSESSCSFCSQPSHASDYESQKETDIALCSDCFHNAKFVTGHSNLDFQRVDAMKDGSDTDGDRWTDQETLLLLEGIEKFNDNWNHIAGHVGTKSKAQCIHHFIRLPVADGLLENIEVPEASLPSGMQSSGFLHSDSNGSTSGSQPGNQIPFINSANPVMSLVAFLAAEVGPRVAASCASAALSVLTREDSRMNAEGIDAMGHGTHLNYGPSSSISSETVKNAASCGLSAAATKSKLFADQEEREIQRLSATIINHQLKRLELKLKQFAEVETMLLKESERLDLMRQQLVTQRIRMLSTRFTSTGGTIPGGSSGMVSNLMNQASGLRPPLMMPGSVTQSSMPAMYANNMQGHPQMALLQQRQQMLSFGPRLPLSAINPGSSSSAPNMMFNHGMPNSAAPNHHPLLRSPSGDNSNVG

SEQ ID NO: 8432 - protein, 385 aa, Zea mays
  Clone ID: TF_ZmC21015_1.pep
MGHHCCSKQKVKRGLWSPEEDEKLVKYITAHGHSCWSAVPKHAGLQRCGKSCRLRWINYLRPDLKRGTFSDHEERTIIDVHRILGNRWAQIAKHLPGRTDNEVKNFWNSCIKKKLIAQGLDPKTHNLLPASRTLLHGNGANPSSNNPAHFNSNGCAAVVSVATTPFTISSPTKAAAYGTVTATPPPETMAPATYDVPNNYPDGMLMRHDQAATAAAIPGYPYHPGNGGGVLMSFRDQNAGLQTSVDFVNGSSSSSSMDHAAGMPNGNGFSQQGMGAAFMDVTAGMWSTAAVDSGMCAGMEVAQPPPPPPQQPLPPQGLVQGEVLVGRQTVMNGGGAVADKGMDMMDVSSVYGGAGAMAFDLELMESCALFCGSTGNTMEQLQWDC

SEQ ID NO: 8433 - protein, 319 aa, Zea mays
  Clone ID: TF_ZmC42_29.pep
PSPPLPLKLYCRRESAPPPADQTSAMTTLATDTAAWTREEDKAFENAVAASAAPPADGPPDDGWFTALVASVPARTAEEVRRHYEALVEDVAAIEAGRIPLPRYAGEESSAATPEGSGAAGPSTPKDGGGGSGHRREERKGGVGADAGKSCSKAEQERRKGVPWTEEEHRLFLLGLDKFGKGDWRSISRNFVISRTPTQVASHAQKYFIRLNSMNRDRRRSSIHDITSVTAGEVATAGAPITGGGPTAAGAMPMGPGGMKHHHPVPPMGMYGHAPMGHPVAGHMVAPAAVGTPVMFPPGHHSPYVLPVGYPAPPTKMHQ

SEQ ID NO: 8434 - protein, 322 aa, Zea mays
  unsure (1)..(322): unsure at all Xaa locations
  Clone ID: TF_ZmC603825_1.pep
MGRQPCCDKVGLKKGPWTAEEDQKLVSFILGNRQCCWRAVPKLAGLLRCGKSCRLRWTNYLRPDLKRGLLSDAEEKLVIDLHAQLGNRWSKIASHMPGRTDNEIKNHWNTHIKKKLRKMGXIDPLTHKPLPPPDPHPPKDHQSPPHTATGGSPEAPPSPSPKPPQEKTAVPVMTPASQQEAGDDDVPLLSNYYPGFCTDEVPMMDPDEIMVPLDDGRTAPPTSTIFSTTTTTSYSAASDSVSSSLSRDEDPLFPLMDLEFPDIAFQMGLLDDMVASWDDSLAQQPLSPSPVYDDDYANQLQIRSGVAFDQEPGNKIVLFSSY

SEQ ID NO: 8435 - protein, 409 aa, Zea mays
  unsure (1)..(409): unsure at all Xaa locations
  Clone ID: TF_ZmC10631_1.pep
MGRAPCCDKASVKKGPWSPEEDAKLKAYIEEHGTGGNWIALPQKIGXLKRCGKSCRLRWLNYLRRNIKHGDFTEEEEHIICSLYISIGSRWSIIAAQLPGRTDNDIKNYWNTKLKKKLLGKRAPSRRARANQDPYLAAGGGNSSTSGGNSAATATQTLSASALERIQLHMRLQGMYGAFGCSGGGGNDDRNAVVGAAAPQWPKLEALLQANRLLPGSLPTDAMATTVSVQQRHHQHLVDHQSLAVGAGNAAAVEGEQQQLSSADAANYMALPGGGFFERPKLGFYSPSAEAEATAAAASVEMNSVAPMVGGGYGGAGFEQYHHHDVLYEFLYSNYGSVGELAQDGHVPTLPELQCPNGAAVDGADEKFSVWTASAACDYGAAGGYQIQLGNSIGSNLHDYVLGGYDQWE

SEQ ID NO: 8436 - protein, 294 aa, Zea mays
  unsure (1)..(294): unsure at all Xaa locations
  Clone ID: TF_ZmC11324_5.pep
AATRPCGKSCRLRWANHLRPNLRKXAFSPEEERQILLLHGLIGNKWARISKHLSGRTDNEIKNYWNTRFKRRQRAGLPPYPPDVERQIKLLRAQNVNPFADADADAAHANANANANASAGLPAPPLLYDVGNPFALLSSIPSLSQTASHSHSPLINQNYPLLNQMQVFHHLGGSQQPSFHQDGSAAAFGDIVSSRLPPLPTARTQAELHSNQFDTSSSGGLLDQSMLIGDEHLLRPNPSMVKVSSMPALSYREPDGSRMLPAHGAGSDGDVSSLGHCPPGQDLHRGATWDFTFE

SEQ ID NO: 8437 - protein, 242 aa, Zea mays
  Clone ID: TF_ZmC13187_1.pep
MVTVREETRKGPWTEQEDLQLVCTVRLFGERRWDFIAKVSGLNRTGKSCRLRWVNYLHPGLKRGRMSPHEERLILELHARWGNRWSRIARRLPGRTDNEIKNYWRTHMRKKAQERKRNMSPSSSSSSLTYQSGYPDTPSTIGVEGQELHGGSGCITSILKGTPPDMDGYPMDQIWMEIEAPQMPSEESFVGGNHNVCSSLATPLPPPTVWEYYPDACWKVDDEIKMAPQFQFGYSEGVGPCF

SEQ ID NO: 8438 - protein, 427 aa, Zea mays
  Clone ID: TF_ZmC2063_1.pep
MGRHSCCYKQKLRKGLWSPEEDEKLMNHITKHGHGCWSTVPKLAGLQRCGKSCRLRWINYLRPDLKRGAFSEEEEDLIVELHAVLGNRWSQIATRLPGRTDNEIKNLWNSSIKKKLRQKGIDPNTHKPLLVEVERSKAAPTTSTERTSESNDVDPSSGAALGNSSHLLLSETAQSPQLPALGKHRRETTSLAHLRVPPKELFLDQLASGHENLTGCRTAGPVPNFPFQQLMCYNNEFGNKNGASNNSLWFNHNETSGSTISTVMPPVSPSTLSTSTGLNRSPDNPHSGGTAIQSTQFYWDTANPSSCSSRGSSGSNGLGFELQSTSSLLESSVFPWTELTPDKNSQVHLGEELKWPDLLHGTFTDTPATMQNLSQSLYEDVIKAESQFNIEGLCAAWSQNLQPQQHLQVSDLYDKDLQRMSLSFENI

SEQ ID NO: 8439 - protein, 200 aa, Zea mays
  Clone ID: TF_ZmC521637_1.pep
MDPNYGEWNFSEIKIAKALIASHNAKSSYSSDMNNKQTDIIDMLQARFPTKEKHKVTKLYVDLMLEKMQMILSGNQHATMGKKLVNDKFGMSIEDPAIDFMGGDLVEKRTAKRKAREDMNTHLDSQKERRYRRFWTIDEHRNFLYGLRAYGRSDWKNISKHFVTTRTPMQISSHAQKYLHRMVFFARRQRSSINDIGPSR

SEQ ID NO: 8440 - protein, 275 aa, Zea mays
  Clone ID: TF_ZmC337_3.pep
MLCEGGDDNNGRSGLRLFGVQVRIGGGGGAGSASMKKSYSMDCLQLAAPHACSSLVSSPSSSSLCSSSSPSSLLLSIDDGLQRGAADGYLSDGPHGRAVQERKKGVPWSEEEHRQFLAGLDKLGKGDWRGIARSYVPTRTPTQVASHAQKFFLRQSSMGKKKRRSSLFDMVPICENSASISDPLDVARHGVASADSERAAVDVDLMNSTTEGDDGRSRDVVSSASGAGTALRFPAAAAQTEPLHPSSSHGHGRGHHCSPLDLELGMSLPAPSVGT

SEQ ID NO: 8441 - protein, 264 aa, Zea mays
  Clone ID: TF_ZmC337_4.pep
GTSRPAGTVVLRPHSRTCGLGLGLGHREIMLCEGGDDNNGRSGLRLFGVQVRIGGGGGAGSASMKKSYSMDCLQLAAPHACSSLVSSPSSSSLCSSSSPSSLLLSIDDGLQRGAADGYLSDGPHGRAVQERKKGVPWSEEEHRQFLAGLDKLGKGDWRGIARSYVPTRTPTQVASHAQKFFLRQSSMGKKKRRSSLFDMVPICENSASISDPLDVARHGVASADSERAAVDVDLMNSMTEGDDGRSRDVVSSGSGAGTALRFPA

SEQ ID NO: 8442 - protein, 559 aa, Zea mays
  Clone ID: TF_ZmC1108_1.pep
MYRVKSEGEGEGEGDCEMMLQEQMDSLVADDVSSGGGSPHRGVGTPLKKGPWTSAEDAILVDYVKKNGEGNWNAVQKNTGLFRCGKSCRLRWANHLRPNLKKGAFTPEEERLIIQLHAKMGNKWARMAGHLPGRTDNEIKNYWNTRIKRCQRASLPIYPASVCNQSTNEDQQLSGNFNGGENISNDLLSGNSLYLPDFTSDNFIANPEALSYAPQLSAVSISNLLGQSFASKSCSFMDQVDQAGMLKQSGCVLPALSDAIDSVLSSADHFSNDSEKLRQALGFDYLNEANASSKSIAPFGVALTGSHAFLNGNFSASRPTNGPLKMELPSLQDTESDPNSWLKYTVAPAMQPTELVDPYLQSPSATPSVKSECASPRNSGLLEELLHEAQALRSGKNQQSSVRSSSSSAGTPYETTTVVSPEFDMGQEYWEEQPSSFLSEYAHFSGNSFTESTPPVSAASPDIFQLSKISPAQSPSMGSGEQALEPKHESAASPRPENLRPDALFSGNTADPSIFNNAIAMLLGNGIDAEYKPVLGDGIVLDSSSWNNMQHAFQMAGFK

SEQ ID NO: 8443 - protein, 390 aa, Zea mays
  unsure (1)..(390): unsure at all Xaa locations
  Clone ID: TF_ZmC1108_2.pep
SEGEGEGEGDCEMMLQEQMDSLVADDVSSGGGSPXKGPWTSAEDAILVDYVKKNGEGNWNAVQKNTGLFRCGKSCRLRWANHLRPNLKKGAFTPEEERLIIQLHAKMGNKWARMAGHLPGRTDNEIKNYWNTRIKRCQRASLPIYPASVCNQSTNEDQQLSGNFNGGENISNDLLSGNSLYLPDFTSDNFIANPEALSYAPQLSAVSISNLLGQSFASKSCSFMDQVDQAGMLKQSGCVLPALSDAIDSVLSSADHFSNDSEKLRQALGFDYLNEANASSKSIAPFGVALTGSHAFLNGNFSASRPTNGPLKMELPSLQDTESDPNSWLKYTVAPAMQPTELVDPYLQSPSATPSVKSECASPRNSGLLEELLHEAQALRSGKNQQYEIS

SEQ ID NO: 8444 - protein, 276 aa, Zea mays
  unsure (1)..(276): unsure at all Xaa locations
  Clone ID: TF_ZmC27160_1.pep
MGRTPCCDSKGIKKGPWAPEEDKLLVDYVQANGPGNWRILPKLAGLNRCGKSCRLRWTNYLRPDIKRGPFTPEEHNSILQLHAVVGNKWSMIAAQMPGRTDNEIKNYWNTHMKKXSCPAARHTAQWETARLEAEARLSLLSSSAATTVTSATASSSSSTVAAEHAAPPDIFLRLWNSEVGDSFRGAAAQQGHGPEASAAGAGVPALLPELGGGGDDSSAASTYEAEAAADDGYQAFLDLAMEEFALLHGRLGAFSAFPQADVFAEAHCCLFAPFEE

SEQ ID NO: 8445 - protein, 436 aa, Zea mays
  Clone ID: TF_ZmC62316_1.pep
MPCLEQIPMATGETAVDRREDHRDMDLSGEEHVRPKARKPYTITKRRERWTEDEHGQFLEALQLHGRAWRRIQVHIGTKTAVQIRSHAQKFFTKVVRESSPGSNASAGAAPAIQIPPPRPKRKPAHPYPRKADGAAKKPAPELKRLEKTSLRDRVRDEGSPTSVLASARTASRAEVSGSLVANSSSASRSPALSDAGSDERGDGGGSLASSVDREDGCASPRTRAPCTKVLCHAHEVSRLGSGAPVVKLFGNKVVVVKVKDLETDTPPASVAEAARNGSPPNGAAGASSWKPWPELTCLVPRRDGFAAQPVVSPPCAVFYYPQASAASAQEHQQASEPLDHRRAQREGSSPTGSSVASSAAAESRHGPVQENASDGYAALRAAIPRPTKRVSSASFGGRGFVPYKRCAAESEAARPVALALAPGEEADGDLTRLCL

SEQ ID NO: 8446 - protein, 369 aa, Zea mays
  Clone ID: TF_ZmC2044_1.pep
MKERQRWRPEEDAVLRAYVRQYGPREWHLVSQRMNVALDRDAKSCLERWKNYLRPGIKKGSLTEEEQRLVIRLQAKHGNKWKKIAAEVPGRTAKRLGKWWEVFKEKQQRELRDSRRPPPEPSPDERGRYEWLLENFAEKLVGERPQQAAAAPSPLLMAAPVLPPWLSSNAGPAVAAAAVAHPPPRPPSPSVTLSLASAAVAPGPPAPAPWMPERAAADAAPYGFPSPPQHGGAAPPGMTVVDGQALAELAECCRELEEGRRAWATHRREAAWRLKRVEQQLEMEREMRRREVWEEFEAKMRTMRLEQAAAAERVERDHREKVAELRRDAQVKEEKMAEQWAAKHARVAKFVEQMGACSRSWSSATDMNC

SEQ ID NO: 8447 - protein, 292 aa, Zea mays
  Clone ID: TF_ZmC152_3.pep
MVSASAPPPQAQSDAAGSGEEVSKKVRKPYTITKSRESWTEQEHDKFLEALQLFDRDWKKIEAFVGSKTVIQIRSHAQKYLLKVQKNGTSEHVPPPRPKRKAAHPYPQKASKNDSSSIHRNSGMNVPVSSWAHSSIPQAVASSMVKEDLGAGTPGSNNFCSSSTEGLPRTWQPGETNDPINQIPSLRRLYLMIFLISSCSAKYLLRFCPSLLFMPDFAGVYSFLGSVFDPSRGTSGHLQKLKEMNPIDVETALLLMRNLSINLTSPDFEDQVLPIRDASTQQSRPEVRTTIL

SEQ ID NO: 8448 - protein, 117 aa, Zea mays
  Clone ID: TF_ZmC152_5.pep
MVSASAPPPQAQSDAAGSGEEVSKKVRKPYTITKSRESWTEQEHDKFLEALQLFDRDWKKIEAFVGSKTVIQIRSHAQKYLLKVQKNGTSEHVPPPRPKRKAAHPYPQKASKNGTLA

SEQ ID NO: 8449 - protein, 265 aa, Zea mays
  Clone ID: TF_ZmC152_7.pep
MVSASAPPPQAQSDAAGSGEEASKKVRKPYTITKSRESWTEQEHDKFLEALQLFDRDWKKIEAFVGSKTVIQIRSHAQKYLLKVQKNGTSEHVPPPRPKRKAAHPYPQKASKNDSSSIHRNSGMNVPVSSWAHSSIPQAVASSMVKEDLGAGTPGSNNFCSSSTEGLPRTWQPGETNDPINQIPSLRLMPDFAGVYSFLGSVFDPSTSGHLQKLKEMNPIDVETALLLMRNLSINLTSPDFEDQVLPIRDASPHQSRPEVRTTIL

SEQ ID NO: 8450 - protein, 261 aa, Zea mays
  Clone ID: TF_ZmC182615_1.pep
MTRRCSHCSNNGHNSRTCPVRSAGGGSGGGGVRLFGVRLTTAPAPAVMKKSASMSCIVSSLGGGFGGSSPPVEGVGAGRGGEDSGTGYVSDDPAHASCSTNGRAERKKGTPWTEEEHRMFLMGLQKLGKGDWRGISRNFVVSRTPTQVASHAQKYFVRQTNSSRRKRRSSLFDMVPEMPMDESPAAVEQFTLQNTQDEDTSSNHVPTLHLGQRKETEFAKQLQTFQPGHHEKSEYAEPSLLLPNLEMNPNVPFKTITDPTR

SEQ ID NO: 8451 - protein, 164 aa, Zea mays
  Clone ID: TF_ZmC8091_3.pep
ASLLLRFQGARRQRQQQRRWRRSLRFSVEFQWFLMALSVRPERRRAMVAHLLPNLACARRMVWRRHNHAAADGGGALIGGRGLLLLGPRLGLAAGALAGGRRIVAGSGQGARGARALALPRQRIHEEGIGTLGGGGGGGVLPPLACHGCRGRGVRRAALDPEGW

SEQ ID NO: 8452 - protein, 310 aa, Zea mays
  Clone ID: TF_ZmC11894_1.pep
MPGDHGSKGDISFAGRFTASAIAACFAEICTIPLDTAKVRLQLQKNVVAAAASGDAAPALPKYRGLLGTAATIAREEGAAALWKGIVPGLHRQCIYGGLRIGLYEPVKSFYVGKDHVGDVPLSKKIAAGFTTGAIAISIANPTDLVKVRLQAEGKLAPGVPRRYTGAMDAYSKIARQEGVAALWTGLGPNVARNAIINAAELASYDQVKQSILKLPGFKDDVVTHLFAGLGAGFFAVCVGSPVDVVKSRMMGDSAYKSTLDCFVKTLKNDGPLAFYKGFLPNFARLGSWNVIMFLTLEQVQKLFVRKATS

SEQ ID NO: 8453 - protein, 277 aa, Zea mays
  Clone ID: TF_ZmC11894_2.pep
MPGDHGSKGDISFAGRFTASAIAACFAEICTIPLDTAKVRRHYELLVEDVDGIESGRVPLPAYAADGAAEEGGGGGKKGSGGGGTHGDKGSAKSAEQERRKGIAWTEDEHRLFLLGLEKYGKGDWRSISRNFVISRTPTQVASHAQKYFIRLNSMNRERRRSSIHDITSVNNGDPSTAQGPITGQTNGQAANPGKPSKQSPQPANTPPGVDAYGTTIGQPVGGPLVSAVGTPVTLPVSAPPHLAYGMRAPVPGAVVPGAPVNIAPMPYPMPPPPSHG

SEQ ID NO: 8454 - protein, 130 aa, Zea mays
  unsure (1)..(130): unsure at all Xaa locations
  Clone ID: TF_LIB5117-068-A1-PF1-E3.pep
MARFQETKPDLLNSGSDTRMMAEARAPKARKPYMITKQREKWTEEEHKLFLEAMQLHGRAWRRIQEHIGTKTAVQIRSHAQKFFSKVTRDSSGDSGGSSSGGAGPPIQIPPPRPKXRKSVHPYPWHQRSA

SEQ ID NO: 8455 - protein, 344 aa, Zea mays
  Clone ID: TF_ZmC8091_2.pep
MASSSPSCRGSGGKSDVDRIKGPWSPEEDEALQRLVARHGARNWSLISRSIPGRSGKSCRLRWCNQLSPQVEHRPFTAEEDDTILRAHARFGNKWATIARLLSGRTDNAIKNHWNSTLKRKYYAASDAVVADADDERPLKRTSSDGHPGLCFSPGSPSGSDLSDSSNHSLPSVMPSAASAAAVTSHQQQQHVYRPVPRAGGVVMLPVAPLVPPPPQPPATSLSLSLSLPGLDGQKPEPSPAVLTPAPAPPQPPLQIQQQQPAPPQMPPPQAQPSLPFQLQAAATNLTSQQPAAAPFSSEFLLLMQEMIRIEVRNYMSGSGLDPRTDGAAVHAVSKRMMGMAKIE

SEQ ID NO: 8456 - protein, 565 aa, Zea mays
  Clone ID: TF_ZmC277_1.pep
MGRSRGVQNSGDDDTVHRSKRRRVASGGDATDSVSAGIGGAGEGGGKKALYHCNYCNKDISGKIRIKCSKCPDFDLCVECFSVGAEVTPHRSNHPYKVMDNLSFPLICPDWNADEEILLLEGIEMYGLGNWLEVAEHVGTKSKLQCIDHYTTAYMNSPCYPLPDMSHVNGKNRKELLAMAKVQGESKKGTSLLPGELTPKAESPFSPSRVKVEDALGEGLAGRSPSHIAVGANKKASNVGHIKDGSNVSKVEDGHVDRSVGVKKPRYSADEGPSLTELSGYNAKRHEFDPEYDNDAEQALAEMEFKETDSETDRELKLRVLRIYLSRLDERKRRKEFILERNLLFPNPLEKDLTNEDREVYHRYKVFMRFLSKEEHEALVRSVIEERKIRRRIQELQECRSAGCRTLAEAKIHIEQKRKKEYELNAQKAKDSSQLNANNKSVQKMNRPMKIESDGNLDPKKGGAGLDSPKTTGPTSVKQWDDWDIVGLPGAELLSASEKLLCCQNRLLPSHYLRMQEVLMQEIFKGSVLKKEDAHVLFKVDPTKVDSVYDMVTKKLGNHVELPTV

SEQ ID NO: 8457 - protein, 162 aa, Zea mays
  Clone ID: TF_ZmC2240_2.pep
MGRQPCCEKIGIKKGPWTAEEDQKLVTFLLSHGHCCWRLVPKLAGLLRCGKSCRLRWTNYLRPDLKRGLLSEEEEALVIDLHAQLGNRWSKIAARLPGRTDNEIKNHWNTHIKKKLKKMGIDPVTHGPLAPATQPLALALAHQRDPPQVVREEERCDDDPSK

SEQ ID NO: 8458 - protein, 159 aa, Zea mays
  unsure (1)..(159): unsure at all Xaa locations
  Clone ID: TF_LIB3732-055-Q1-K6-B2.pep
SGIFRLGWKDRERLSESSCSYCLQPLPSLHYRSQKRXDIFLCSDCFHDAMNITGHSCLDFQRVDGDNDESENDSDKWTDEETLLLLEGIEKYNDNWDDIAGHVGTKSKAQCIYHFIRLPVEDCLLENVEIPNAPIPFRPQSNGYQCLDSNGSTSGGLLH

SEQ ID NO: 8459 - protein, 378 aa, Zea mays
  Clone ID: TF_ZmC13666_1.pep
RVDGDNDESENDSDKWTDEETLLLLEGIEKYNDNWDDIAGHVGTKSKAQCIYHFIRLPVEDCLLENVEIPNAPIPFRPQSNGYQCLDSNGSTSGAPVQNIQQGNELPFINSSNPVMSLVAFLASSIGPRVAASCAHAALSFLTRDEDSRVSSEGSHAGGLGNGANPNFQNHNGASPSISPENVKYAAMLGLSAAAMKSKLFADQEEREVQRLTATVINHQLKRLELKLKQFAEVETLLLKECEQVERVRHRISAERVRMRSALLGPTGSGLPGGSCSTMPSNPAGMSPRPVGVPGYMPQTSMPATYANNLQGHGNPQMPFLHQRPQMLSFGPRLPLSAIQTQPSPQSSNMFNSGMPNSIAPNHHQLLRSSSGNNSSAG

SEQ ID NO: 8460 - protein, 181 aa, Zea mays
  Clone ID: TF_LIB4764-079-R1-K1-H8.pep
MAYYCNACCAGKSCRLRWFNQLDPRISKRPFSDEEEERLMAAHRFYGNKWAMIARLFPGRTDNAVKNHWHVIMARKYREQSTAYRRRKLNQAVQRKLEAASAAVAMPPGAGAGDVAVGQHHHLLAAAAAAHAHDAAYSFAADPYGFGIRHQYCTFPFPPGAASAEDPPPPAFIDFLGVGAT

SEQ ID NO: 8461 - protein, 137 aa, Zea mays
  unsure (1)..(137): unsure at all Xaa locations
  Clone ID: TF_LIB4978-032-A1-K1-C6.pep
MGRHSCCYKQKLRKGLWSPEEDEKLMNHITKHGHGCWSSIPKLAVQLPKFEKTNCXGLQRCGKSCRLRWINYLRPDLKRGAFSQDEEDLIIELHAVLGNRWSQIAAQLPGRTDNEIKNLWNSCIKKKFRQKGIDPHT

SEQ ID NO: 8462 - protein, 188 aa, Zea mays
  Clone ID: TF_ZmC42_20.pep
MMRETYMDVLPPVDHIAASRSGGWFPGAARLWTAAENKQFERALAGLDLCRPDWEKVARAIPGRTVREVVSHFKSLQVDVQQIESGLVPMPVYGAGAGAGSFTLQWDGCYGPADSRHNGYRFGSGGCGMRHHGRTPEQDRKKGVPWTEEEHRLFLLGLKKYGKGDWRNISRNYVHTRTPTQVASHAQK

SEQ ID NO: 8463 - protein, 212 aa, Zea mays
  Clone ID: TF_LIB5117-045-A1-PF1-B2.pep
MAACRGGGGGKDVDRIKGPWSPEEDDALQRLVGRHGARNWSLISKSIPGRSGKSCRLRWCNQLSPQVEHRPFTPDEDDTILRAHARFGNKWATIARLLSGRTDNAIKNHWNSTLKRKYSSSSSASASPADDAMANDDEDRRPLKRTSSDGYPGLCFSPGSPSGSDLSDSSHQSLPFVMPSAASQQPHVYRPVARARRGVPAPDGQPRIRRLP

SEQ ID NO: 8464 - protein, 166 aa, Zea mays
  Clone ID: TF_ZmC659_3.pep
MGRAPCCEKMGLKRGPWTPEEDKILVAHIQSFGHSNWRALPKQAGLLRCGKSCRLRWINYLRPDIKRGNFSKEEEDAIITLHEQLGNRWSAIAARLPGRTDNEIKNVWHTHLKKRLEPTTKQLEQEQHGAHAGGDAARKRSRPKRAGARKDDDGRRRPGHHRAGVA

SEQ ID NO: 8465 - protein, 127 aa, Zea mays
  Clone ID: TF_LIB4974-032-A1-K1-F12.pep
AAAAAGAGGGDEEGPVDRGGRRSAGLRRTGKSCRLRWVNYLHPGLRRGRITADEERLILQLHAQWGSRWSRIARSLPGRTDNEIKNFWRTRARKQKAAAQQHQQDSRSSKTAMGVGVLRVSVVRDYH

SEQ ID NO: 8466 - protein, 277 aa, Zea mays
  Clone ID: TF_ZmC12010_1.pep
MNDRYLHHQSSMVTPAAASKMSKKLQGGGERSSGSSSRGSGNSDKQQVPAAAMRKGPWTEEEDAQLVWFVRLFGERRWDFLAKVSGLRRTGKSCRLRWVNYLHPGLRRGRITADEERLILQLHAQWGSRWSRIARSLPGRTDNEIKNFWRTRARKQKAAAQQQQQQQDSRSSKTATASAFSGSASSVTTTTSSCSGSPNDDHQQQHQECYASDHFWNDIAAAEAAIYMLIDGGWTGSGPGHPAADPPSSPAWEYCSDYSLWRIDDDEYYEKMLDSSS

SEQ ID NO: 8467 - protein, 265 aa, Zea mays
  Clone ID: TF_ZmC39729_1.pep
RCGKSCRLRWLNYLRPELRHGGFTDEEDSLILSLYGEIGSKWSVIASRLPGRTDNDVKNYWNTKLKKRYLASSTSTGEARPPPPPPAPPSASGDDSSAAADSHQAQQDEPSLPLTPPAFSTDLDTTFAVVDDDMLLFKSDQLYAELVGLVEKKSQATAGPSTGGGGDEANSTATPSSSSYGTGTTNSPTVSSSSGSCALWPTDVHGTTLLSEPTSSSLFDDAYGVGDDAFGAAALPAYSFQDLLASSYDDATAAVVTQELMQYYQ

SEQ ID NO: 8468 - protein, 268 aa, Zea mays
  unsure (1)..(268): unsure at all Xaa locations
  Clone ID: TF_ZmC689999_1.pep
LVTXKDIWTEEEDIVLIQAHKSFGSHWSTIAKFLPGWPENAIKNHWNSTKRSLGSKRRLKKKKSQQAPPGQLSVLEEYIRSLESDSSSAAPPAATSRPAIGRPRRAVHTSAVPEMELHLSAPNNQDAPVRHQPRAISQGNPMLPDLNVSYDPEETHYMGYPMYDPAAAPQLQLVSQEPRQATFTWLPFGGPRMALNGEHASGPSSYDVGGSSGNAGYYSEAGPSNVGGSGGDGQADDDTTNNDDLDLASREFFMPSCDEVRLGLARFK

SEQ ID NO: 8469 - protein, 357 aa, Zea mays
  Clone ID: TF_ZmC10631_2.pep
MGRAPCCDKASVKKGPWSPDEDAKLKAYIEEHGTGGNWIALPHKIGLKRCGKSCRLRWLNYLRPNIKHGDFTEEEEHIICSLYISIGSRWSIIAAQLPGRTDNDIKNYWNTKLKKKLLGKRAPSRRARTNQDPCYLAAGAASSSSSSAATATQALSASALERIQLHMRLQGIYGALACNDDSNAAFGSAAAALPQWPKLEALSQANRLLPGSLPADAMATTVSVQPHPQHLVEVDHHQSLAAAALEGEQQLSSAGEGGFFERPKVDFYSPSAEVAAAAAASVEMNSVAPMVVGGYAGAAGFGPQHHHDELYDFLYSKYGSVGGLAHDGGHVPTLPELQCPDGAAAVVGADEKFSAWT

SEQ ID NO: 8470 - protein, 294 aa, Zea mays
  unsure (1)..(294): unsure at all Xaa locations
  Clone ID: TF_ZmC344_1.pep
MGRSPCCEKAHTNRGAWTKEEDERLVAYVRAHGEGCWRSLPRAAGLLRCGKSCRLRWINYLRPDLKRGNFTADEDDLIVKLHSLLGNNQTKQASKLKNVLRLLPCLCXRWSLIAARLPGRTDNEIKNYWNTHIRRKLLGSGIDPVTHRRVAGGAVTTIWFQPDGIEPEHRRRRRRSSSSGGGGHDQDPLVKWLLEEEPATVKAPRCPDLNLDLCISPPCQHEDDGEEEEEELDLIKPAVVKREALQAGHGHGHGLCLGCGLGGQKGAAGCSCSNGHHFLGLRTSVLDFRGLEMK

SEQ ID NO: 8471 - protein, 43 aa, Zea mays
  Clone ID: TF_6165795.pep
LNYLRPNIKHGGFSDEEDMIILSLYISIGSRWSIIAAQLPGRT

SEQ ID NO: 8472 - protein, 599 aa, Zea mays
  Clone ID: TF_ZmC1296_1.pep
GCTTNSLVHLTLRISELLHSLGQDVPGSGGSNWTDHETLLLLEALEIFKGKEWHEIAEHVATKTKEQCMLHFLQMPISEPFLDGDDFNETPQKITKQDSAETGPSDVPDKMDVDGNAEGKESTDEKAYKKADSSSAETRTKLADQNISAKEDTMKLGDDDLVASIVDEPNKSSLVDPAHKKNSANADVSGEHPSNFITNILRSTFEAVDHFLGKEDMGSFAEAGNPVMALAAFLASLVERDDAVSSCCSSLRAISEMSPALQLATEHCFILPDPPSDLKDPASTFSPCAGGESQEGADTTQNVNDTDKNNSEREDSDLALEKESATFTSQKQHLEELSDAKETFIGGPEAEAKSNSTKDSDNPIAKVGSSVASDKMRDGCNANAIPCPATSNHTTEPSSVASQEASPASTKDTAIPEQVERPSSEELLADVSLPQGKVEPKKTEPAPAASSSIQQHGCKQAGNGNTEPKSKENAAADDDPITRLQRAAGTAISAAAVKAKFLVEQEEGYIRQLAALVIEKQFQKMETKMSFLTEVGNLVLRSRDLTERMRKKLLLERSMIIASRMGAAAASRTIQHGAPVTTRLPVGHVHALNPQLRRP

SEQ ID NO: 8473 - protein, 302 aa, Zea mays
  Clone ID: TF_ZmC337_2.pep
MARKCSHCGNYGHNSRTCGLGLGLGHREIMLCEGGDDNNGRSGLRLFGVQVRIGGGGGAGSASMKKSYSMDCLQLAAPHACSSLVSSPSSSSLCSSSSPSSLLLSIDDGLQRGAADGYLSDGPHGRAVQERKKAIPWSEEEHRQFLAGLDKLGKGDWRGIARSYVPTRTPTQVASHAQKFFLRQSSMGKKKRRSSLFDMVPICENSASISDPLDVARHGVASADSERAAVDLMNSTTEGDDGRSRDVVSSASGAGTALRFPAAAAQTEPLHPSSSHGHGRGHHCSPLDLELGMSLPAPSVGT

SEQ ID NO: 8474 - protein, 207 aa, Zea mays
  Clone ID: TF_ZmC39713_1.pep
TAQEDKLLVEYVRHHGEGRWNSVAKLTGLKRSGKSCRLRWVNYLRPDLKRGKITPQEESVILQLHALWGNRWSTIARSLPGRTDNEIKNYWRTHFKKAKPSKNVERARARFLKQRREMQSQLLLLQGQDQHRQEEEQPDHDDDGASEATPGVPLEEEEEQQQQQHEDLRMMLQQDMDDLLFQFCPMASCTSSCPGGGSCAFVVSASA

SEQ ID NO: 8475 - protein, 274 aa, Zea mays
  Clone ID: TF_ZmC1193_1.pep
MGRSPCCEKAHTNKGAWTKEEDERLVAHIRAHGEGCWRSLPKAAGLLRCGKSCRLRWINYLRPDLKRGNFTEEEDELIVKLHSVLGNKWSLIAGRLPGRTDNEIKNYWNTHIRRKLLSRGIDPVTHRPVTEHHASNITISFETEVAAAARDDKKGAVFRLEEEEERNKATMVVGRDRQSQSHSHSHPAGEWGQGKRPLKCPDLNLDLCISPPCQEEEEEMEEAAMRVRPAVKREAGLCFGCSLGLPRTADCKCSSSSFLGLRTAMLDFRSLEMK

SEQ ID NO: 8476 - protein, 228 aa, Zea mays
  unsure (1)..(228): unsure at all Xaa locations
  Clone ID: TF_ZmC91622_1.pep
MDPNFNGVWSASEMDMAKSLIPSQITNKTYTNDMETKHIDFVDDLQAMFPWKEKHQVTNLYVELLVEIMRAQSNNQHVVPSSVLVNDNFGMLSKPMDNMKVIEGYLMDEMEAMRILEEQPNMLNVIHKKKRHGVKFWTTDEHMNFLRGLEAFGRGEWSNISKYFVPTRTPVDISSHAQKYFRRQECTTGKQGFNIDNVSFYGTQPWVQNNPSSCEALTFTGXCLQHLQ

SEQ ID NO: 8477 - protein, 289 aa, Zea mays
  Clone ID: TF_ZmC659_1.pep
MGRAPCCEKMGLKKGPWTPEEDKVLVAHIQSFGHSNWRALPKQAGLLRCGKSCRLRWINYLRPDIKRGNFSKEEEDAIISLHEQLGNRWSAIAARLPGRTDNEIKNVWHTHLKKRLDPTKQEQQQQHGTTPAAGAGKKHRPAAAAKRGGGGARKATADAVVVPATAAPASPERSAASSSVTESSMTEQEQEHGNTGSSPAFPKEESFTTSSSDAEEFQFDDSFWSETLSMPLDSLDDVVPMEPSDDAFGDVDVDVAAASSSSVGADGDLDYWLRVFMESGDAHPELPQI

SEQ ID NO: 8478 - protein, 294 aa, Zea mays
  Clone ID: TF_ZmC659_7.pep
MGRAPCCEKMGLKKGPWTPEEDKVLVAHIQSFGHSNWRALPKQAGLLRCGKSCRLRWINYLRPDIKRGNFSKEEEDAIISLHEQLGNRWSAIAARLPGRTDNEIKNVWHTHLKKRLDPTKQEQQQQHGTTPAAGAGKKHRPAAAAKRGGGGARKATANADAVVVPAPAPATAAPASPERSAASSSVTESSMTEQEQEHGNTGSSPAFPKEESLTTSSSDAEEFQFDDSFWSETLSMPLDSLDDVVPMEPSDDDAFGDVDVAAASSSSVGADGDLDYWLRVFMESGDAHPELPQI

SEQ ID NO: 8479 - protein, 186 aa, Zea mays
  unsure (1)..(186): unsure at all Xaa locations
  Clone ID: TF_LIB4759-123-Q1-K1-E10.pep
MTRRCSHCSHNGHNSRTCPNRGVKIFGVHLTDGSAIRKSASMGNLSLLSAGSTSGGASPADGPDLADGGGGYASDDFVQGSSSASRDRKKGVPWTEEEHRRFLLGLQKLGKGDWRGISRNFVVSRTPTQVASHAQKYXIRQSNMSRRKRRSSLFDMVPDESMDLPPLPGSQEPETXMXXSPPLPPA

SEQ ID NO: 8480 - protein, 216 aa, Zea mays
  unsure (1)..(216): unsure at all Xaa locations
  Clone ID: TF_ZmC19315_1.pep
MGRSPCCEKGHTNKGAWTKEEDERLVAYIRSHGEGCWRSLPSAAGLLRCGKSCRLRWMNYLRPDLKRGNFTDDEDELIIRLHALLGNKXSWSLIAGQLPGRTDNEIKNYWNTHIKRKLLARGIDPHAHHRPQALHHVAAAALVPAPAAKPKPKPAESSDDGGRSSCSCSGSGSSAGEPRCPDLNLDLSVGPPDAPTSPPPPCLCHRAWEACGCQAG

SEQ ID NO: 8481 - protein, 217 aa, Zea mays
  unsure (1)..(217): unsure at all Xaa locations
  Clone ID: TF_ZmC178558_1.pep
SADQLPRPDIKRXNFTPDEXXLIVRLHRELGNRWSAIAAQLPGRTDNEIKNVWHTHIKKRLEDGHGEEKKARKGKPAAKKAADAVGRSSEHGPFLTASPGLSSSGVTFSAAADSAAAVSSSADNAATTSHHPQQVGASKAESSTELDSGLSSAEFPPLDDSFWSSADVVDMGLGATDEELGLACPPPLSSSSTRDEDMEFWLNMLLEAGDMRDLSVL

SEQ ID NO: 8482 - protein, 175 aa, Zea mays
  unsure (1)..(175): unsure at all Xaa locations
  Clone ID: TF_ZmC2063_2.pep
MGRHSCCYKQKLRKGLWSPEEDEKLMNHITKHGHGCWSTVPKLAGTTIKIKIKSCTLCSTFSIVHLHCFLLLLQGLQRCGKSCRLRWINYLRPDLKRGAFSEEEEDLIVELHAVLGNRWSQIATRLPGRTDNEIKNLWNSSIKKKLRQKGIDPHTPQPLLVEVERSXAAPTTSTE

SEQ ID NO: 8483 - protein, 306 aa, Zea mays
  Clone ID: TF_ZmC3487_1.pep
MSSLLCISRRNNKKDSDGDGEYGGEQIIISTGGAAMRKGPWTDEEDEQLVRFVRLFGERRWDFLAKVSGLRRTGKSCRLRWVNYLHPGLRRGRITADEERRIVELHAQWGSRWSRIARSLPGRTDNEIKNFWRTRTRKKALEERRAAAAATSTAAESASSVMTVSSSSECRRPPVSSSSSSSSLRRDEARRSGDETEEASTPTAAPATKHDEEPQPQPQECYDFPMDQLWNEIAAADAAAMSYLVVDACWGGAAVGGHCYYYGAAAASAASPPPPASPPWEYCGSDFSLWRIDDQEYYKKMLDSSS

SEQ ID NO: 8484 - protein, 275 aa, Zea mays
  Clone ID: TF_ZmC344_4.pep
MGRQPCCDKLGVKRGPWTAEEDRKLINFILTNGHCCWRAVPKLAGLLRCGKSCRLRWTNYLRPDLKRGLLTDAEEQVVIDLHAKLGNRWSKIAAKLPGRTDNEIKNHWNTHIKKKLIKMGIDPVTHEPLDRKTTSSGPATTSQSTKSDEATKEQSPQNDDAVIRDVPADGCSPTESSTNTVSTGGSSSSGGGGHDQDPLVKWLLEEEPATGDEAWLNFTGSVDVDEFSSIAAGPELLPWDGATDWLLDYQDFGLGDSSLVDGYMVNNNSSNGAKF

SEQ ID NO: 8485 - protein, 155 aa, Zea mays
  Clone ID: TF_LIB5026-024-B1-XP1-G10.pep
PAGPRLPKNWREDQVDQIGKSCRLRWFNQLDPRINKRPFTEVEEERLLNAHRAHGNKWALIARHLPGRTDNAVKNHWHVVMARRCRDRSRHHARAASSSSPLSMNLSPRETLHVDIGDRVRHKHRRKDYHAGDSADEPLKKDVPFIDFLGVGMSS

SEQ ID NO: 8486 - protein, 134 aa, Zea mays
  Clone ID: TF_ZmC352107_1.pep
RFLPICSCGGSSGGNAFARPEQGRKKRVRPWTEEEHKLFLLGLKKYGKGDWRNISRNFVQTRTPTQVASHAQKYFIRLNKKRSSIRDTTTVNLTDDQPTSPSQSSLITDQFSALALATDVNQNSRANSPSIELA

SEQ ID NO: 8487 - protein, 308 aa, Zea mays
  unsure (1)..(308): unsure at all Xaa locations
  Clone ID: TF_ZmC3476_1.pep
MVRKPIHADDAGAKSTEASKERKGLWSPEEDERLFTHITYHGVSTWSSVAQLAGKIQFLQTDRDSRYRILFQXIDRTAQRGMINLFLNVQCTGLRRSGKSCRLRWLNYLRPDLKKEPISKREEETIISLQQSLGNRWSTIAARMPGRTDNEIKNYWNSRIRKRLNAAASRAAGCDGGDSAAEPSGAVAAGGKEDSANAATAVTAQPTPIPARFPVFGCQLPDGAGGGISSPGSGSGKSPQSSTTASMPQNEGDESEASDGGGGDSDMVHFLSFDDLDYPGDLLIDVPGAMDAWESQLCYANPMMSSLC

SEQ ID NO: 8488 - protein, 111 aa, Zea mays
  unsure (1)..(111): unsure at all Xaa locations
  Clone ID: TF_LIB3245-059-P1-KI-B7.pep
AAGLLXCCKSCRLRGMNYLGGDLKRGNFTDDEDELIIRLHALLGNKFVSRLPSVDETASFFSVSTFIFSTALPDVTRRARRWSLIAGQLPGRTDNEIKNYWNTHIKRKLLA

SEQ ID NO: 8489 - protein, 186 aa, Zea mays
  unsure (1)..(186): unsure at all Xaa locations
  Clone ID: TF_ZmC1193_9.pep
MGRLSCGGGGGGGVQPKLRKGLWSPEEDEKLYNHIIRHGVGCWSTVPKLAGLQRCGKSCRLRWINYLRPDLKRGSFSQHEEELIIRLHKILGNXWSLIASHLPGRTDNEIKNYWNTHIKRKLLARGIDPKTHRPLGAGADAAAPPGVVAHRALLHRAALVELAVKPAPAESSDDGSRSRGTSSGVR

SEQ ID NO: 8490 - protein, 166 aa, Zea mays
  unsure (1)..(166): unsure at all Xaa locations
  Clone ID: TF_ZmC1443_3.pep
MGRHSCCYKQKLRKGLWSPEEDEKLMNHITKHGHGCWSSIPKLAGLQRCGKSCRLRWINYLRPDLKRGAFSQDEEDLIIELHAVLGNXQLPGRTDNEIKNLWNSCIKKKLRQKGIDPNTHKPLTEADRSGAAPTISIERTSGSSEVNPSSAGALGNLSPLLSETAQ

SEQ ID NO: 8491 - protein, 357 aa, Zea mays
  unsure (1)..(357): unsure at all Xaa locations
  Clone ID: TF_ZmC277_2.pep
MGRSRGVLSSGDDDTGHRSKRRRVSSGGDATDSISASIGGAGEGGGKKALYHCNYCNKDISGKIRIKCSKCPDFDLCVECFSVGAEVTPHRSNHPYKVMDNLSFPLICPDWNADEEILLLEGIEMYGLGNWLEVAEHVGTKSKLQCIDHYTSAYMNSPCYPLPDMSHVNGKNRKELLAMAKVQGESKKGTLLLPGELTPKVESQFSPSRVKVEDALGEGPAGRSPSHMAVGANKKASNVGHIKDGATVSKVEEICFLKNVFFCNLSSIKKXNGDSLTLRHDVHVDRSVGVKKPRYSADEGPSLTELSGYNAKRHEFDPEYDNDAEQALAEMEFKETDSETDRELKLRVLRIYLSRLD

SEQ ID NO: 8492 - protein, 110 aa, Zea mays
  Clone ID: TF_ZmC38224_3.pep
MTVVRVDENPAPDGENSPLDDEYVSADDEHVDDEDKETDSIDDYENPSGTPQMKKGPWSPEEDKRVKDYVEVHGAGNWNKVQQNARLNRCGKSCRLRWTNHLRPDLKKEP

SEQ ID NO: 8493 - protein, 158 aa, Zea mays
  unsure (1)..(158): unsure at all Xaa locations
  Clone ID: TF_LIB4827-009-R1-N1-C11.pep
MEGVMTTRSKHRCHEEDQEMTMVELRRGPWTLEEDNLLMNYTACHGEGRWNLLARCSGLKRTGKSCRLRWLNYLKPDIKRGNLAPEEQLLILELHSKWGNRWSRIAQHLPGRTDNEIKNYWRTRVQKQARQLRVDANSAVFRDAVRXYWMPRLLEKTM

SEQ ID NO: 8494 - protein, 276 aa, Zea mays
  Clone ID: TF_ZmC984_2.pep
MPFLHFVLMGLPYRWTRSLDPAIKKQDWSEQEDLKLIRAHQIYGSQWLKMVKHFPGRTNHALKEHWRNRIKGKLNLCLASGLLEQVPDLEGQSEIPKDSQGSADRSGPPPVLRAQPKSKPELPENAGTSGEGTSDSIRPKGPNAHPTEVSEKVLAKSKQRARARRRLDFLSTPVELKLCTAAASCQRPPQKMDQPGPVAENISPSDACQDISQNVPPERADAITPLASSNHHSPTTPDDPFSLEMHEANASDLLDMSYCDGLIIDSRRDPRDGSLM

SEQ ID NO: 8495 - protein, 346 aa, Zea mays
  Clone ID: TF_ZmC300_35.pep
MNLASAVRVFLSYCLLLHRWMGSEQAGGVFDQGGHSVSLTRLDEARAPPRCAVQSSLSSAASLPPKPLLVAAPRETGEYPVILFLHGYLAVNSFYSQLFEHVASHGFIVVGPQLYTISGADTTEEINSAAAVIDWLATGLPSTLPLGVRADLTKVSISGHSRGGKVAFALALGHAKAKLAVPLAAVVAVDPVDGMGVGKQTPPPILTGRHGSLHVGAPTMVIGTGLGELPRGSLLPPCAPRGVSHAAFYDELDGAAPACHLVARDYGHTDMMDDDTPGARGMLTRTICRSGGARAPMRRFVAGATVAFLKKWVAGDAAAMDSITARPDQAPIALSVVEFGDEKAIA

SEQ ID NO: 8496 - protein, 166 aa, Zea mays
  Clone ID: TF_LIB5117-027-A1-PF1-C3.pep
MEGCDRIRGPWSPEEDGALRRLVELHGARNWTAIGRGVPGRSGKSCRLRWCNQLSPGVERRPFTAEEDTVIARAHVRIGNRWAAIARLLRGRTDNAVKNHWNCSLKRRLGDLGADGVTEGDLDERPCKRASVTPESTSGSGSGSGSGSDRSDLSHGAFGLGQVYRP

SEQ ID NO: 8497 - protein, 348 aa, Zea mays
  Clone ID: TF_ZmC79863_1.pep
MAAAAPAAGKGKRKRHLSEDDVCLLQRYNPGTILTALQEVAQHAEGRIIDWRAVVAKSATGITSAREYQMLWRYLAYHHDLNESIEAGDLPLGDDSDLELELEPNPSETKEALSEASALAKALISRSSREQASGHRINLDVPALNTQNEKIVRVPSKQLAQSHRVTNVTCPVSNPKQLSHIVPSPTHLDPNGASKKRKKAKAWSKEEDADLAAGVQKYGEGNWEVILHKCNFDKYRERPNHQLSQRWALKRPGGSTKPASTKHASVGLEERSAALKALSLAVGPMRGSSALRSGAYPQSIQHKSTVFAPKMPELRSAVTPSPAPAVPVPVAMPLRVAAQVQASAHQGH

SEQ ID NO: 8498 - protein, 169 aa, Zea mays
  unsure (1)..(169): unsure at all Xaa locations
  Clone ID: TF_LIB4745-001-R1-K2-F12.pep
MTHNFKEAAGAVHARRQATILSEMEGAMTTRSKHRRDEEDQEMTMVELRRGPWTLEEDNLLMNYIACHGEGRWNLLARCSGLKMTGKSCRLRXLNYLKPDIKRGNLAPEEQLLILELHSKWGNRWSRIAQHLPGRTDNEIKNYWRTRVQKQARQLPVDANSAVFRDAVR

SEQ ID NO: 8499 - protein, 188 aa, Zea mays
  Clone ID: TF_ZmC11894_4.pep
MAVDEASSSGGGEEGCGSWTREQEKAFENAVATMGGEEDGDARWEKLAEAVEGKTPEEVRRHYELLVEDVDGIESGRVPLPAYAADGAAEEGGGGGKKGSGGGGTHGDKGSAKSAEQERRKGIAWTEDEHRLFLLGLEKYGKGDWRSISRNFVISRTPTQVASHAQKYFIRLNSMNRERRRSSIHDIT

SEQ ID NO: 8500 - protein, 185 aa, Zea mays
  Clone ID: TF_ZmC27878_4.pep
MVSMSTTPKPLDSAVVSAAVDGGDEGGGGGGGGKKQAHGAVMAPPPMVVPAAAPAGEEEVRKVRKPYTITKSRESWTEPEHDEFLEVLQLFDRDWKKIEAYVGSKTVIQIRSHAQKYFLKVHNNGTGEHLPPPRTKRKAAHPYPQKASNNVSQAILSQHQPTQREQGSVMPMDTATERNKMRMSW

SEQ ID NO: 8501 - protein, 110 aa, Zea mays
  Clone ID: TF_LIB3594-051-Q1-K7-G7.pep
KKGPWTPEEDLMLVSYVQEHGPGNWRAVPTNTGLMRCSKSCRLRWTNYLRPGIKRGNFTEQEEKLIVHLQALLGNRWAAIASYLPKRTDNDIKNYWNTHLKKKLKNMQGG

SEQ ID NO: 8502 - protein, 241 aa, Zea mays
  unsure (1)..(241): unsure at all Xaa locations
  Clone ID: TF_ZmC1193_4.pep
MGRSPCCEKAHTNKGAWTKEEDERLVAYVRAHGEGCWRSLPKAAGLLRCGKSCRLRWMNYLRPDLKRGNFTDDEDELIIRLHSLLGNKWSLIAGQLPGRTDNEIKNYWNTHIKRKLLARGIDPKTHRPLGAGADAAAPPGVVAHRAXAPRRRSPRRARREAGAGGVIRRRRPEQRQRQQRRRRQRGGAAVPRPQPRPVRGPAMLAAQDAGGHRVDAHVASAAADDDHMTVLPPRSPQRGGL

SEQ ID NO: 8503 - protein, 302 aa, Zea mays
  Clone ID: TF_ZmC1597_1.pep
MGRPPCCDKMGVKKGPWTPEEDLMLVSYVQEHGPGNWRAVPTNTGLMRCSKSCRLRWTNYLRPGIKRGNFTEQEEKLIVHLQALLGNRWAAIASYLPKRTDNDIKNYWNTHLKKKLKNMQGGEGGAGGKRPAVPKGQWERRLQTDIHTARQALRDALSLEPSATPLAKVEPLPTAPGCATYASSADNIARLLEGWLRPGSGKGPEASGSTSTTATTRQRPQCSGEGTASASASHSGGAAANTAAQTPECSTETSKMAGSSVGAGSAPAFSMLERWLLDDGMGHAEVGLMTDVVPLGDPSEFF

SEQ ID NO: 8504 - protein, 361 aa, Zea mays
  Clone ID: TF_ZmC20648_1.pep
MGREAAATRPPKLRRGLWSPEEDEKLYNHIIRYGVGCWSSVPKLAGLERCGKSCRLRWINYLRPDLKRGSFSQQEEDLIVSLHKILGNRWSQIASQLPGRTDNEIKNFWNSCIKKKLRQQGIDPATHKPLNDDDNAAAAAAADNDAAVAPHHHRRHQDDHCGAANIDNNNNNNNNNNNRQLPSADDHCFAMSSDDPLAPHSPTVSFDPLSVTNVPTAMQQGSYGSFRSDNDHLCDYGGGGVDVVSDAATAYSAPYTGGGGGGDSSSNSNGTGTWACSGGEPMPPHVAMFGRDAAQAAAYHQFVDPAKYSPWQQHPAARLHDHNVGGAAAGFPIRSMSRDLPGSCFDLARSALEDEFSVDFL

SEQ ID NO: 8505 - protein, 308 aa, Zea mays
  Clone ID: TF_700203222_FLI.pep
MGCRSCDKPKMNYRKGLWSPEEDQRLRDYILKHGLGCWSAVPAKAGLQRNGKSCRLRWINYLRPGLKRGMFSQEEEDVVIDLQAKLGNKWSQIAMHLPGRTDNEVKNYWNSYLKKRVMQQAQGASSNSSPKSPPELTSMSTTADLSSMSMPMPMSMPMHQRHHVKNNSGGGSTTTSHDQQDDANISGSRAALSAPPPPPLAQQPFEHQAARSFVFSDWAPESYSLSTHWPAATSTSGNVTPSHGSAAAFGDQMSGTYGAGGLPPPHQDHHHSAAPATTGIAGSGYFDLLNMGDIYGGFSSTNNDDLLF

SEQ ID NO: 8506 - protein, 312 aa, Zea mays
  Clone ID: TF_ZmC2012_1.pep
MGCRSCDKPKMNYRKGLWSPEEDQRLRDYILKHGLGCWSAVPAKAGLQRNGKSCRLRWINYLRPGLKRGMFSQEEEDVVIDLQAKLGNKWSQIAMHLPGRTDNEVKNYWNSYLKKRVMQQAQGASSNSSPKSPPELTSMSTTADLSSMSMPMPMPMPMHQRHHVKNNSGGGSTATSHGQQDDANISGSHAALSAPPPPPLAQQPFEHQAARSFVFSDWAPESYSLSTHWPAATSTSGNVTPSHGSTAAAAAAAFGDQMSGTYGAGGLPPQHQDHHHSTAPATGIAGSGYFDLLNMGDIYGGFSSTNNDDLLF

SEQ ID NO: 8507 - protein, 296 aa, Zea mays
  unsure (1)..(296): unsure at all Xaa locations
  Clone ID: TF_ZmC24450_1.pep
MGRAPCCDRTKGLKKGPWTPEEDKLLVDYIQTNGHGSWRLLPKLAGLNRCGKSCRLRWTNYLRPDIKRGPFTSEEQKSIVQLHAIVGNKWSMIAAQLPGRTDNEIKNYWNTHLKKQLRRMGLDEPPPGPAAGCPSARHMAQWETARLEAEARLSLLATAASSSSCGAIAATSASSSSSTVDLKTACARPADIFXAPVELGHRGLLPPQDGRGARGQGEGRGDQAGVAGAAAGSRGRLLGRVQRDGGGGGAGGVPDVPRLRRRRAGAVSRPARRLLAVPAARRARRGVPGHGVQVKT

SEQ ID NO: 8508 - protein, 300 aa, Zea mays
  Clone ID: TF_ZmC27687_1.pep
MQKDIWNDEEDSVLIQAHKEVGNRWAEIAKRLPGRTENSIKNHWNATKRRQFARRRSRASASTSTSKGPPKPGTLLQNYIKGLGIGPVSNRSAAPLPEPTTPPPPPPSSPETPGGARSAKQAGESTTLEVERRSPSCDVLVDSSQCTTILPPTSVHGYDEYSNCSGESHQSCEVLLAPIISCGDDAFSVGMCGGGGGLFDTDDADAFLQAYGVAADDVVDGIGMGYYVFNDGHVDHAATVDAEIDMETMMMMWDDDDDYAAALGLGCAAGPAGVESAVRVKEEMDLQVETMVAATHKCGD

SEQ ID NO: 8509 - protein, 426 aa, Zea mays
  Clone ID: TF_ZmC1443_1.pep
MGRHSCCYKQKLRKGLWSPEEDEKLMNHITKHGHGCWSSVPKLAGLQRCGKSCRLRWINYLRPDLKRGAFAQDEEDLIIELHAVLGNRWSQIAAQLPGRTDNEIKNLWNSCIKKKLRQKGIDPNTHKPLTEADRSGAAPTISTERTSGSSDINPSSAGALGNLSHLLSETAQSSMLMPVYDKNRAETPNLARPKLPPKELFLEQLTAGHESPSTCHSSGQTLYFPFQQPLGYNSESGSSDGANMNSLWFNQSDFNCSTISTVMPPVSPSALSTSMGLNLPPDNPRHGGTGIGSTAVDSFYWDGTNPSSSSSTGSRGSNSMGFEPQSTSTILENSVFPWTDIGQEKDTRAHLVAELKWPDSFAETTTAMQNQSQTLYDDVIKAESQFNIEGICASWFQNQQPQQQLQVAPDMYDKDLQRMQLSFENI

SEQ ID NO: 8510 - protein, 43 aa, Zea mays
  Clone ID: TF_700451947H1.pep
STRNDYPAAKRVKLDSVRVLRQISNNRKCTSSRSSDTEENVKR

SEQ ID NO: 8511 - protein, 37 aa, Zea mays
  unsure (1)..(37): unsure at all Xaa locations
  Clone ID: TF_LIB3066-040-Q1-K1-A5.pep
MSMSFLSMVEAELPPGFRFHPRDDELXCDYLAPKLGA

SEQ ID NO: 8512 - protein, 80 aa, Zea mays
  unsure (1)..(80): unsure at all Xaa locations
  Clone ID: TF_LIB4759-104-A1-K1-B8.pep
RTNRATKSGYWKATGKDRVIHTPCSWPAAAACHHRAVVGMRKTLVFYRGSAPNGVKTSWVMHEFWMENPHTXPKEDWGLL

SEQ ID NO: 8513 - protein, 61 aa, Zea mays
  Clone ID: TF_ZmC313604_2.pep
VSGFRFHPTDEELVRFYLKRKIHQKSLPIELIRQLDIYKYDPWDLPSKLLCTSSPCTMFFS

SEQ ID NO: 8514 - protein, 103 aa, Zea mays
  Clone ID: TF_LIB3591-121-Q1-K6-E2.pep
MAAEGAPVLVRHAGGVEELRQLPPGFRFRPTDEELVVQYLRRKALGAPLPAAVIPVVRDLYSLDPWDAVDVPAAPGTYTIDDGASNHQQHPSVLSVLSSRRKN

SEQ ID NO: 8515 - protein, 69 aa, Zea mays
  unsure (1)..(69): unsure at all Xaa locations
  Clone ID: TF_LIB4977-051-Q1-K1-F2.pep
MMAIKSLSMVEASLPPGFRFHPRDDELVLDYRAKKLGGGGGPCGGEHXGCPTMVDVDLNECEPWDLPGM

SEQ ID NO: 8516 - protein, 126 aa, Zea mays
  Clone ID: TF_ZmC9425_1.pep
AASGRWKPSGKEKPVVLPRPCGGGSLLVGVKRAMTFVPRRRKKTAALPSSAALKTGWVMHEYRLAAPLHKNGCSLAQAQGEWVVCRVFQKGGNRPRRRQREASPPPSASSSCVTDASSSDLDEVSS

SEQ ID NO: 8517 - protein, 148 aa, Zea mays
  Clone ID: TF_LIB4738-128-A1-K1-E7.pep
MEARPGAWRLQQRGPGAPVAGLPIGFRFRPTDEELLLHYLRRKALACPLPAGVIPDADLARLDPSDLLLPAAAPPAGGAADDASGERFFFHRLGDRQEEEEEEEEEQHAAVESASSTSSCVTDASGTIGQDDDGDEGISGSCSVASSN

SEQ ID NO: 8518 - protein, 58 aa, Zea mays
  Clone ID: TF_LIB3062-027-Q1-K1-G5.pep
WPGRRPWRWSRDLPGFRFHPTEEELLGFYLSRVVHGKQLHFDIIGSLNIYRCLPRRTW

SEQ ID NO: 8519 - protein, 112 aa, Zea mays
  unsure (1)..(112): unsure at all Xaa locations
  Clone ID: TF_LIB4739-062-Q2-K1-D10.pep
WPNSRPDSVCTPTDEELMVHYLLMKALSMPCPVPIVPEANIYRCNPXHLPAQGVDYEKRVGYLSPPRSAXYPNMVRLNPTTGSWYWNVTSTHRSCSTCAWPLNTAAPRYCDW

SEQ ID NO: 8520 - protein, 135 aa, Zea mays
  Clone ID: TF_LIB5116-016-A1-PF1-E4.pep
MVVDPVLKGFDLNIAAVDESSPLEGIGLGLYATEFIHKYLRFNPTDQELMEWLEAKVRDGGARSDPLIDKFIPTIEVEYGYPHPQQLPGVTMDGTIKHFFCRPRAFESGRRKHRKIKAERNDRTAWHKTGKSMAL

SEQ ID NO: 8521 - protein, 102 aa, Zea mays
  Clone ID: TF_ZmC151_4.pep
KLKCFKEITSCPGREKLECRNQQRRAEESSFQKCEHRMQQVKTSAGCSASREQGNPTSRQVFGREYCETDRTKRDVGQVTERDERKLLLARLKGSRRPSKRF

SEQ ID NO: 8522 - protein, 76 aa, Zea mays
  unsure (1)..(76): unsure at all Xaa locations
  Clone ID: TF_jC-zmX019Bb09b1.pep
APLVVKTDWFMHEYRLADTGRRTKKGSLMLEXWELCLLHNKKNECEKMRFEKGADGGAAKEEEAMDMCTCHSQITH

SEQ ID NO: 8523 - protein, 37 aa, Zea mays
  Clone ID: TF_700240279H1.pep
AELNLPPGIWFYPTVDELVVHYLCALACGLCLPVSII

SEQ ID NO: 8524 - protein, 108 aa, Zea mays
  Clone ID: TF_LIB5026-014-A1-XP1-D11.pep
MSLISMMEARLPPGFRFHPRDDELVLDYLCRKLSGKGGGGGGGGAYGGIAMVDVDLNKCEPWDLPGIPSGSTLRYRVSICCRFYVAHAACTLAPINNKSPAASTGRRN

SEQ ID NO: 8525 - protein, 120 aa, Zea mays
  Clone ID: TF_LIB3245-008-P2-N1-F12.pep
MTSHARVRKLGIRLELTSRGSSRPTLVLQSTVRTKPQRIKDSMVMAPVAAQQQRRRDAVAELNLSPGLRFHPTDEELVAHYLCARASGQSPSVSMIAEVDLYRFDLWDLSERALFGRREW

SEQ ID NO: 8526 - protein, 72 aa, Zea mays
  Clone ID: TF_LIB3245-421-P1-N1-G12.pep
MVAMAAVQKQQQQRRDAEAELNLPPGFRFHPTDEELVAHYLCARAAERRPPVSIIAEVDLYRFDPCDLPERA

SEQ ID NO: 8527 - protein, 72 aa, Zea mays
  Clone ID: TF_LIB3060-022-Q1-K1-C4.pep
LSIQSVSPRSSILYCLHRFHLRSIPFHASKLHQGHDDGSYDDYDLSISACVDVAAADGVPVPPDRRGAHPAL

SEQ ID NO: 8528 - protein, 116 aa, Zea mays
  Clone ID: TF_ZmC9425_2.pep
TREKPVVLPRPCGGGSLLVGVKRAMTFVPRRRKKTAALPSAALKTGWVMHEYRLAAPLHKNGCSLAQAQGEWVVCRVFQKGGNRPRRRQREASPPPSASSSCVTDASSSDLDEVSS

SEQ ID NO: 8529 - protein, 222 aa, Zea mays
  unsure (1)..(222): unsure at all Xaa locations
  Clone ID: TF_LIB4743-073-R1-K1-G1.pep
RPGDSSAPTASWLLRPSRPIALPYYSLPTTLPLTLPPPSAATPSLDSSAGPNTALDLFAVPPPGSSSPHGGAVLVVTRGAGRARSAVRAPGLRRGEPIPSSASTCRFCSPGAGALVGVRCFCWAFICSTRPWRSGCDCAACAVVRPRWWWIRLGHCKMEVLRDMHLPPGFGFHPSDIXLVSHYLKRKILGQKIENDLIPXVDIYKHEPWDLPCRXNLPIKDN

SEQ ID NO: 8530 - protein, 121 aa, Zea mays
  unsure (1)..(121): unsure at all Xaa locations
  Clone ID: TF_jC-zmX700222002b1.pep
VLVLYYLRNREGGNTIYLDVVKDVALDKIEPWDLQMKCTIGTVDQNEWLFLGHLGEKYLMDTLTNRATTDXFWKANVRDKPIYTKRCLDSMSKTLVFYKGRAPNVPESDWIMHEIHLKTTD

SEQ ID NO: 8531 - protein, 69 aa, Zea mays
  Clone ID: TF_LIB4738-071-R1-K1-H12.pep
MGLRDIELTLPPGFRFYPSDEELVCHYLHGKVANEQLAGAGAAMVEVDLHAHEPWELPGTCTRTRCLDS

SEQ ID NO: 8532 - protein, 187 aa, Zea mays
  unsure (1)..(187): unsure at all Xaa locations
  Clone ID: TF_LIB4980-065-R1-K1-E6.pep
SGRARNRTGRGSQCVGAVPPLPPRPAFLAASTGRGRSPRATMARSWLITCRGIAKKIRYTNPGANHHISELVAEARRECPNCSYIIDNSDVAMQWPGLPAGVKFDPSELELLEHLEQKVGLGDSRPHVLIDEFIPTIDNDEGICYSHPEXLPGMKTDGSNAHFXHRVXXAYGCGQXKRRRTHHCSDH

SEQ ID NO: 8533 - protein, 48 aa, Zea mays
  Clone ID: TF_9743024.pep
GIPEVDLYKCEPWELAEKSFLPGRDSEWYFFGPRDRKYPNGCRTNRAT

SEQ ID NO: 8534 - protein, 61 aa, Zea mays
  Clone ID: TF_LIB3117-005-Q1-K1-A2.pep
TRSPTRGWDLPKFAKMGDKDWYGVYHKDRKCPTVLMANRATDAGYWKATAKDNDVYNPFAA

SEQ ID NO: 8535 - protein, 76 aa, Zea mays
  Clone ID: TF_LIB3206-117-P1-K1-E11.pep
LLRPRSNTINNIASYAYPELNLPPVLPFHPTDDDLVAHYLYARSMSRHPPVSIIVEVYLYRFDPCDLPKRSLFGLR

SEQ ID NO: 8536 - protein, 498 aa, Zea mays
  unsure (1)..(498): unsure at all Xaa locations
  Clone ID: TF_ZmC9370_13.pep
MTKSLFTTPSVAFGLASFTATVSEIRLGTSRSCISYSKNTPDPKSSTNAKSSLRGNPKTLCSPAEVQIVPPPPPPPHPQQQIXPPPHHPQAPKQEDFVDQPYRGVIHMITGGSSVDFDMKRQKRDHYHNINHVAVTGPVVQTKWSHVPLTFDARDVDLRSAPHIDAMVTNCSVAGWDLHKVLVNNGSQADIIFLHAFDRMGISHSLLKPSDNPYGFGGKGTFPVGKIELPLSFGVAPNARSEQVTFNIVDMVYPYNAIMGRGSINKFEAAIHGLYLCMKIPGPQGTIIVYGNQQAARNIERDFVPGQRNVHCLMAQCEVPESASPTAKEHDKAQLQSNDGTKTVPLDQATPKQTVTISEDLTSHDEERLLCCLSKNKGVFAWSTLDLVGVSRSIIEHSLGIDPSVRPKKQRLRKMSDEKTEAAKAEVHRLLEAKFIEPVANPTWLANVVMVQKKSDKWRMCIDFTSLNKACPKDNFPLPRIDKIVDSAXAGCEAMSLL

SEQ ID NO: 8537 - protein, 97 aa, Zea mays
  unsure (1)..(97): unsure at all Xaa locations
  Clone ID: TF_LIB4765-026-R1-K1-C2.pep
IGYSSGRDYYQWARIGTLLRCGRPEVLQWSRSRTGPWELPPGFRFHPTDEELITHYTXRQXRRRRFAXFAVAEXDLNKCEPWDCHAGEMGREEXTSS

SEQ ID NO: 8538 - protein, 326 aa, Zea mays
  Clone ID: TF_ZmC198_13.pep
MAEQLDLPGFRFHPTEEELLEFYLKQVAHGRKLKFDIIPTVHLYRHDPWELPGLARIGEREWYFFVPRDGGRPAKQHHHQSSGARPSRTTERGFWKATGSDRAVRCAHDPKRLIGLKKTLVYYEGRAPRGTKTDWVMNEYRLPDACNNNSNNNNAVPGDSSAAAASSTTTTNNSPKEDIVLCKVYRKAVSLKELEQRVAMEELARATPSASHNAGSPADSMSSSDQDQQTQLVGQGVEIMMTMPVGGISPPPPLPPPVMMSMKQEEEVAEPEAPLPAVLMRPSTLSLPQLEVAKQQQEWMQDPFLTQLRSPWMESWSPYYPSVLNF

SEQ ID NO: 8539 - protein, 322 aa, Zea mays
  Clone ID: TF_ZmC1378_1.pep
MVELEPSVKSEHGGGVGLVLPPGFRFHPTDEEVITSYLLHKFLNPSFAPHAIGEVDLNKCEPWDLPSKAKMGENSKEWYFFCHKDMKYPTGTRANRATKEGYWKATGKDREIFKPAAGRDRDRELVGMRKTLVFYMGRAPRGTKTNWVMHEFRLEGKSRHTCNDLRFNPKDEWVVCKVHHKGAEEASAAKKSAGGGGEEHYYSTATPNVSSVEGGDEFLVDSLLDYSSYFNCFATGGLPLPSTTANSAAAPATNDDDSSWSMLRHAPADQQAMVGSYSLHHQAMKAKTVGGVTSPSFSAGLPSSPVADYVGNDASGYHTNNY

SEQ ID NO: 8540 - protein, 206 aa, Zea mays
  unsure (1)..(206): unsure at all Xaa locations
  Clone ID: TF_LIB5117-019-A1-PF1-A12.pep
MGMPAVRRRERDAEAELNLPPGFRFHPTDDELVEHYLCRKAAGQRLPVPIIAEVDLYRFDPWALPDRALFGTREWYIFTPRDRKYPNGSRPNRAAGNGYWKATGADKPVAPRGGRTMGIKKALVFYAGKAPKGVKTDWIMHEYRLADAGRAAASKKGSLRLDDWVLCRLYNKKNEXEKMQLQQQGGEEMMAEPKRRTRDRHGGHLA

SEQ ID NO: 8541 - protein, 198 aa, Zea mays
  Clone ID: TF_LIB5116-031-A1-PF1-F10.pep
MHPSGGALSVPPGFRFHPTDEELLYYYLRKKVAYEAIDLDVIREIDLNKLEPWDLKDRCRIGTGPQNEWYFFSHKDKKYPTGTRTNRATTAGFWKATGRDKAIFLGSGSRRIGMRKTLVFYVGRAPHGKKTDWIMHEYRLDEDNVEVQEDGWVVCRVFTKKSYTRGVNPAEMAGYDDDELLHPFPVPSSTAGAMHMIT

SEQ ID NO: 8542 - protein, 152 aa, Zea mays
  Clone ID: TF_LIB3591-121-Q1-N6-E2.pep
MRAAKARDTSAVRPAGGVGSARRATASGRWRPAGKEKPVALPRPCGGGSLLVGVKRAMAFVPRRKKKKAAAAAALAIGWVMHEYRLAAPLHKHGCSLAQAQGEWVVCRVFQKGSGRPRRRRQRPVSPSPSSASSCVTDGSSSSSSDMDEVSS

SEQ ID NO: 8543 - protein, 44 aa, Zea mays
  Clone ID: TF_700239811H1.pep
MVAIAAVQQQQQQQRRDAEAELNLPPGFRFDATDDELVAHYLCA

SEQ ID NO: 8544 - protein, 61 aa, Zea mays
  unsure (1)..(61): unsure at all Xaa locations
  Clone ID: TF_LIB3182-016-P2-M1-F1.pep
MNDSACSGARLTPEVRFQPTDFXICTLYLTNKVLNTRLTWTDITEADLNKIAPWNLPSNAK

SEQ ID NO: 8545 - protein, 295 aa, Zea mays
  unsure (1)..(295): unsure at all Xaa locations
  Clone ID: TF_ZmC27_16.pep
MSGAGPDLQLPPGFRFHPTDEELVMHYLCRRCAGLPIAVPIIAEIDLYKFDPWQLPRMALYGEKEWYFFSPRDRKYPNGSRPNRAAGAGYWKATGADKPVGTPKPLAIKKALVFYAGKAPKGEKTNWIMHEYRLXDVDRSARKKNSLRLDDWVLCRIYNKKGGGLEKAAAPAAGGDHKPVFATAAVSSPPEQKPFVAAAGGLPPAFPELAAYYDRPSDSMPRLHADYSSCSEQVLSPEQLACDREVQSQPKISEWERTFASDPVNPAGSMLDPVVGHAGGDPLLQDILMYWGKPF

SEQ ID NO: 8546 - protein, 363 aa, Zea mays
  unsure (1)..(363): unsure at all Xaa locations
  Clone ID: TF_ZmC1509_1.pep
MEQEPHRPMELPPGFRFHPTDEELITHYLARKAADARFAALAVAEADLNKCEPWDLPSLARMGEKEWYFFCLKDRKYPTGLRTNRATEAGYWKATGKDRDVFRGKALVGSKKTLVFYTGRAPRGEKSGWVMHEYRLHAKLHGHGHGQGAAVVVVPKAAGSKNEWVLCRVFKKSLVVGGAAAAAAPTAGKRGGTETSSNSKTGDVAAIAHLPPLMDVSGSGSGAGPPXAAAHVTCFSDALEGQFLDQTTTTPPPEAATAATDDDGHLGALGASSSPFQLPGFAHYYYGGGPPHLHQHHGAASLVQLLEGSVPPCNKGGERERERLSASQDTGLTSDVNPEISSSSGQRFDHDHDHDHHLCCWGY

SEQ ID NO: 8547 - protein, 194 aa, Zea mays
  Clone ID: TF_ZmC8549_1.pep
MSMSFLSMVEAELPPGFRFHPRDDELICDYLAPKLGAKPGFSGCRPPMVDVDLNKVEPWDLPVAASVGPREWYFFSLKDRKYATGQRTNRATVSGYWKATGKDRPVVAARRGALVGMRKTLVFYQGRAPKGRKTEWVMHEYRMEPAAPLLDHQPSSSNSKQDEDWVLCRVICKKKLAAGGRAGGGSSRSLVASN

SEQ ID NO: 8548 - protein, 295 aa, Zea mays
  Clone ID: TF_ZmC27_23.pep
MSGAGPDLQLPPGFRFHPTDEELVMHYLCRRCAGLPIAVPIIAEIDLYKFDPWQLPRMALYGEKEWYFFSPRDRKYPNGSRPNRAAGAGYWKATGADKPVGTPKPLAIKKALVFYAGKAPKGEKTNWIVHEYRLADVDRSARKKNSLRLDDWVLCRIYNKKGGGLEKAAAPAAGGDHKPVFATAAVSSPPEQKPFVAAAGGLPPAFPELAAYYDRPSDSMPRLHADYSSCSEQVLSPEQLACDREVQSQPKISEWERTFASDPVNPAGSMLDPVVGHAGGDPLLQDILMYWGKPF

SEQ ID NO: 8549 - protein, 242 aa, Zea mays
  Clone ID: TF_ZmC604294_1.pep
MTQAAGRRRSMGGASGGDHPQQHGGGDDGHLQQGGGGDMVMPGFRFHPTEEELIDFYLRRRVEGKRFNIELINLVDLYRYDPWDLPALASIGDKEWYFYVPRDRKYRNGDRPNRVTPSGYWKATGADRTVYVEVKRPIGLKKTLVFYVGKAPKGLRSSWIMNEYRLPSGEADRYQKEISLCKVYKRPGIEDNFHLSTTTARSSGSKAAATMEKKHHRTSASPRMAPVFDGGHSSGYMNKPYT

SEQ ID NO: 8550 - protein, 211 aa, Zea mays
  Clone ID: TF_ZmC156397_1.pep
MSRDLEDGHGAVGNVIAAAAAAGGEAVGAGEAGDAHDNDVVMPGFRFHPTEEELIEFYLRRKVEGKRFNVELIAFLDLYRFDPWELPAMAVMGGKEWFFYVPRDRKYRNGDRPNRVTASGYWKATGADRMIRGENNRPIGLKKTLVFYSGKAPKGVRSSWIMNEYRLPPPPTDADPLIPKSEISLCRVYKRSGIDDGHGQSSSSTQASSAR

SEQ ID NO: 8551 - protein, 308 aa, Zea mays
  Clone ID: TF_ZmC1381_1.pep
MAMVASQGGGRRDAEAELNLPPGFRFHPTDEELVVHYLCRKVACQQLPVPIIAEVDLYKFDPWDLPEKALFGRKEWYFFTPRDRKYPNGSRPNRAAGRGYWKATGADKPIAPKGGGGAAGIKKALVFYSGKAPRGFKTDWIMHEYRLADADRAPGKKGSRKLDEWVLCRLYNKKNNWEKVKAEEPEAAAPLRNQQGAAEDSMSDSFQTHDSDIDNNAFGVQNGFGNMVHGQAMTMRNGIGSVARTVKEDSYWFTDLNLDDLQAPYNVTHVLNPNPVQTMNLAAGQGHGYLQSMSSPSTKMWQTILPPF

SEQ ID NO: 8552 - protein, 216 aa, Zea mays
  Clone ID: TF_ZmC5878_3.pep
MSDVTAVMDLEEEEPRLSLPPGFRFHPTDEEVVTHYLTPKAVNNAFSCLVIADVDLNKTEPWDLPGKAKMGEKEWYFFVHKDRKYPTGTRTNRATEKGYWKATGKDKEIFRGKGRDAVLVGMKKTLVFYTGRAPRGDKTPYVMHEYRLEGQLPHRLPRSAKNDWAVCRVFDKDLAAKNAPPQTAPAGRSWRTRTPFFDVDDFLTTPTCSTRRPADA

SEQ ID NO: 8553 - protein, 81 aa, Zea mays
  unsure (1)..(81): unsure at all Xaa locations
  Clone ID: TF_LIB3245-118-P1-K1-E12.pep
MIMIVATHKLLQQPHRHAEAELNLAPGFRFHPTDEELVAHYLCXRAEMRRPPVSIIADVDLYRFDPWDLSERALFGRREWY

SEQ ID NO: 8554 - protein, 211 aa, Zea mays
  Clone ID: TF_LIB4741-095-Q1-K1-A5.pep
MSLSPLDSSSPPAAAAAAATEVPLAPGFRFHPTDEELVSYYLRRRVLGRRLRVGMKKTLVFHAGRAPKGERTNWVMHEYRLLDADGPQDLHVVCRIFQKHGSGPQNGAQYGAPYMEEEWEEDDDAIENGSTHDASGQIAATTCAVDEESNEDDENAYCETNRPARVEPSHLPSVHEMLNPPEMAPLQGQDSKETSDGSWSDVAISLEEILQ

SEQ ID NO: 8555 - protein, 228 aa, Zea mays
  Clone ID: TF_LIB4974-041-A1-K1-E7.pep
SRPAGPGCPNLPPGFHFFPSDEDLVVHFLRRKAANLPCRPDIVPTILLHRYDPWELNGTALQAGNQWYFFSSHAHAHAHSAAGQTRTSPSGYWNPAGADETVVLASSSRVVGLKKTLVFCTGEPFRGFRTNWVMHEYHLQDGPAGCNVGGSSGATTPSSSSSSGSSRRSQRKRVHSSTESINSWVICRVFESSCGSQVSFHDEGTELSCLDEVFLSLDDYDEVSLPNN

SEQ ID NO: 8556 - protein, 347 aa, Zea mays
  unsure (1)..(347): unsure at all Xaa locations
  Clone ID: TF_ZmC1424_1.pep
MGAMTLPPGFRFHPTDDELVGYYLKRKVDNLKIDLEVIPVVHLYKSEPWELPEKSLLPRRDLEWFFFCPRDRKYPNGSRTNRATSTGYWKATGKDRRIACDGGVYGLRKTLVFYRGRAPGGERTAWVMHEYRLCQDLAHGTCNFIGAYALCRVIKRHEGGLPQGESYAKGAAGSARSGQMSKVSSSSSLVSNDQLSASFTPPPTLDVGTMAGSGNAFQSPVGYGYGVTTTATATATTAGLPSSALATPLLIVPSPHDTFXSAATATSSPPRPSRARSHAHLFDTVGMGMGGVSEQELKWDSFACPSTFSSGADMAAASPATLCRQASDGFDDLLAAFFFSDDNRIVF

SEQ ID NO: 8557 - protein, 247 aa, Zea mays
  Clone ID: TF_LIB5116-010-A1-PF1-D6.pep
MADFSSSNGVPPGFRFHPTDEELLLYYLKKKIGFEKFDLEVIREVDLNKIEPWDLQERCRIGSAPQNEWYFFSHKDRKYPTGSRTNRATTAGFWKATGRDKCIRTSYRKIGMRKTLVFYRGRAPHGQKSDWIMHEYRLEEIDEAQGGTSEDGWVVCRVFKKKCFFKIAGGGEGSSSQSADAGAGHMAVSSPLGGHDHADRAAMASHYMHGMHPQYHPQHASSFYYSQMQPPEAYSHHVQVQDLLTTT

SEQ ID NO: 8558 - protein, 128 aa, Zea mays
  Clone ID: TF_LIB3245-339-Q1-K1-C4.pep
KAKMGEKEWYFFCHKDRKYPTGMRTNRATASGYWKATGKDKEIFRGSSPRRVLVGMKKTLVFYTGRAPRGGKTPWVMHEYRLEGSLPPNLHRGAKVRSPGLLSSILLFFKKKKSRDRRMDGAPHGGCF

SEQ ID NO: 8559 - protein, 294 aa, Zea mays
  Clone ID: TF_ZmC12224_3.pep
MALREIESTLPPGFRFYPSDEELVCHYLHKKVANERIAQGTLVEVDLHAREPWELPEVAKLTATEWYFFSFRDRKYATGSRTNRATRTGYWKATGKDREVRSSSSATAAVVGMRKTLVFYRGRAPNGVKSGWVMHEFRLDTPHSPPREDWVLCRVFQKTKAADGDGDGGAQDGDSSSPPAAFTGPSRPRAVSEPPDHSAPPAGGGYYYGLAFGPRQVEVAQQQCYGGGGATVADHHHGFTRDSGGAAGFGATWGRGVAGGECGAGYLDMDGAFDVMMAGCFGGGDMDEFPQVWR

SEQ ID NO: 8560 - protein, 44 aa, Zea mays
  Clone ID: TF_LIB3076-012-Q1-K1-F12.pep
MVTGKDRLIRSRPACTLICVKKTLVLHRCRAPLGHRILWIMHEY

SEQ ID NO: 8561 - protein, 152 aa, Zea mays
  unsure (1)..(152): unsure at all Xaa locations
  Clone ID: TF_ZmC3782_2.pep
ASTVRPRDLPARRXYGDGEYYFFSPRDRKYPNGIRPNRAAGSGYWKATGTDKPIHDAATGEGVGVKKALVFYKGRPPRGSKTNWIMHEYRLAAVAGSTSPLAAYRPPSKFRNASMRVSRSTSIIPESYPLHDLYICSSHYLSYPWCHVELSW

SEQ ID NO: 8562 - protein, 399 aa, Zea mays
  Clone ID: TF_ZmC21867_1.pep
MARSWLITCRGIAKKIRYTNPGANHHISELVAEARRECPNCSYIIDNSDVAMQWPGLPAGVKFDPSELELLEHLEQKVGLGDSRPHVLIDEFIPTIDNDEGICYSHPENLPGMKTDGSNAHFFHRVSKAYGCGQRKRRRTINCSDHTVSDEHVRWHKTGRSKAIYENGVIKGWKKIMVLYKISQRGRKPDRAKWVMHQYHLGKEEDEKDGELVVSKIFFQLANKSMEISETETACEEPDAPASVIGPKTPKTITPQPRHPKSSPCETEQNIFIVQDQLLLDGEDEPTMPIVSLADDAMNPAWCAVAEEEQVVGEASRAQSNSDEPLLCREDPNSLNDEALLPWDYPILSQCRSEIFDRNLNGYGLPDLHNVDLGTPPDLQLADFQFGSQESLGSWLDRI

SEQ ID NO: 8563 - protein, 359 aa, Zea mays
  Clone ID: TF_ZmC27_12.pep
MDCGGALQLPPGFRFHPTDDELVMYYLLRKCGGLPLAAPVIAEVDLYKFDPWQLPEKAFGGEKEWYFFSPRDRKYPNGSRPNRAAGTGYWKATGADKPVGSPRPVAIKKALVFYAGKPPKGVKTNWIMHEYRLADVDRSAAARKKTNNALRLDDWVLCRIYNKKGVIERYDTVDDDDGDGAVAEDVKPVPAPAASKNPRASARVGAAAAAPMKVELPEYGGGYYDYDDLETPSAGMLCFDRPSAPAPADRDSNNSVPWTTHHTHTDNSSSGSERVLSPSPDLPDRDHAESQPAAAAAAAGWWPVGGDWGSAAEDGFMVDVDVDDGSSLFGPLSPGLFARVDAAAFGFGDMLASYLHKPF

SEQ ID NO: 8564 - protein, 368 aa, Zea mays
  unsure (1)..(368): unsure at all Xaa locations
  Clone ID: TF_ZmC27_20.pep
MDCGGALQLPPGFRFHPTDDELVMYYLLRKCGGLPLAAPVIAEVDLYKFDPWQLPEKAFGGEKEWYFFSPRDRKYPNGSRPNRAAGTGYWKATGADKPVGSPRPVAIKKALVFYAGKPPKGVKTNWIMHEYRLADVDRSAAARKKTNNALRPLPNTPMRXLDDWVLCRIYNKKGVIERYDTVNDDDGDGAVAEDVKPVPAPAASKNPRASARVGAAAAAPMKVELPEYGGGYYDYDDLETPSAGMLCFDRPSAPAPADRDSNNSVPWTTHHTHTDNSSSGSERVLSPSPDLPDRDHAESQPAAAAAAAGWWPVGGDWGSAAEDGFMVDVDVDDGSSLFGPLSPGLFARVDAAAFGFGDMLASYLHKPF

SEQ ID NO: 8565 - protein, 170 aa, Zea mays
  Clone ID: TF_ZmC27_7.pep
MDCGGALQLPPGFRFHPTDDELVMYYLLRKCGGLPLAAPVIAEVDLYKFDPWQLPEKAFGGEKEWYFFSPRDRKYPNGSRPNRAAGTGYWKATGADKPVGSPRPVAIKKALVFYAGKPPKGVKTNWIMHEYRLADVDRSAAARKKTNNALRVIHYTMTFLRRTYLSPPKY

SEQ ID NO: 8566 - protein, 223 aa, Zea mays
  Clone ID: TF_ZmC16461_2.pep
MTHPSSSSSSAPAAAPDDPTSLAPGFRFHPTDEELVSYYLKRKVLGRPLKVDAIAEVDLYKVEPWDLPARSRLRSRDSQWYFFSRLDRKHANRARTNRATAGGYWKTTGKDREVRHGARVVGMKKTLVFHAGRAPKGERTNWVMHEYRLEGDGAAGIPQDSFVVCRIFQKAGPGPQNGAQYGAPFVEEEWEADEDDDFGPMPVQRDVFGEHEAPGAMEKDIFR

SEQ ID NO: 8567 - protein, 304 aa, Zea mays
  Clone ID: TF_ZmC545_9.pep
MGQPVTRRRERDEEAELDLPPGFRFHPTDDELVEHYLCRKAAGQRLPVPIIAEVDLYRFDPWDLPERALFGAREWYFFTPRDRKYPNGSRPNRAAGDGYWKATGADKPVAPRAAAADARTLGIKKALVFYAGKAPRGVKTDWIMHEYRLADPGGRAKKGSLRLDDWVLCRLYNKKNEWEKMRLGKGAAAGVIGAAKEEEAMDVSISHSQTHSWGETRTPESEIVDNDPPPPAMMVPKKKRVDDGGSARTSDLFVDLSYDDIQGMYSGLDMLPPAGEDFYSSLFASPRVRGNQPTGAAGSWAPSE

SEQ ID NO: 8568 - protein, 230 aa, Zea mays
  Clone ID: TF_ZmC328_2.pep
KYPNGSRPNRTAGKGYWKATGADKSIVPMGSTRAAGIKKALVFYSGKASRGVKTDWIMHEYRVAQADHTLGKKGSHKLDEWVLCRLYNKRNNWDKVKVEEQELEAAPRRQHHRQSAEDSMSDSFQTHDLDIDNASELHNCYGNNMVQGQAMTARNDIGVVTVKEDNDWFTDMNLDDLQASYNMAHTVNPIPAQTANLVTGQGHGYLQGYGYLQYMNSPSMKMWQTILPPF

SEQ ID NO: 8569 - protein, 110 aa, Zea mays
  unsure (1)..(110): unsure at all Xaa locations
  Clone ID: TF_LIB3245-448-P1-N1-B7.pep
PRQKIKYQLIPRGAIYMGXPMELPSKSDLPMKGNQGDFFAYLDKKYPNGSRSNRATLTGYWKXTGMDRSIKLNKLTLGTKNTLLFHERRPLFCIRTEWIIHEFYIDANGF

SEQ ID NO: 8570 - protein, 176 aa, Zea mays
  unsure (1)..(176): unsure at all Xaa locations
  Clone ID: TF_ZmC27_5.pep
MDCGGALQLPPGFRFHPTDDELVMYYLLRKCGGLPLAAPVIAEVDLYKFDPWQLPEKAFGGEKEWYFFSPRDRKYPNGSRPNRAAGTGYWKATGADKPVGSPRPVAIKKALVFYAGKPPKGVKTNWIMHEYRXLADVDRSAAARKKTNNALRLDDWVLCRIYNKKGVIERYDTVND

SEQ ID NO: 8571 - protein, 78 aa, Zea mays
  Clone ID: TF_700168653H1.pep
TTPVPPFPSARAAASRQPTTEPTSQPTGHSERVKRPMVAMAAGQQQQQQQRRYARRTQPAPVLPVPPDGRGAGGSLAL

SEQ ID NO: 8572 - protein, 164 aa, Zea mays
  Clone ID: TF_ZmC17732_2.pep
RWFAGNFVDARLLSFFVLFLVSSSDFLFLVSMQADSTADYSSDNRISLDAIETIFCEVDELGPQAMVNNTNHCDSCGEYLIHPTMVARGAEQYLELNDLSFSLTDGPDSCGVLFSNGVSVEQLPDLELRFEQFSPDHISNTAIASTSTTVGSSASVPLLEDHRT

SEQ ID NO: 8573 - protein, 158 aa, Zea mays
  unsure (1)..(158): unsure at all Xaa locations
  Clone ID: TF_LIB4743-101-Q1-K1-G2.pep
MQLNKILVLIHFCRSARVDSSQNSRETLFRFPDPVVPMRCECDYANAGKSLIRSDDPEWFFLAPKDRKYPNGSRSNRATVAGYWKATGPDRNIKSKGDKSKQFTIGKKKTLVFHRGRAPKGERTGWIMHEYRTTEPQFESGXKGGYVLYRLFWNQRRN

SEQ ID NO: 8574 - protein, 445 aa, Zea mays
  Clone ID: TF_ZmC151_1.pep
MAQTSLPPGFRFHPTDVELVSYYLKRKIMGKKHIVDAIAEVDLYKFPPWDLCEKSSLRSKDLEWFFFCPRDKKYPNGSRTNRATPNGYWKTSGKDRIIMLNSRTVGMKKTLIFHEGKAPKGDRTDWVMYEYRMEDEDLVSAGFSKDAYVLCKIFKKSGLGPRIGEQYGAPFNEDEWDNAEVETSLFPLTCSEVNPTEGQRAQPTVLAGALLEPEPPLHNSSSTCAGEESSFGHATAEDLTFSYTVASSAIQDTPARMSGDGVVSVNNISNVANDMRSPRDCDEFLSELSRFMNDSPLRNTPLGECSGLPPMSEAEAHAFEVNSFGLYNELSELVELGGADNNLNTSNVETTDYLMLPPDRELSANDYMELNDLLAPDPSFPSEFSAQDNQYMQHPLAQYNGHYDLSGPSEPTMPSIFDVFPPNNGVLATDDPANYLDPAMQFPFS

SEQ ID NO: 8575 - protein, 263 aa, Zea mays
  unsure (1)..(263): unsure at all Xaa locations
  Clone ID: TF_ZmC545_14.pep
MGQPVTRRRERDAEAELDLPPGFRFHPTDDELVEHYLCRKAAGQRLPVPIIAEVDLYRFDPWDLPERALFGTREWYFFTPRDRKYPNGSRPNRAAGDGYWKATGADKPVAPRAAARTLGIKKALIFYAGKAPRGVKTDWIMHEYRLADAGRRAKKGSLRLDDWVLCRLYNKKNEWEKMRLGKGAAAGTVKEEEAMDMSTSHSQITHSWGETRTPESEIVDNDLPFPDPAMMVPKKERVDDGGSARTSDLXVDLSYDDIQSMYS

SEQ ID NO: 8576 - protein, 64 aa, Zea mays
  unsure (1)..(64): unsure at all Xaa locations
  Clone ID: TF_uC-zmflb73187e11b1.pep
EQYYVQPAPGPAVADDATCLAPDXRLHPTDEELVSYYLKRKVLRRPLKADAIADVDLDTLEPWD

SEQ ID NO: 8577 - protein, 273 aa, Zea mays
  unsure (1)..(273): unsure at all Xaa locations
  Clone ID: TF_ZmC198_10.pep
MAVMAGAASMEVEQDLPGFRFHPTEEELLGFYLSRVVHGKQLHFDIIGSLNIYRYDPWDLPAMAKIGEREWYFFVPRDRKXGSGGRPNRTTERGFWKATGSDRAIRSSGDAKRVIGLKKTLVFYQGRAPRGTKTDWVMNEYRLPDHSAAGRAAPPPPPKEDMVICKIYRKATPLKELEQRASAMEEMQTRIGGARATSLVQADGSTGDDYLSSDDTSFLQFPVLVLPRAVGRQLRRAQGGQDGGRGRHDGHGSVDVVLPTACRERCRPGGEAR

SEQ ID NO: 8578 - protein, 99 aa, Zea mays
  Clone ID: TF_LIB3151-013-Q1-K1-H9.pep
MEKVSFVKNGELRLPPGFRFHPTDEEPVLQYLKRKVFSCPLPASIIPEVDVCKSDPWDLPSDLEQERYFFSTKEAKYPNGNRSNRATNSGYWKATGLDK

SEQ ID NO: 8579 - protein, 121 aa, Zea mays
  Clone ID: TF_LIB5117-072-A1-PF1-G4.pep
MSSLSMVEARLPPGFRFHPRDDELVLDYLSRKLGGGAGGAAVASIYGCPAMVDVDLNKIEPWDLPEIACIGGKEWYFYSLRDRKYATGQRTNRATESGYWKATGKDRAISRKGLLAGMRKT

SEQ ID NO: 8580 - protein, 74 aa, Zea mays
  Clone ID: TF_700029568H1.pep
EEAMELPPGFRFHPTDEELITHYLASSSSSLVASSVRAGASSKQDEWVLCRGVKKSIEPPSVLGSKRVSSVACM

SEQ ID NO: 8581 - protein, 281 aa, Zea mays
  unsure (1)..(281): unsure at all Xaa locations
  Clone ID: TF_ZmC12224_2.pep
MGLREIESTLPPGFRFYPSDEELVCHYLYRKVANERSVQGTLVEVDLHEREPWELPXFRDRKYATGPRTNRATKTGYWKATGKDREVRDPAARAVVVGMRKTLVFYQGRAPSGVKSCWVMHEFRLDSPRTTTTPPKEDWVLCRVFQKRKVDGSEQDNGVSPSPPVFASASQSQGVVLPPDQPCVVDAYVVVDQPGSSSVGLAPPQENLGSGLDALLTNGAMWQYTSSVFGHLLPQEATNSPPVMDLGSRGGGGGGDYGCSFFYDSSFEDMANIGFRQGWMG

SEQ ID NO: 8582 - protein, 201 aa, Zea mays
  Clone ID: TF_ZmC38242_2.pep
MTGTTWIIDSQRFATKIKNASGSSDPSKQKWIGNPSKECPKCSHVIDNSDVVHQWPGLPKGVKFDPSDQELIWHLMAKHGKSGIKPHPFIDEFIPTVEEDEGICYTHPQKLPGVKQNGSVSHFFHRTFKAYNTGTRKRRRINTDDADVRWHKTGNTKPVLVDGKHLGCKKIMVLYISPLKGGKAEKTNWVIHQYHLGTGED

SEQ ID NO: 8583 - protein, 323 aa, Zea mays
  Clone ID: TF_ZmC512_1.pep
MTWCNSFNDVRAVENNLATAAAVAAAAAKKQQQQQASSHVNLIRTCPSCGHRAQYEQVQAAATIQDLPGLPAGVKFDPTDQELLEHLEGKARPDARKLHHPLIDEFIPTIEGENGICYTHPERLPGVGKDGLIRHFFHRPSKAYTTGTRKRRKVHTDEQGGETRWHKTGKTRPVFTGGKLKGYKKILVLYTNYGKQRKPEKTNWVMHQYHLGSDEEEKDGELVVSKVFYQTQPRQCGSGSATAKDAIPLAANAATDHHHHHHHDGGNGGGNNMLKEAGIVDFYSPAALISYNQAASNSRVAASAHLVPNFEVHTTSGAAGFGP

SEQ ID NO: 8584 - protein, 306 aa, Zea mays
  Clone ID: TF_ZmC545_5.pep
MVAMAAVQQKQQQQRRDAEAELNLPPGFRFHPTDEELVAHYLCARAAGRRPPVSIIAEVDLYRFDPWDLPERALFGRREWYFFTPRDRKYPNGSRPNRAAGSGYWKATGADKPVEHGGRTAGIKKALVFYHGKPSRGAPRGVKTDWLMAEYRLADAGRRAKKGSLRLDDWVLCRLYNKKNEWEKMRLGKGAAAGAGRVGEAMDMSTSHSQITHSWGETRTPESEIVDNDLPFPDPAMMVPKKERVDDGGSARTSDLFVDLSYDDIQGMYSGLDMLPPAGEDLYSSLFASPRVRGNQPTGPAGLGPF

SEQ ID NO: 8585 - protein, 254 aa, Zea mays
  Clone ID: TF_ZmC594767_1.pep
MQPPPQLPAALPVGFRFRPTDEELVLHYLKPKIAGRAHADLLLIPDVDLSACEPWELPAKALIRSDDPEWFFFAPLDRKYPGGHRSNRSTAAGYWKATGKDRLIRSRPAGTLIGVKKTLVFHRGRAPRGHRTAWIMHEYRTAEPQLPQGQNGSFVLYRLFNKNEEESEASDAADSPSTSSPPIAPEVKTENLSQPTSAKMSPHIATVSSNEPTSNQGDVNLLDVLTQLPDLHPEQAFDGFPTITSSMRPYTDHP

SEQ ID NO: 8586 - protein, 250 aa, Zea mays
  Clone ID: TF_ZmC1378_2.pep
MVEPSVKSSDQHGGGGVDVLFLPPGFRFHPTDEEVITSYLLQKLLNPSFAPHAIGEVDLNKCEPWDLPSKAKMGEEDSKEWYFFCRKGMKYPTGTRANRATKEGYWKATGKDREIFFKPVAGHDDVDRREQLVGMKKTLVFYTGRAPRGTKTNWVMHEFRLIEGRHRTTNDDLLLRFNPKDEWVVCKVHHKGGQHDASAAKAAGGGGKEQHYSSAAGTPNVSSVETGGGDDHDVPSDSCCWGYTQQLPLH

SEQ ID NO: 8587 - protein, 151 aa, Zea mays
  Clone ID: TF_LIB4741-094-Q1-K1-F10.pep
ETSSTSVGWKRNPGGRLVCAIALRPLLPLALMKDLKTKALDKSLEGSVARLTGPKEMLVKSQKEFVYHNCCREKTWKTKGGCSASREQGNPASRQVFGRECCKIDRTKRDVGQVTERVRRPQLMLRENFGWQDSKETGDQAINRQMFSETR

SEQ ID NO: 8588 - protein, 283 aa, Zea mays
  Clone ID: TF_LIB4758-097-R1-K1-B9.pep
LEPASSPSPVVRRPTSRTTERGFWKATGSDRAVRCAHDPKRLIGLKKTLVYYEGRAPRGTKTDWVMNEYRLPDACNNNNNNNNAVAGDSSTAAAASSTTTTNNSPKEDIVLCKVYRKAVSLKELEQRVAMEELARATPSAPTNAGSPADSMSSSDQDQQTQLGQGRSGDHDDDARRQHLTTACDDEHEARGGGRARGGAAAGGADEAVDAEPAAAGGGEAAAGVDAGPLLDAAAEPMGWRAGLPTTPASSTFNQCNLRISDRPSSSISSYIYMVIGPTDYTNS

SEQ ID NO: 8589 - protein, 260 aa, Zea mays
  Clone ID: TF_ZmC13898_1.pep
MERPAQAPTQLPPGFRFHPTDEELVVLYLRRKALARPLPAAVIPVVHDVAGLDPWDLPGASEGEGYFFSLRRAPATGRGSRRRRAGSGYWKATGKEEPVFLQCGGGGVGGKRQLLVGGKTALAFHRSEPSPPSSSRTGWVMHEYRLAAASRGVAEQRKKNASHGCCDAEPGEWVVCRVFLKKGARRSRPGRDGNHSRALRHRASAAPPQLREGVGGRQPLLFPAPQSPSSSCVTGVTDLSDEEDEVSSGSITRVAPQREA

SEQ ID NO: 8590 - protein, 81 aa, Zea mays
  Clone ID: TF_LIB5117-061-A1-PF1-E7.pep
MNSLSMVEARLPPGFRSHPRDDELVLDYLAKKLGGGGGGAAAAVASMYGCPTMVDVDLNKIEPWDLPEIACIGGKECYFYC

SEQ ID NO: 8591 - protein, 231 aa, Zea mays
  Clone ID: TF_ZmC3684_1.pep
APKGQKTHWVMHEYRLEGAYAYHFLPSSTRDEWVIARVFQKPGEVPPAARKHRLGALSSTTGTAAGDSCFSDSTSASIGGASSSSTPGPLFASAAAAVANAGAADGDTSSYCGGAANHGNLVTGRELVPCFSTATINGPLVAAALGIGQPYNAAPLPFEQQPPPPAFLPSLRSLQDNLQLPPFLSAGGLGGGGALHWLPAGGMEVKVEGRSAPPQMAVGPGQLDGAFGWSF

SEQ ID NO: 8592 - protein, 217 aa, Zea mays
  Clone ID: TF_LIB3912-048-Q6-N6-H8.pep
APHGQKTDWIMHEYRLEDADDDDAQGGTSEDGWVVCRVFKKKCFFKIGGGEGSTTSSQGADAGGHLATMSPPLGGHHDLAYMHPHPYYHHAASYYSQMQAPGPHATAYSHHVQVQDLLTNHRPTDDDGAGTGYDFSGLPVENQPGGGLDVGSSDGVATDDGGQLAGERRDQTTGTAADHQWQAMDGFSNGGSAEVQQMTGAQRGGGDGFVGLRKVKT

SEQ ID NO: 8593 - protein, 119 aa, Zea mays
  unsure (1)..(119): unsure at all Xaa locations
  Clone ID: TF_LIB4738-096-Q1-K1-A4.pep
MPPRQHASIAMPISGDANGDGISRRSRLMTNLPCGLRFHPTDKELMMHYLMRNYGSLPGPVPFIXQYNIYHSNRCKLPAYALFCHKDRFFFTPCYRWYTNGAPPNRATGSANWKATACD

SEQ ID NO: 8594 - protein, 157 aa, Zea mays
  unsure (1)..(157): unsure at all Xaa locations
  Clone ID: TF_LIB4739-110-Q1-K1-D7.pep
MPRSGGGGNGGGISSSSRVMPNLPAGFRFHPTDEELMVHYLMRQAASMPCPVPIIAEVNIYQCNPWDLPAKALFGDKXEGFFFSPRDRKYPNGARPNRAAXPXYWEATGTDXAXPVVVHAHEPRRRQHSSSGVRKALVFLXGRPXKGHXTDWIMHEY

SEQ ID NO: 8595 - protein, 660 aa, Zea mays
  Clone ID: TF_ZmC12473_1.pep
MVEMAVVELRTLPLGFRFHPTDEELVTHYLKGKITGRINSESEVIPEIDVCKCEPWDLPDKSLIRSDDPEWFFFAPKDRKYPNGSRSNRATEAGYWKATGKDRIIKSKGDKRKQHTIGMKKTLVFHRGRAPKGERTGWIMHEYRTTEPEFESGEQGGYVLYRLFRKQEEKTERSSPEEVDRSGYSPTPSRSSPDNLEANEEANTPLNKESPESALHESPIELPKSVETNGGSMTRWLADRNDNLMATAPDVSHIPFHGHAAGVAKVDPSVGASGHLVNPHNGNDDYNKFVSDFTPILPLENAFFTDIQQGAFGFDGIMNPLDPLDAFLNQTLVDPDEHSSTTSKVQYDSDIPTEFENHWNMKVEPQDDQCWWANIGFEPDEPNPLLPCDTTDQDILSVDSGADSFNELFNSMEETGITVRPQQLDSTVQPNHVFASQGNATRRLRLQVECREIITKDESEDEVSCVLTPDCLNDSVEESTAEKDVASDGDEAESTGIVIRSHHPAPRSSSESSFTQQGTAMQRLRLQSGLNKGQRPSTDDSSSCIIDEPGSQHKAEKAEIEEDASTNLAGSADDLPGNIHDDEQKNIPEHGAEMTSPEAKSVLRLRKTSEEGNKDVKQESCLEPHVRAPMQKGGFQSYIIWLVLPVALLLLLCVGTYGWV

SEQ ID NO: 8596 - protein, 162 aa, Zea mays
  unsure (1)..(162): unsure at all Xaa locations
  Clone ID: TF_ZmC5878_2.pep
MSEVSVINQAEVEDAGAGQLDLPPGFRFHPTDEEIISHYLAHKALNHRFVSGVIGEVDLNKCEPWDLPGRAKMGEKEWYFFCHKDRKYPTGTRTNRATETGYWKATGKDKEIFRGRGVLVGMKKTLVFYRXRAPRGEKTGWVMHEFRLEGKLPERVPRSART

SEQ ID NO: 8597 - protein, 85 aa, Zea mays
  Clone ID: TF_LIB4720-015-R1-K1-G2.pep
TSQRKQRSFDFCIIPFVFIKWSPILLSDSWTKAPKGDRTDWVMYEYRMEDEDLVSAGFSKDAYVLCKIFKKRGLGPRIGEHHGSS

SEQ ID NO: 8598 - protein, 281 aa, Zea mays
  Clone ID: TF_LIB3136-019-C9_FLI.pep
RATTAGFWKATGRDKAIFLGNASRRIGLRKTLVFYIGRAPHGKKTDWIMHEYRLDQENVEIQEDGWVVCRVFKKKSYHQRGLNPAEMAAALDDDELQPFPVPIPGSSLQPTEHKTNPTHLMQYDYPSFDPSMQLPQLMSDDQEQEQPVRPTLLPGHPGVAMASMSSLNIECSQNLTKLTSNGSDEMLHVGHGGGAGGGVVVDRFAGTTTDWSILDKLLASHQNLDRLFHGKVVTTASASPMAVPVYHQQLMELGGSSSSLQRLPLQYLGGETADLLRYHPK

SEQ ID NO: 8599 - protein, 108 aa, Zea mays
  Clone ID: TF_LIB4574-005-Q1-K1-F7.pep
LPTSCQFGPGANNCNNKAQLFWSLGAPRKGAISWSVHGEPKDFTKNQGGKKNGLGRFSVCGGVCSLIKKEAPFFFFFFFFFFFFFFFFFFFFFFFKIPFFFFFFLFFF

SEQ ID NO: 8600 - protein, 277 aa, Zea mays
  Clone ID: TF_ZmC198_11.pep
LGTSRPAKQHHHQSSGARPSRTTERGFWKATGSDRAVRCAHDPKRLIGLKKTLVYYEGRAPRGTKTDWVMNEYRLPDACNNNNNSNNTVAGDSSAAAAASSTCTTNNSPKEDIVLCKVYRKAVSLKELEQRVAMEELARATPSASHNAGSPADSMSSSDQDQQTQLGQGGVEIMMTMPVGGISPQPPLPPPVMMSMKQEEEVAEPEAAPLPAVLMRPSTLSLPQLEVAKQQQEWMQDPFLTQLRSPWMESWSPYYPSVLNFYQCNLRISDRPSSSIK

SEQ ID NO: 8601 - protein, 197 aa, Zea mays
  Clone ID: TF_ZmC13898_2.pep
MDRPAQAPTQLPPGFRFHPTDEELVVLYLHRKALARPLPAAVIPVVHDVARLDPWDVPGASEGEGYFFSLRRAPATGRRRRAGSGYWKATGKEKPVFLQCGGEQRQLLVGVKTALAFHRREPPPPSSRTGWVMHEYRLAVPRGVADQRKKNARHGYVAEPGEVGRVPGLPERQEPGRRQQNFATRRLRSAAAAAAAA

SEQ ID NO: 8602 - protein, 455 aa, Zea mays
  Clone ID: TF_ZmC13658_2.pep
MSISVNGQSVVPPGFRFHPTEEELLTYYLKKKVASERIDLDVIRDVDLNKLEPWDIQEKCRIGSGPQNDWYFFSHKDKKYPTGTRTNRATAAGFWKATGRDKAIYASPGARRIGMRKTLVFYKGRAPHGQKSDWIMHEYRLEAPVDAGAGAAHHLLLPAAEHPPYYTSPPQAPSSTTTAERKLKEGAPAGLGTDEAKQVAWTIRGAAGDQAAQEQEGWVICRVFKKKNLVHHGQSSGVKQQAEGDDHAASHTAAAAAHMDESSPSQCSSVTVISDHVHANVNDKQQQAQASLLMMHTHHSASSDDDALDHILQQYMGGGRQAPAADAKPALLELDHRLHHHHLAAAPTNTRAAAGFYGKFMKLPPLEHAGLPPSPPPGAREYGAAAAAGWDDDDDALDRLAAYDHLNGLSNDASKNMAAFFDVEPSAAAAAVDGDLWSLARSVSALHADLTMNNV

SEQ ID NO: 8603 - protein, 155 aa, Zea mays
  unsure (1)..(155): unsure at all Xaa locations
  Clone ID: TF_LIB4759-043-Q1-K1-B4.pep
MAPIKEIMAGDHGGGEGKEVVVLVGDYDYELEEEDEDMLPGFRFHPTDEELVTFYLRRKVAGKRLTIEIIKDLNIYKHDPWDLPKSSSTISGETKEWYFFCLRXRKYRNSIRPNRVTGSGFWEATGFDRPIHSAASGRAGDPIGFKKSLVFYPRQ

SEQ ID NO: 8604 - protein, 137 aa, Zea mays
  unsure (1)..(137): unsure at all Xaa locations
  Clone ID: TF_LIB4743-075-R1-K1-G11.pep
MSISVNGQSCVPPGFRFHPTEEELLNYYLRKKVASQQIDLDVIRDVDLNKLEPWDIQERCKIGSGPQNDWYFFSHKDKKYPTGTRTNRATAAGFWKATGRDKAIYSAVRRMGMRKTLVFYRGXAPYGHKSDWIMHEN

SEQ ID NO: 8605 - protein, 62 aa, Zea mays
  Clone ID: TF_LIB3088-025-Q1-K1-E9.pep
TSPTGEHTHCHPFTAGEPINIFRFHTTDTELGLHYLKKKSSSTPFSDAIIADVDMYKFDPCK

SEQ ID NO: 8606 - protein, 150 aa, Zea mays
  Clone ID: TF_ZmC198_7.pep
MAAEQQHQLDLPGFRFHPTEEELLEFYLKQAARGRKLKFDIIPTVHLYRHDPWELPSLARHRHAVRVPQHRLPRRLHVVVGDRDGARGRRLALTVSCDEHEERGGGEESAAAGPLPDAAAEPTDGELVVCLLRQRPQLLTKIHTIQQLYM

SEQ ID NO: 8607 - protein, 229 aa, Zea mays
  Clone ID: TF_LIB4759-074-R1-K2-C8.pep
MEDDEEKPSQRITNKQEEDEEDDLVFPGFRFHPTDLELVGFYLKRKVEKKGFRIDIIREIDIYKHDPWDLPNEARHVVQGAGGDKDDWYFFCLRGRKYRNSIRPNRVTGSGFWKATGIDKPIHDGGAGERVVGLKKSLVYYRGSAGRGTKTDWMMHEFRLPSAELVELHDAGIWTICRIFKKNTSYTRRCQQQKQEHGSKRSHHQQQEEQELQYYYDYYRYHHTISTVT

SEQ ID NO: 8608 - protein, 301 aa, Zea mays
  Clone ID: TF_ZmC545_1.pep
MVAMAAVQQQRRDAEAELNLPPGFRFHPTDEELVAHYLCARAAGRRPPVSIIAEVDLYRFDPWDLPERALFGRREWYFFTPRDRKYPNGSRPNRAAGSGYWKATGADKPVEHGGRTAGIKKALVFYHGKPPRGVKTEWIMHEYRLAEAGGARAKKSGAGTLRLDDWVLCRLYNKKNEWEKMQQQKEKEKEKKAMESEASLSHSHSDTRTPESEIDDDTFPELGSLPAFDDMGPAPAAAATAGVVLPKEEVEDFGDLGGDDWLAGINLDDLQMPGDAADFYGSMLVSPMAAKMEPDGGFPFF

SEQ ID NO: 8609 - protein, 302 aa, Zea mays
  Clone ID: TF_ZmC545_10.pep
MVAMAAVQQKQQQQRRDAEAELNLPPGFRFHPTDEELVAHYLCARAAGRRPPVSIIAEVDLYRFDPWDLPERALFGRREWYFFTPRDRKYPNGSRPNRAAGSGYWKATGADKPVEHGGRTAGIKKALVFYHGKPPRGVKTEWIMHEYRLAEAGGARAKKSGAGTLRLDDWVLCRLYNKKNEWEKMQQQKEKEKEKKAMESEASLSHSHSDTRTPESEIDDDPFPELGSLPAFDDMGAAPAPAGVVLPKEEVEDFGDLGGDDWLAGINLDDLQMPGDAADFYGSMLVSPMAAKMEPDGGFPFF

SEQ ID NO: 8610 - protein, 300 aa, Zea mays
  Clone ID: TF_ZmC545_3.pep
MVAMAAVQQQQQQQRRDAEAELNLPPGFRFHPTDEELVAHYLCARAAGRRPPVSIIAEVDLYRFDPWDLPERALFGRREWYFFTPRDRKYPNGSRPNRAAGSGYWKATGADKPVEHGGRTAGIKKALVFYHGKPPRGVKTEWIMHEYRLAGDAKKSGAGTLRLDDWVLCRLYNKKNEWEKMQQQKEKEKKAMESEASLSLSHSHSDTRTPESEIDDDPFPELGSLPAFDDMGPGAAPAPAGVVLPKEEVEDFGDLGGDDWLAGINLDDLQMPGDAADFYGSMLVSPMAAKMEPDGGFPFF

SEQ ID NO: 8611 - protein, 389 aa, Zea mays
  Clone ID: TF_ZmC530453_1.pep
MRSMESTDSSSGELPPQKQPSSAPDLPPGFRFHPTDEELVVHYLKKKAASVPLPVAIIAEVDLYKFDPWELPDKATFGEQEWYFFSPRDRKYPNGARPNRAATSGYWKATGTDKPIMASGGNREKVGVKKALVFYRGKPPKGLKTNWIMHEYRLADAASSTTSRPPPPCNAGGKATSLRLDDWVLCRIYKKIDKLGVGDPPRIMECGEDSVENAVAAYPTHAAAAAMAVAVAGGGGAYHTGNYTSLIHHHHEDSFLVDGLLTAEDAGGSSLSQLAAAARAAAPTDTTKQLLVPSSTTPFNWLDASALTILPPAKRFHGYNRDTTDGGGTSLPSPSERNNLQAAVGAVDSGASGGTSAVIPSFLNPLGVQGATTYHHHAIFGTPVTPEAA

SEQ ID NO: 8612 - protein, 312 aa, Zea mays
  Clone ID: TF_ZmC545_4.pep
MGLPMRRERDAEAELNLPPGFRFHPTDDELVEHYLCRKAAGQRLPVPIIAEVDLYRFDPWDLPERALFGAREWYFFTPRDRKYPNGSRPNRAAGNGYWKATGADKPVAPRGRTLGIKKALVFYAGKAPRGVKTDWIMHEYRLADAGRAAAAKKGSLRLDDWVLCRLYNKKNEWEKMQLGKTAVAGVGATKEEAMDMATSHTHSHSQSHSHSWGETRTPESEIVDNDPFPELDSFPAFQDPAMMMTVPKEEQVDGCSAKSGNLFVDLSYDDIQGMYSGLDMLPPPGEDFYSSLFASPRVKGNQPAGAAGLGQF

SEQ ID NO: 8613 - protein, 357 aa, Zea mays
  Clone ID: TF_ZmC545_6.pep
MTAQNPPTGQDTQSRATPPTIGDQQPAAGASCLKTPSRSRTEDWQAQPKPPLLVLGFIASNPDHIMGLPVTRRRERDAEAELDLPPGFRFHPTDDELVEHYLCRKAAGQRLPVPIIAEVDLYRFDPWDLPERALFGAREWYFFTPRDRKYPNGSRPNRAAGDGYWKATGADKPVAPRGARTLGIKKALVFYAGKAPRGVKTDWIMHEYRLADAGRRAKKGSLRLDDWVLCRLYNKKNEWEKMRLGKEGAAKEEAMDMSTSHSWGETRTPESEIVDNDPPFPDPPAPAMMVPKKERVDAGGSARSSDLFVDLSYDDIQGMYSGLDMLPPPGEDFYSSLFASPRVRGNQPTGAAGLGPF

SEQ ID NO: 8614 - protein, 381 aa, Zea mays
  unsure (1)..(381): unsure at all Xaa locations
  Clone ID: TF_ZmC13658_1.pep
MSISVNGQSCVPPGFRFHPTEEELLNYYLRKKVASQEIDLDVIRDVDLNKLEPWDIQEKCKIGSGPQNDWYFFSHKDKKYPTGTRTNRATAAGFWKATGRDKAIYNAVKRIGMRKTLVFYKGRAPHGQKSDWIMHEYRLDDPAAAAAAGSGDAVANDDAAATAAAAAAASSDGGQEDGWVVCRVFKKKHHHKESGGGGGNKHGSSNSEHGHGGAGKASAAAAAAAHQHQHHGGLQYSSSDEALDQILQYMGRSCKQEHELVSPAPAPPGRAAASRYLRPIETVLGGHAFMKLPALESXVPAPSPPPGAREYAAAGWDDDDALDRLAAYDHLNGLSNDDASKNMAAFFDVEPSAAAAAVDGDLWSLARSVSALHADLTMNNV

SEQ ID NO: 8615 - protein, 293 aa, Zea mays
  Clone ID: TF_ZmC27_10.pep
MSGAGPDLQLPPGFRFHPTDEELVMHYLCRRCAGLPIAVPIIAEIDLYKFDPWQLPRMALYGEKEWYFFSPRDRKYPNGSRPNRAAGAGYWKATGADKPVGTPKPLAIKKALVFYAGKAPKGEKTNWIMHEYRLADVDRSARKKNSLRLDDWVLCRIYNKKGGGLEKAPAAGGDHKPVFATAAVSSPPEQKPFVAAAGGLPPAFPELAAYYDRPSDSMPRLHADYSSCSEQVLSPEQLACDREVQSQPKISEWERTFASDPVNPAGSMLDPVVGHAGGDPLLQDILMYWGKPF

SEQ ID NO: 8616 - protein, 293 aa, Zea mays; identical to SEQ ID NO: 8615
  Clone ID: TF_ZmC27_18.pep

SEQ ID NO: 8617 - protein, 229 aa, Zea mays
  Clone ID: TF_ZmC27_2.pep
MDCGGALQLPPGFRFHPTDDELVMYYLLRKCGGLPLAAPVIAEVDLYKFDPWQLPEKAFGGEKEWYFFSPRDRKYPNGSRPNRAAGTGYWKATGADKPVGSPRPVAIKKALVFYAGKPPKGVKTNWIMHEYRLADVDRSAAARKKTNNALRLDDWVLCRIYNKKGVIERYDTVNDDDGDGAVAEDVKPVPAPAASKNPRASARVGAAAAAPNEVELPEYGGGYYDYDDL

SEQ ID NO: 8618 - protein, 295 aa, Zea mays
  Clone ID: TF_ZmC27_21.pep
MSGAGPDLQLPPGFRFHPTDEELVMHYLCRRCAGLPIAVPIIAEIDLYKFDPWQLPRMALYGEKEWYFFSPRDRKYPNGSRPNRAAGAGYWKATGADKPVGTPKPLAIKKALVFYAGKAPKGEKTNWIMHEYRLADVDRSARKKNSLRLDDWVLCRIYNKKGGGLEKAAAPAAGGDHKPVFATAAVSSPPEQKPFVAAAGGLPPAFPELAAYYDRPSDSMPRLHADYSSCSEQVLSPEQLACDREVQSQPKISEWERTFASDPVNPAGSMLDPVVGHAGGDPLLQDILMYWGKPF

SEQ ID NO: 8619 - protein, 229 aa, Zea mays
  unsure (1)..(229): unsure at all Xaa locations
  Clone ID: TF_LIB4759-095-Q1-K1-D5.pep
RPGLLNTHACALPPGAAYEPDMNREHSSSSSKLINEKLEEHRISTAKHCPHCGEKIDSKPDWVGLPAGVKFDPTDQELIEHLEAKVKDEGSRSHPLIDEFIPTIDGEDGICYTHPEKLPGVTRDGLSKHFFHRPSKAYTTGTRKRRKIQTECDVHKGETRWHKTGKTRPVMVSGRQKGCKKILVLYTNFGKHRKPEKTNWVMHQYHLGDLEEEKEGEAXWVCKIFYQTQ

SEQ ID NO: 8620 - protein, 339 aa, Zea mays
  Clone ID: TF_ZmC21043_1.pep
MHHHHQDQAMGDALWDLLGEEMAAAGGEHGLPPGFRFHPTDEELVTFYLAAKVFNGACCGIDIAEVDLNRCEPWELPDAARMGEREWYFFSLRDRKYPTGLRTNRATGAGYWKATGKDREVLNAATGALLGMKKTLVFYKGRAPRGEKTKWVLHEYRLDGDFAAARRPCKEEWVICRILHKAGDQYSKLMMVKSPYYLPMAMDPSSFCFQEDPTGHPLPNPSGCTPFHHGHPHHSMQPPPPLPPSNHAGKAVFTGAAAACCMQQEPADGSNSAVLPMPPFPPFTTIVAGKPAVPAPPPQVVNAGPQEPPPPTWLEAYLQHTGGILYEMGVGPTAAPRGA

SEQ ID NO: 8621 - protein, 315 aa, Zea mays
  Clone ID: TF_ZmC328_1.pep
MAMVAAAEGSGRRDAEAELNLPPGFRFHPTDEELVVYYLCRKVARQQVPVPIIAEVDLYKFDPWDLPEKALFGRKEWYFFTPRDRKYPNGSRPNRTAGKGYWKATGADKSIVPMGSTRAAGIKKALVFYSGKAPRGVKTDWIMHEYRVAQADHTLGKKGSHKLDEWVLCRLYNKRNNWDKVKVEEQELEAAPRRQHHLQSAEDSMSNSFQTHDSDIDNVFELQNCYGNNMVQGQAMTPRNDIGVVTVKEDNDWFTDMNLDDLQASYNMAHTVNPNPAQTANLVAGQGHGYLQGYGYLQYMNSPSMKMWQTILPPF

SEQ ID NO: 8622 - protein, 191 aa, Zea mays
  Clone ID: TF_LIB4759-059-R1-K1-C5.pep
MMAIKSLSMVEASLPPGFRFHPRDDELVLDYLAKKLGGGGGPVVVSIYGCPTMVDVDLNKCEPWDLPDIACIGGKEWYFYSLRDRKYATGQRTNRATDSGYWKATGKDRPISRKGLLVGMRKTLVFYQGRAPKGKKTEWVMHEFRMEGRDDPMKLPFKVIINYDDLISSLCILLFSVVCVDSFYSQFSNNI

SEQ ID NO: 8623 - protein, 657 aa, Zea mays
  Clone ID: TF_ZmC16461_1.pep
MSLSPLDSSSPPAAAAAAATEVPLAPGFRFHPTDEELVSYYLRRRVLGRRLRVDAIAEIDLYRLEPWDLPSLSRIRSRDAQWYFFARLDRKVAGAGAGGRGGPGNRTNRATPRGYWKTTGKDREVHHRGKPVGMKKTLVFHAGRAPKGERTNWVMHEYRLLDADGPQDLHVVCRIFQKHGSGPQNGAQYGAPYMEEEWEEDDDAIENGSTHDASGQIAATTCAVDEESNEDDENAYCETNRPARVEPSHLPSVHEMLNPPEMAPLQGQDSKETSDGSCSDVAISLEEILQEPLSNISVENMHRLEGQNATDDNISVDNLLSAYPTKDNGYVGQYNTMNGSAPADEAHARWPLRTYSNQNYVNGPLADEFFDTGNDTNGVAYSRQQQADGFPAPRQVDESMVFYDAPSDYNLVDGKDDFVYLNDILNEPLGNESLFDGDDMMAYFDATENDFKYDILGSGQGLDYPLADMPLNFAQKSDKEDKFTFEGISEVPEANPQYGASSSGSHEDLYTDTEFLGVPTDDTADKTYGNRLASMLGSIPAPPAMASEFPPSTGKSAGMLSAVSSSSIRFTAGIIQLDGLTFSSGSGQWPLQKNGDLSLLVSFAVEGDVASKLPVGLGRATRISTVPMVLRSGFYLFFMSAMILLFSYKVGSCIYSR

SEQ ID NO: 8624 - protein, 195 aa, Zea mays
  Clone ID: TF_LIB4729-016-R1-K1-B12.pep
MLMSFAGSAPDPTILMYSESWPGLPRGVEFNPSDSDLLWHLAAEVGNALAERHPFINEFIKFVDDVREFICTHPQHIPGVRQDGRASYFFHRSFEPYINENDVNNCWKKIGSPRSIILDGTLTGCKEVFALYADMPSDKRSQETDWRLHQYHLQNTVKAESEIVASKIFLASRNSLCELAEETHIESEWDVSTHK

SEQ ID NO: 8625 - protein, 374 aa, Zea mays
  unsure (1)..(374): unsure at all Xaa locations
  Clone ID: TF_ZmC79048_1.pep
MKNVAKCDTWCELQNPANHRVFERKLRPKPSGGGHVCLGVTHSWRNWPTTAAAVLLVLWCPGLATSVPSPGLRWGLHWRRAPTSYWVYICMLMSFAGSAPDPTILMYSESWPGLPRGVEFNPSDSDLLWHLAAEVGNALAERHPFINEFIKFVDDVREFICTHPQHIPGVRQDGRASYFFHRSFEPYINENDVNNCWKKIGSPRSIILDGTLTGCKEVFALYADMPSDKRSQETDWRLHQYHLQNTVKAESEIVASKIFLASRNSLCELAEETHIESEWDVSTHKDSSVEWAKGFNPEICTETDELDHISLKERYRILLXDKRLGLTTVSGGKSIMRVETSRASPKRNHEGKISKEDIFSMWXEISSAPSIDRE

SEQ ID NO: 8626 - protein, 156 aa, Zea mays
  Clone ID: TF_LIB4725-023-R2-K1-H9.pep
GPGNRTNRATPMGYWKTTGKDREVHHRGKPVGMKKTLVFHAGRAPKGERTNWVMHEYRLLDADGPQRRSSPYGFVFSQFMDLHVVCRIFQKHGSGPQNGAQYGAPYMEEEWEEDDDAIENGSTHDASGQIAATTCAVDEESNEDDENAYCETTDLL

SEQ ID NO: 8627 - protein, 131 aa, Zea mays
  Clone ID: TF_ZmC1120452_1.pep
MEASVGAAGGGGGKSKKEEESLPPGFRFHPTDEELITYYLRQKIADASFTARAIAEVDLNKCEPWDLPGKDRRKPTVYICTRTCMHTAYSVRQLFTIKSQLINSTNDSSPIFITGGKTFDLNYITRGKKRN

SEQ ID NO: 8628 - protein, 109 aa, Zea mays
  Clone ID: TF_ZmC7355_2.pep
MSAERAPVLVRHGGGGVEALRQLPPGFRFRPTDEELVVQYLRRKAIGVPLPAAVIPVFRDLYSRDPWDVVAVSAPDTRSEGEKYFFAVRPASGGKSSGAGTGSRAAADK

SEQ ID NO: 8629 - protein, 169 aa, Zea mays
  unsure (1)..(169): unsure at all Xaa locations
  Clone ID: TF_LIB5117-019-A1-PF1-G7.pep
METLRDMALPPGFGFHPKDTELVSHYLKKKIXRSNRATVAGYWKSTGKDRAIKVDKRTIGTKKTLVFHEGRPPTGKRTEWIMHEYYIDENECQACPDMKDAFVLCKVTKRIDWTSENGNEVGNNNPQPQQANVAAILAVSVEQPDTAASSIYWVMNXPSDAATVDIPAH

SEQ ID NO: 8630 - protein, 134 aa, Zea mays
  unsure (1)..(134): unsure at all Xaa locations
  Clone ID: TF_LIB3607-017-Q6-K6-E4.pep
MVEPSVKSSEHGGGGIDLLFLPPGFRFHPTDEEVITSYLLQKLLNPSFAPHAIGEVDLNKCEPWDLPSMAKMGEEDSKEWYFFCRKGXKYPAGTRANRATKEGFWKASGSVRVIFFKPAAGHDSLRRRVPLVVL

SEQ ID NO: 8631 - protein, 273 aa, Zea mays
  unsure (1)..(273): unsure at all Xaa locations
  Clone ID: TF_ZmC12224_6.pep
MGLRDIELTLPPGFRFYPSDEELVCHYLHGKVANEQLAGAGAAXVEVDLHAHEPWELPDVAKLSTNDWYFFSFRDRKYATGQRTNRATRTGYWKATGKDRAMRDPAARAVVVGMRKTLVFYQGRAPSGVKSCWVMHEFRLDSPRTTTTPPKEDWVLCRVFQKRKVDGSEQDNGVFPSPPVFAGTSQSQGVVLPPDQPSVVDAYVVVDQPGSSSVGLAPPQENLGSGLDALLTNGAMWQYTSSVFGHLLPQEATSSPPVMDLGSGGGRGRRLRV

SEQ ID NO: 8632 - protein, 265 aa, Zea mays
  Clone ID: TF_ZmC99_1.pep
MEVKKEATKATLPPGFRFRPTDEELIVHYLRRRALASPLPAAVDIPDVRILAHDPSDLLPPGGLAGFGEQERYFFTCKEAKYVKGRRANRATGAGYWKATGKEKPVAVAVRGVQGQSQSQSQAVLVGMKRSLVFYRGKPPTGSKTEWVMHEYRLAGAGLAPCRRRHADADGDGVARAPAEGWVLCRVFRKKGSAAVARRPGDRSDGEGDESACGGGGGGGRGFIDFFARADAAGRRRRAPSPAVSSRWLADASPQPEQEATSRGP

SEQ ID NO: 8633 - protein, 154 aa, Zea mays
  Clone ID: TF_ZmC519245_1.pep
MDHGFDGALQLPPGFRFHPTDEELVMYYLCRKCGGLPIAAPVIAEVDLYKFEPWRLPEKAAGGGPDAKEWYFFSPRDRKYPNGSRPNRAAGTGYWKATGADKPVGSPRPVAIKKALVFYAGKPPKGVKTNWIMHEYRLADVDRSAAARKKSNNA

SEQ ID NO: 8634 - protein, 195 aa, Zea mays
  unsure (1)..(195): unsure at all Xaa locations
  Clone ID: TF_LIB4727-007-R1-K1-G5.pep
HRDTRDFDIYKHDPWDLPXSSSISGEKEWYFFCLRGRKYRNSIRPNRVTGTGSGFWKATGIDRPVHSSGRAGGGPVVVVGLKKSLVFYRGSAGKGTKTEWMMHEFRLPPRADDTAHATPASEREAEVWTVCRVFRRNFTYKKHXQQQQQQQQMAAGGSEVSAGAGAATVAQPGESSSVTGGVESDTXDEYTNTIP

SEQ ID NO: 8635 - protein, 363 aa, Zea mays
  Clone ID: TF_ZmC38242_1.pep
VVHQWPGLPKGVKFDPSDQELIWRLMAKHGKSGIKPHPFIDEFIPTVEEDEGICYTHPQKLPGVKQNGSVSHFFHRTFKAYNTGTRKRRRINTDDADVRWHKTGKTKPVLVDGKHLGCKKIMVLYISPLKGGKAEKTNWVIHQYHLGTGEDERDGEYVVSKLFFQQQFKPGDKNAQELTTSDDLESMAAESNLPDFTTLPTDKHVGTVQEVVHNPEHNLYQLNRNCEISIEETVVLPPSVKTTKDGDNLQSQDQKLWEGDSQFELLDSQQLAEGLALCDEFLLSQSQTSCGGGDEPRETKPCLAAYAHLSAEDFKKDLEECQRLEPTDNTNLELDNTDEFRLSQIEFSQDSFMTWAAEKITDD

SEQ ID NO: 8636 - protein, 114 aa, Zea mays
  Clone ID: TF_ZmC545_12.pep
MGLPMRRERDAEAELNLPPGFRFHPTDDELVEHYLCRKAAGQRLPVPIIAEVDLYRFDPWDLPERALFGAREWYFFTPRDRKYPNGSRPNRAAGNGYWKATGADKPVVPPRRAA

SEQ ID NO: 8637 - protein, 360 aa, Zea mays
  Clone ID: TF_UC-ZMFLMO17204B05_FLI.pep
MVVKEFGREVVMSMDKVKRGGEALTAAGAGDEEKDDAVLPGFRFHPTDEELVTFYLRRKVARKPLSMEIIKEMDIYKHDPWDLPKASTAAGGEKEWYFFCLRGRKYRNSIRPNRVTGSGFWKATGIDRHIYPATANPVESVSVGLKKSLVYYRGSAGKGTKTDWMMHEFRLPPAAAASPTPTSMQEAEVWTICRIFKRNIAYKRQPQLPAWRQQQSSSNTGSFESDGGGGGDEYMNRCLPVPATATAHQIGGMLNGGGVVSATRSSSSSFFRDRESVHGGQQFHFHEQWLSRFPAAPAVEQKPQLLDPSAMAIAFHQNDDQSVATAAAASECCKDGYYWDEIARFMEVNDPTVLHDCRYA

SEQ ID NO: 8638 - protein, 368 aa, Zea mays
  Clone ID: TF_ZmC1440_1.pep
MVVKEFGREVVMSMDKVKRGGEALMAAGAGAGDEEKDDAVLPGFRFHPTDEELVTFYLRRKVARKPLSMEIIKEMDIYKHDPWDLPKASTAAGGEKEWYFFCLRGRKYRNSIRPNRVTGSGFWKATGIDRHIYPATANPVESVSVGLKKSLVYYRGSAGKGTKTDWMMHEFRLPPAAASPSPTPTSMQEAEVWTICRIFKRNIAYKRQPQLPAWRQQQQSSSNTGSFESDGGGGGDEYMNRCLPVPATATATAHQIGGMLNGGGVVSATGSSSSSFFRDRESVHGGQQFHFHEQWLSRFPAAPAVEQKPQLLDPSAMAIAFHQNDDQSVATAAAAAASECCKDGYYWDEIARFMEVNDPTVLHDCRYA

SEQ ID NO: 8639 - protein, 35 aa, Zea mays
  Clone ID: TF_ZmC176741_1.pep
MGTMTLPPGFRFHPTDDELVSYYLKRKVDNLKIEL

SEQ ID NO: 8640 - protein, 319 aa, Zea mays
  unsure (1)..(319): unsure at all Xaa locations
  Clone ID: TF_ZmC13154_1.pep
MASSSRLDLPPGFRFHPTDEEVVSHYLTHKALDSRFSCVVIADADLNKIEPWDLPSXKAKMGEKEWFFFCHKDRKYPTGMRTNRATASGYWKATGKDKEIFRGSSSSPRRVLVGMKKTLVFYTGRAPRGGKTPWVMHEYRLEGSLPPNLHRGAKDEWAVCKVINKDLAGKAGQQQMAPPPHAVSVGMERSDSLAFLDDLVLDNADDLPPLVDSTTYAAGSLFAAAGTTTTTNDDSGGYQQATKAEPQPQLPAPSNSPYQHQQQAIRRHCKAEAPAPAMVLSPSRETPGADMFQLQHVDELLQLDGGFMEDYYNMNMWKV

SEQ ID NO: 8641 - protein, 408 aa, Zea mays
  Clone ID: TF_ZmC17732_1.pep
MAKTSLPPGFRFHPTDVELTVYYLKRKLLGKHLRCNAITEIDLYKFAPWDLPERASLESNDLVWYFFCPRDRKYSSGLRTNRSTGVGYWKATGKDRPVVYNSRTVGMKRTLVFHLGKPPRGDRTDWVMYEYRLEDEEIAASGVKLDACVLCKIFQKSGPGPKIGAQYGAPFNEEDWNDASNVECSPCVPSVAPCAPESSRGGLNSAGQRLAVSYDVKVSLGSSAEGINRPAVNGVHPVRPSPDAPNDCIHIQLLAEVMRCSSTSMHVLRTAGDDGLLADSTADYSSDNRISLDAIETIFCEVDELGPQAMVNNTNHCDSCGEYLIHPTMVARGAEQYLELNDLSFSLTDGPDSCGVLFSNGVSVEQLPDLELRFEQFSPDHISNTAIASTSTTVGSSASVPLLEDHRT

SEQ ID NO: 8642 - protein, 657 aa, Zea mays
  Clone ID: TF_ZmC12473_2.pep
MALWALPVGFRFHPTDEELVSHYLKGKITGQINSEAEVIPEIDICKCEPWDLPGKSLIRSDDPEWFFLAPKDRKYPNGSRSNRATVAGYWKATGPDRNIKSKGDKSKQFTIGKKKTLVFHRGRAPKGERTGWIMHEYRTTEPQFESGKQGGYVLYRLFWKPEEKTERSSPKEMDRSGNSPTTIRSSRDNQEANEEANTPLNKKSLESALHDPIELPNSAETPAGPRKMCLADRNDNLVATAPVVSHIPFQGHAAGVAKVDPSAAASAHFVNPQNGNDDCNNFMSDFTPILPHENAFFTGTQQGAFGFDGNGIMNHPDALDAFLNQTLVDTDEHSSTTSKVQYDSDIPTEFANHWNMQDEHQDWWEKLDFEPYEPTLLPYDTTDLDVLSVDSGADSFNDLFNVTGITLRPQRLDSTVQPDCVFPDQGTALRRLKLQVVECGESITKDESEDEVSCVESPNYFDESVEFAAEKGVASYGDGADSTGIVIRSRYPAPSSSSESSFTQQGTAMRRLRLQLGLNEGTCPSSGDSSSCIVDESESQQKAEIEEDASTNLAGSVDNLPGNSHDDEQKDIPEHGVKSVLRLRKTSAESLKDVKQEDCLEPDGRAPMQRVGFQSSIIWLVLSVAVLLLLYCGVWMSMICILVRCFAHMGSWHQPDV

SEQ ID NO: 8643 - protein, 89 aa, Zea mays
  unsure (1)..(89): unsure at all Xaa locations
  Clone ID: TF_LIB3354-108-Q6-K2-B3.pep
MVAIATVQHHRRDSEAELNLPPAFRFHPTDEDLLAHYLCTRAAXRRPPVSIIAYVDLYRFYPCYLPERALFSPREYYFFIPRDRMYPNV

SEQ ID NO: 8644 - protein, 467 aa, Zea mays
  Clone ID: TF_ZmC603_1.pep
LELRAARRRNKNHPSPYRCYSCTRALPPGAAAYDPDMNRAHSSSSKLINEKLVEHRISTAKHCPHCGEKIDSKPDWVGLPAGVKFDPTDQELIEHLEAKVKDEGSRSHPLIDEFIPTIDGEDGICYTHPEKLPGVTRDGLSKHFFHRPSKAYTTGTRKRRKIQTECDVHKGETRWHKTGKTRPVMVNGRQKGCKKILVLYTNFGKHRKPEKTNWVMHQYHLGDLEEEKEGELVVCKIFYQTQPRQCSWSSDRGAAATALAATAAAAAAQEQHRRDSGSGSCSSRDHEVSATSFPAGYTVTTAVEMQQHMKQPADHFSFAPFRKTFDQEVGIGGDQVPSNQLGRSEPHHAGLGQQPHGPVLATKTAVPATAFLISRPSNPVSTIVPPAMQHASVVLDHDQFHVPAILLHHHDKFQPQQKLDRRSAGLEELIMGCTSSTSTKGDASIAHPQETEWPYTYWPPDNQDHHG

SEQ ID NO: 8645 - protein, 293 aa, Zea mays
  Clone ID: TF_ZmC12224_1.pep
MGLREIESTLPPGFRFYPSDEELVCHYLYKKVANERAAQGTLVEVDLHAREPWELPDAAKLTASEWYFFSFRDRKYATGSRTNRATKTGYWKATGKDREVRSPATRAVVAMRKTLVFYQGRAPNGVKSCWVMHEFRLDSPHTPPKEDWVLCRVFQKRKDSEQDNGGGSSSPTTFAGASSQGVVLDLPDDQPSMTMAGAYVAVDHHQPGSSAVGFALPPHAQDNGLGDGGLDALLMNGATMWQYSSSALADHFPPEEVTAAPMMGLGSRGGGDGCSFFYDSGFDGMGFPQGWMG

SEQ ID NO: 8646 - protein, 297 aa, Zea mays
  Clone ID: TF_ZmC12224_4.pep
MGLREIESTLPPGFRFYPSDEELVCHYLYKKVANERAAQGTLVEVDLHAREPWELPDAAKLTASEWYFFSFRDRKYATGSRTNRATKTGYWKATGKDREVRSPATRAVVAMRKTLVFYQGRAPNGVKSCWVMHEFRLDSPHTPPKEDWVLCRVFQKRKDSEQDNGGGSSSPPTFAGASSQGVVLDLPDDQQPSMTMAGAYVAVDHHQPGSSAVGFALPPHAQDNGLGDGGLDALLMNGATMWQYSSSALADHFPPEEVTAAPMMGLGSRGGGDGCSFFYDSGFDDMANMGFPQGWMG

SEQ ID NO: 8647 - protein, 223 aa, Zea mays
  Clone ID: TF_LIB4764-075-R1-K1-G10.pep
MGGGATNLPPGFHFFPSDEDLVVHFLRRKAANLPCRPDIVPTILLHRYDPWELNGTALQAGNQWYFFSSHAHAHAHAAAGQTRTSPSGYWNPAGADETVVLASSGRVVGLKKTLVFCTGEPFRGFRTNWVMHEYHLHDGPGCNVGGSSGATTPSSSSSSASSRRSQRKRVHSSTESNSWVICRVFESSCGSQVSFHDEGTELSCLDEVFLSLDDYDEVSLPNN

SEQ ID NO: 8648 - protein, 129 aa, Zea mays
  Clone ID: TF_700048290_FLI.pep
MSEVSVINQAEVEDAGAGQLDLPPGFRFHPTDEEIISHYLTHKALNHRFVSGVIGEVDLNKCEPWDLPGRAKMGEKEWYFFCHKDRKYPTGTRTNRATETGYWKATGKDKEIFRGRGVLVGMKKTLVFY

SEQ ID NO: 8649 - protein, 229 aa, Zea mays
  Clone ID: TF_ZmC175915_1.pep
MSSGGGGRVPAAAAAQSQELQLPPGFRFHPTDEELVVHYLCRRCAGLPISVPIIAEVDLYKHDPWQLPRMALYGEKEWYFFSPRDRKYPNGSRPNRAAGAGYWKATGADKPVGTPKPVAIKKALVFYAGKAPKGDKTNWIMHEYRLADVDRTARKKNNSLRLDDWVLCRIYNKKGALEKPTGAGGRAEASSQGALGSMSMGSPPEQKPSVNTSATATAAAADSARRTRN

SEQ ID NO: 8650 - protein, 81 aa, Zea mays
  Clone ID: TF_ZmC145568_1.pep
MNSMESCVPPGFRFHPTDEELVGYYLRKKVAAQKIDLHVIRDIDLYRIEPWDLQGHCGIGYEEQNEWYFFSYKDRKYPTGT

SEQ ID NO: 8651 - protein, 395 aa, Zea mays
  Clone ID: TF_ZmC3782_1.pep
MTMAATTTMMSAAAQAATSQLPPGFRFHPTDEELILHYLRNRAASAPCPVPIIADVDIYKFDPWDLPAKALYGDGEYYFFSPRDRKYPNGIRPNRAAGSGYWKATGTDKPIHDAATGEGVGVKKALVFYKGRPPRGSKTNWIMHEYRLAAVAGCTSPLAAYRPPSKFRNVSMRLDDWVLCRIYKKSGHASPMVPPLADYEHLDRDGPSPGGFFDDYFCGSTSLYAAAAPAIGGGAAAAGTTNTTTTPAVVMQQHQQPAALPRLPKIPSISELLWDEYALAQILDPPADVAADHASFAVHPSLNQLLAVGDDGSDLMMFSPPPAAAAGGKRKAMVAMNMSPADECAATAHQHQSPAAKRLNGGSCFDDAPQPASGLPATMSSVLGGGLNHHMLPQF

SEQ ID NO: 8652 - protein, 87 aa, Zea mays
  Clone ID: TF_LIB4759-100-A1-K1-D3.pep
MGGASGGDHPQQHGGGDDGHLQQGGGGDMVMPGFRFHPTEEELIDFYLRRRVEGKRFNIELINLVDLYRYDPWDLPGNHKPPLPLRM

SEQ ID NO: 8653 - protein, 104 aa, Zea mays
  Clone ID: TF_ZmC21253_4.pep
PSVREWYLYCLHDRKYPAVLRTNRATAAGYWKATGKDREVRNGRNGVLVGMKKRLVFYRGRAPRGQKKSWVMHEYRLDGIYAHHFLLVSTRLNLGITIHPWPLL

SEQ ID NO: 8654 - protein, 228 aa, Zea mays
  Clone ID: TF_ZmC7355_1.pep
MAAEGAPVLVRHAGGVEELRQLPPGFRFRPTDEELVVQYLRRKALGAPLPAAVIPVVRDLYSLDPWDAVDVPAAPDASSQGERYFFAVRPAGGVGSARRATASGRWRPAGKEKPVALPRPCGGGSLLVGVKRAMAFVPRRKKKKAAAAAALAIGWVMHEYRLAAPLHKHGCSLAQAQGEWVVCRVFQKGSGRPRRRRQRPVSPSPSSASSCVTDGSSSSSSDMDEVSS

SEQ ID NO: 8655 - protein, 103 aa, Zea mays
  Clone ID: TF_ZmC7355_3.pep
MSAERAPVLVRHGGGGVEALRQLPPGFRFRPTDEELVVQYLRCKAIGVPLPAAVIPVFRDLYSRDPWDVVAVSAPDTRSEGEKYFFAVRPASDGKSSGAGTGS

SEQ ID NO: 8656 - protein, 184 aa, Zea mays
  Clone ID: TF_ZmC545_18.pep
TLGIKKALVFYAGKAPRGVKTDWIMHEYRLADAGRAAAAKKGSLRLDDWVLCRLYNKKNEWEKMQLGKTAVAGVGATKEEAMDMATSHTHSHSQSHSHSHSWGETRTPESEIVDNDPFPELDSFPAFQDPAMMMTVPKEEQVDGCSAKSGNLFVDLSYDDIQGMYSGLDMLPPPGEDFYSSLFA

SEQ ID NO: 8657 - protein, 221 aa, Zea mays
  Clone ID: TF_ZmC1509_2.pep
MEQEPHRPMELPPGFRFHPTDEELITHYLARKAADARFAALAVAEADLNKCEPWDLPSLARMGEKEWYFFCLKDRKYPTGLRTNRATEAGYWKATGKDRDVFRGKALVGSKKTLVFYTGRAPRGEKSGWVMHEYRLHAKLHGHGHGQGAAVVVVPKAAGSKNEWVLCRVFKKSLVVGGAAAAAAPTAGKRGGTETSSNYKTGDVAAIAHLPPLMDVSGSGA

SEQ ID NO: 8658 - protein, 236 aa, Zea mays
  unsure (1)..(236): unsure at all Xaa locations
  Clone ID: TF_ZmC1509_3.pep
MEQEPHRPMELPPGFRFHPTDEELITHYLARKAADARFAALAVAEADLNKCEPWDLPSLARMGEKEWYFFCLKDRKYPTGLRTNRATEAGYWKATGKDRDVFRGKALVGSKKTLVFYTGRAPRGEKSGWVMHEYRLHAKLHGHGHGHGQGAAVVVVPKAAGTKNEWVLCRVFKKSLVVGGAAAAAAPTAGKRGGTETSSNSKTGDVAAISHLPPLMDVSGSXSXXPXAAAAAHVTC

SEQ ID NO: 8659 - protein, 220 aa, Zea mays
  Clone ID: TF_ZmC1509_4.pep
MEQEPHRPMELPPGFRFHPTDEELITHYLARKAADARFAALAVAEADLNKCEPWDLPSLARMGEKEWYFFCLKDRKYPTGLRTNRATEAGYWKATGKDRDVFRGKALVGSKKTLVFYTGRAPRGEKSGWVMHEYRLHAKLHGHGHGQGAAVVVVPKQAAGSKNEWVLCRVFKKSLAVGGAAAAPAAGKRGGTETSSNSKTGDVAAIAHLPPLMDVSGSGA

SEQ ID NO: 8660 - protein, 198 aa, Zea mays
  Clone ID: TF_ZmC1509_5.pep
MEQEPHRPMELPPGFRFHPTDEELITHYLARKAADARFAALAVAEADLNKCEPWDLPSLARMGEKEWYFFCLKDRKYPTGLRTNRATEAGYWKATGKDRDVFRGKALVGSKKTLVFYTGRAPRGEKSGWVMHEYRLHAKLHGHGHGQGAAVVVVPKAAGSKNEWVLCRVFKKSLVVGGAAAAAAPTAGKRGGTETSSN

SEQ ID NO: 8661 - protein, 211 aa, Zea mays
  Clone ID: TF_LIB4743-023-Q1-K1-B5.pep
MGGASDSNLLPPGFHFFPSDEELVVHFLRRKASLLPCQPDIVPTVCMNHHDPWELNGKALEAGSQWYFFSHAKQSRATPNGYWSSVCADETVLSGGGGCSVVVGLKKTLVFSTGEPSDGAETNWIMHEYHLLDGRTGGSSSSSSASSIHSSSKKSHHPNTEFSNWVICRVFDSTGGGSQANCHDDEGMELSCLDELFLSLDDYDEVSLSSN

SEQ ID NO: 8662 - protein, 164 aa, Zea mays
  Clone ID: TF_ZmC22900_1.pep
MGGASDSNLLPPGFHFFPSDEELVVHFLRRKASLLPCQPDIVPTVCMNHHDPWELNGKALEAGSQWYFFSHAKQSRATPNGYWSSVCADETVLSGGGGCSVVVGLKKTLVFSTGEPSDGAETNWIMHEYHLLDGRKGGSSSSSSTSSIHSSSKKSHHPNTVRSS

SEQ ID NO: 8663 - protein, 282 aa, Zea mays
  Clone ID: TF_ZmC1429_1.pep
MSSSISMMEARMPPGFRFHPRLDELVMDYLLQKLSGHGHHAGAAIVVDVDLNKCEPWDLPDSACVGGKEWYFFSLRDRKYATGQRTNRATHSGYWKATGKDRAVVVGGEVAVGMRKTLVFYRGRAPRGKKTEWVMHEFRLHPHAAPCLLAAAAPNKEDWVLCRVFYKSRTTSPRPESEDARDGTPSAEPQLPAALPLAPLADTYAAPTVAEQVYCFSGLPALPFRRPVSLGDLLEFDASEKESVTTAMTSVSNNTSSVLELAPNCNWNQENGMSRMWSPLGI

SEQ ID NO: 8664 - protein, 689 aa, Zea mays
  Clone ID: TF_ZmC26324_1.pep
MAPVSLPPGFRFHPTDEELIICYLKRKINGRQIELEIIPEVDLYKCEPWDLPEKSFLPSKDLEWYFFSPRDRKYPNGSRTNRATKSGYWKATGKDRKVNSHRRAVGMKKTLVYYRGRAPHGSRTDWVMHEYRLDERECETDTGLQDAYALCRVFKKTAPGPKIIEHYGAVHHPIEQTQWMGSSVERSPTLDLSSDVRGDDFDSSSFSFPTEAPMDSSMHGGLFGMQMSAPHEDAKWMQFLSEDAFNATNPFFTNPASSSFSCLPSKVDVALECARLQHRLSLPPLEVEDFPHDVSLDTKASVLRSSNPNNEVDILQEFLSVASASQELINGTSSSYAAEMWAGAGTSSTSGTHYVNELSSLFEFGVKAKEEADNFYHMDCIGTSAGFSPKPVRVDEPVRLVEIADMEEFKEEKRRVENLRGVRLHNNDDLGEIPTDCCITQYPISDTADISGEAGHLTNPTSAGGLDTAPIFSQSQPDDFAIGFSDDADPNASFDLCERVDVKHGLFVSTVGAPKTFFHHVEPSKKVSFHLNNNPVASDDDVSKATGKSRSPIISVMTTKDSGSSFSVFSKLKALIRDKFLVKKLPSSCQRSLLGSKETAAVSELLQMVVSSLLLTPTEVTGPTTMTTEQEELARKAMKPGPRRCDGSHAWLLPLPKRSKGISSMFFSGKWAFLTSALAIRAPGPGCNH

SEQ ID NO: 8665 - protein, 71 aa, Zea mays
  unsure (1)..(71): unsure at all Xaa locations
  Clone ID: TF_13150961.pep
XHERLKSSLFLXFASSXFWXGXSQLFSSNXRVLPCLXXXQXGTSCXERKRNATCCPRLEDXTLKVNPMVHA

SEQ ID NO: 8666 - protein, 458 aa, Zea mays
  unsure (1)..(458): unsure at all Xaa locations
  Clone ID: TF_ZmC151_2.pep
MAQTSLPPGFRFHPTDVELVSYYLKRKIMGKKLIVDAISEVDLYKFPPXDLPEMSSPSKPPMPSIFDVFPPQWDLEWFFFCPRDKKYPNGSRTNRATPNGYWKTSGKDRIIMLNSRTVGMKKTLIFHEGKAPKGDRTDWVMYEYRMEDEDLVSAGFSKDAYVLCKIFKKSGLGPRIGEQYGAPFNEDEWDNAEVETSLFPLTCSEVNPTEGQRAQPTVLAGALLEPEPPLHNSSSTCAGEESSFGHATAEDLTFSHSVASSAIQDTPARMSGDGVVSVNNISNVANDMRSPRDCDEFLSELSRFMNDSPLRNTPLGECSGLPPMSEAEAHAFEVNSFGLYNELSELVGLGCADNNLNTSNVETTDYLMLPPDRELSANDYMELNDLLAPDPSFPSEFSAQDNQYMQHPLAQYNGHYDLSGPSEPTMPSIFDVFPPNNGVLLTDDPANYLDPAMQFPFS

SEQ ID NO: 8667 - protein, 96 aa, Zea mays
  unsure (1)..(96): unsure at all Xaa locations
  Clone ID: TF_LIB4301-007-Q1-K1-B2.pep
MECGGALQLPPGFRFHPTDDELVMYYLCRKCGGLPLAAPVIAEVDLYKFNPWDLPERAMGGEKEWXXFSXXDREYPNGQXANRAXGTGXWKXTGAD

SEQ ID NO: 8668 - protein, 89 aa, Zea mays
  Clone ID: TF_LIB5116-032-A1-PF1-G7.pep
MEEIRSDDMEKQDEVMLPGFRFHPTDEELVRFYLKRKIQQKSLPIELIRQLDIYKFDPWDLPKLASTGEKEWYFYCPRDRKYRNSTRPN

SEQ ID NO: 8669 - protein, 282 aa, Zea mays
  Clone ID: TF_ZmC232_1.pep
MEGRRPGAPVAGLPIGFRFRPTDEELLLHYLRRKALACPLPAGVISDADLARLHPWDLLPAAAAAPGTVPLHHTPPRIAARVPYLTSTRDRIGSNPAGGSGADADGERFFFHRPATRCWRKGGGAARAAGTGVWRPSGKETLVLSPRCKRPVGTKRTLVFCPRRGRARTHWAMHEYRLLPAGLHPYGCAAGAGANAPPPTNVSSHGGDAAADWVVCRIFRRARPAHRARLGGGAREELEEEHAAEESPSSPSSCVTDASETLDQEEDDGDEGSSSSTVASSN

SEQ ID NO: 8670 - protein, 200 aa, Zea mays
  unsure (1)..(200): unsure at all Xaa locations
  Clone ID: TF_LIB3592-100-Q1-K6-E5.pep
LLCFGATHCAVCTASQLQQSPARLSAASPAPAGMDRPAQAPTQLPPGFRFHPTDEELVVLYLRRKALARPLPAAVIPVVHDVARLDPWDVTGAYYAVRVICGSIQSFPDCLVXLNRAGASEGEGYFFSLRRAPATGRRRRAGSGYWKATGKEKPVFLQCGGEQRQLLVGVKTALAFHXREPPXXSSRTGWVMHEYRLAVP

SEQ ID NO: 8671 - protein, 202 aa, Zea mays
  Clone ID: TF_ZmC99_3.pep
LAGFGEQERYFFTCKEAKYVKGRRANRATGAGYWKATGKEKPVAVAVRGVQGQSQSQSQAVLVGMKRSLVFYRGKPPTGSKTEWVMHEYRLAGAGLAPCRRRHADADGDGVARAPAEGWVLCRVFRKKGSAAVARRPGDRSDGEGDESACGGGGGGGRGFIDFFARADAAGRRRRAPSPAVSSRWLADASPQPEQEATSRGP

SEQ ID NO: 8672 - protein, 160 aa, Zea mays
  Clone ID: TF_ZmC175915_2.pep
LALYLLLTPDLGTTAVCAGMALYGEKEWYFFSPRDRKYPNGSRPNRAAGAGYWKATGADKPVGTPKPVAIKKALVFYAGKAPKGDKTNWIMHEYRLADVDRTARKKNNSLRVRCDRSSSGRRVHQNISFVSVQKIISCSYILLFVNNIYLLSLPYQQRKS

SEQ ID NO: 8673 - protein, 109 aa, Zea mays
  Clone ID: TF_ZmC545_19.pep
MGLPMRRERDAEAELNLPPGFRFHPTDDELVEHYLCRKAAGQRLPVPIIAEVDLYRFDPWDLPERALFGAREWYFFTPRDRKYPNGSRPNRAAGNGYWKATGADKPVAP

SEQ ID NO: 8674 - protein, 143 aa, Zea mays
  Clone ID: TF_ZmC2195_14.pep
METLRDMALPPGFGFHPKDTELVAHYLKKKILGQKIEYDIIPEVDIYKHEPWDLPAKCNVPTQDNKWHFFAARDRKYPNGARSNRATVAGYWKSTGKDRAIKVDKRTIGTKKTLVFHEGRPPTGKRTEWIMHEYYIDENECQS

SEQ ID NO: 8675 - protein, 144 aa, Zea mays
  Clone ID: TF_LIB4741-044-R1-K1-H12.pep
MSEVSVINQAEVEDAGAGQLMDLPPGFRFHPTDEEIISHYLTHKALDHRFVSGVIGEVDLNRIEPWDLPGRAKMGEKEWYFFCHKDRKYPTGTRTNRATETGYWKATGKDKEIFRGRGVLVGMKKTLVFYRGRAPRGEKTGWVM

SEQ ID NO: 8676 - protein, 216 aa, Zea mays
  Clone ID: TF_ZmC13043_3.pep
MTHPSSPSSSAPPPPPAAAAAAAAAEATSLAPGFRFHPTDEELVSYYLKRKVLGRPLKVDAIAEVDLYKLEPWDLPPRSRLRSRDSQWYFFSRLDRKHANRARTNRATSGGYWKTTGKDREVRHGPRVVGMKKTLVFHAGRAPKGERTNWVMHEYRLEGDAAVEIPQDSFVVCRIFQKAGPGPQNGAQYGAPFVEEEWGGDDAVGLLPVGDAAVDP

SEQ ID NO: 8677 - protein, 102 aa, Zea mays
  unsure (1)..(102): unsure at all Xaa locations
  Clone ID: TF_LIB3595-041-Q1-N6-B1.pep
WYLYQHKDKKDPTGTQSNRAIDAWFWKGTAXSKHIYASTXRGAVCLMNTLVYYNGRASFGHXXDWIMHHYRLHQGCQRTLVYPAVMLHAGLHLKMEPSCMTL

SEQ ID NO: 8678 - protein, 175 aa, Zea mays
  Clone ID: TF_LIB5116-070-A1-PF1-B2.pep
MVESVAASPSEEQGRGGGLSLPPGFRFHPTDEEIITSYLLREFLDPSFVSRAVGEVDLNSCEPRDLPGKANKGEKEWYFFVHKDLKYPTGSRANRATKEGYWKATGKDREIFKPRARELVGMKKTLVFYTGRAPRGAKSEWVMHEFRLEGKSRGQTMNNPKDEWVVCKVFNKKGE

SEQ ID NO: 8679 - protein, 197 aa, Zea mays
  unsure (1)..(197): unsure at all Xaa locations
  Clone ID: TF_ZmC5878_1.pep
MSEVSVINQAEVEDAGAGQLMDLPPGFRFHPTDEEIISHYLTHKALDHRFVSGVIGEVDLNRIEPWDLPGRAKMGEKEWYFFCHKDRKYPTGTRTNRATETGYWKATGKDKEIFRGRGVLVGMKKTLVFYRGRAPRGEKTGWVMHEFRLEGRLPQPLPRSAKDEWAVVQVFNKELXAARSEPLRGRRGTRARGLAGL

SEQ ID NO: 8680 - protein, 164 aa, Zea mays
  unsure (1)..(164): unsure at all Xaa locations
  Clone ID: TF_ZmC3395_2.pep
MEARPGAWRLQQRGPGAPVAGLPIGFRFRPTDEELLLHYLRRKALACPLPAGVIPDADLARLDPSDLLLPAAAPPAGGAADDASGEHFFFHRPATRCWRRGGGAARAAGAGVWRPSGKETVVVSPRCKRPVGTKRTLVFCPRRRGGGGARTDWVMHEYXLLPAG

SEQ ID NO: 8681 - protein, 320 aa, Zea mays
  Clone ID: TF_ZmC16864_1.pep
MDQAAEESCVPPGFRFHPTEEELVGYYLARKVASQRIDLDIIQEVDLYRIEPWDLQERCKPQHAGGGHDEQTQEWYFFSYKDRKYPSGTRTNRATAAGFWKATGRDKPVLSSSTRTTRCSRVIGMRKTLVFYKGRAPNGRKSDWIMHEYRLQSNEHAPAQEEGWVVCRAFQKPIPNQRPFFPTSYAGYYDHNLSTTARLHVDGDRHFLAGSSAAAAALLQQPPGLAGSSFPQLYSDDDLESKKQLLSIPPLESPTAMACCSDAGGYAQRSSYDEHEMMMMMIQQGGGGGEQAAAAIDWNFLDSLLSATSQLHGPSGSLLQ

SEQ ID NO: 8682 - protein, 184 aa, Zea mays
  unsure (1)..(184): unsure at all Xaa locations
  Clone ID: TF_ZmC593119_1.pep
MMESSGGSGSSDPLLLAPGFRFYPTEEELLTFYLRHRLAGTKPVVEHLIPVMDIYGYHPSELQAMAGAANVCDTEQWFFFCPRAERELHGGRPARTTPSGYWKATGSPSYVYSSSPNNRVIGEKRTMVFYQGRAPTGNRTRWKMNEYKAVADMCAAAARXPVMLRNDFSVCRVYISTGTLRSFD

SEQ ID NO: 8683 - protein, 100 aa, Zea mays
  Clone ID: TF_jC-zmX700098954b1.pep
HKDRGDLKGMRGITATGSGYWKATGKNKEIFHGRRTSRVLVRKKKTLSLYTGHAPSGGKTMWEMHECRLEGSLSPNLHRGDKDEWADCEVINKDSAAKVG

SEQ ID NO: 8684 - protein, 132 aa, Zea mays
  Clone ID: TF_ZmC232_4.pep
MEGRRPGAPVAGLPIGFRFRPTDEELLLHYLRRKALACPLPAGVIPDADLARLHPWDLLPAAAPGGSGADADGERFFFHRPATQCWRKGGGAARAAGTGVWRPSGKETLVLSPRCKRPVGTKRTLVFCPRPA

SEQ ID NO: 8685 - protein, 356 aa, Zea mays
  Clone ID: TF_ZmC566_1.pep
MARPPSAALKPPYPAFQSHPSDLELVNFYLRPWVETGVKTGAFIHDADVYAADPNYLTRQFAPAVAQDGERAWYFYTPLRHKSVHGTRKTRTVATGGGCWHNEAKARPVYMVSNGMHQIAHRQSFSFVEKDGGVRVRTGWLMMELRLVEDGAAGQKPEEDGALGSRVLCKVYRSPRNPEPSGIEAATAPGQKAEADDDESCDDESSDATLDDDDSSNASLAAASGPKRESDEVESSDATVAAPSRHSAPNDEISGRSAVAPGRKEKTEIGEVSTETSAAVRKRRKADGSSSPGTPVSTTDMHCPQCGTHLMLTLNMAESKSETGLAKDESATAAPDQGGTGESSQKDVRVRFHQFL

SEQ ID NO: 8686 - protein, 275 aa, Zea mays
  unsure (1)..(275): unsure at all Xaa locations
  Clone ID: TF_ZmC151182_1.pep
MDAFTHVPPXFRFHPTDEELXDYYLRKKXXLKKIDLDVIKDVDLXKIEXWDLQEKCRIGSEEQNEWYFFSHKDKKYPTXTRTNRATTXGFWKATGRDKXIYVKNCLXGMRKTLVFYKGRAPNGQKSDWIMHEYRLETNNNGIPHEEGWVVCRVFRKRLATVQRMVGDSPYWFNDHAGFMAPELGSPRQAAHHQQNVMMYHRQQSSYSYPCKVELEYHHLLPQEHFLQQLPQLESPKLPDLIGQVDTTLQPACGLTQEHGAPRYTLQELQAEPLYL

SEQ ID NO: 8687 - protein, 165 aa, Zea mays
  Clone ID: TF_LIB5117-066-A1-PF1-B2.pep
MEHSEQEQHAMDLPPGFRFHPTDEELITHYLAKKVADARFAALAVSVADLNKCEPWDLPSLARMGEKEWYFFCLKDRKYPTGLRTNRATESGYWKATGKDKDIFRGKALVGMKKTLVFYTGRAPKGDKSGWVMHEYRLNAKLHAARTRRGSLSGGQAGVGPPTSG

SEQ ID NO: 8688 - protein, 94 aa, Zea mays
  Clone ID: TF_LIB3245-008-P1-F12.pep
MVMAPAAAQQQRRRDADAELNLPPGFRFHPTDEELVAHYLFARASGRPPPVSIIAEVDLYRFDPWDLPERALFGRREWYFFTPRDRKYPNGSRP

SEQ ID NO: 8689 - protein, 118 aa, Zea mays
  Clone ID: TF_LIB3061-086-Q1-K6-B4.pep
PRVRPRVRPRVRKEWYFFYQKDRKYPTGLRANRATEAGYWKATGKDKEVYNAAEGVAVLVGMKKTLVFYRGRAPRGDKTNWVMHEYRLEGQRQAPRRPRVRNRLNRRQRRGGLESFCL

SEQ ID NO: 8690 - protein, 300 aa, Zea mays
  Clone ID: TF_ZmC545_7.pep
MVAMAAVQQQQQQQRRDAEAELNLPPGFRFHPTDEELVAHYLCARAAGRRPPVSIIAEVDLYRFDPWDLPERALFGRREWYFFTPRDRKYPNGSRPNRAAGSGYWKATGADKPVEHEGRTAGIKKALVFYHGKPPRGVKTEWIMHEYRLAEAGGARAKKSGAGTLRLDDWVLCRLYNKKNEWEKMQQQKEKEKKAMESEASLSHSHSDTRTPESEIDDDPFPELGSLPAFDDMGAAPAPAGVVLPKEEVEDFGDLGGDDWLAGINLDDLQMPGDAADFYGSMLVSPMAAKMEPDGGFPFF

SEQ ID NO: 8691 - protein, 665 aa, Zea mays
  Clone ID: TF_ZmC13043_1.pep
MNHPSSSSSSAQPPPAPAAAAEATSLAPGFRFHPTDEELVSYYLKRKVLGRPLKVDAIADVDLYKLEPWDLPARSRLRSRDSQWYFFSRLDRKHANRARTNRATSGGYWKTTGKDREVRHGPRLVGMKKTLVFHAGRAPKGERTNWVMHEYRLEGDDAAGIPQDSFVVCRIFQKAGPGPQNGAQYGAPFVEEEWEEDDTDDGLLPVEGVAAADPEVPLASVEIPGALDRGYLQMSDLIQGLDDQNGNGTPSLPVSDTSNNSNHSEDVDGNSGDILSDPNLGSNFLQCVEPGEQNSLMLNGTIISNANAGDFFDNSSHSDGFLELKDFADAANLDFPLGNGSSIWPLDGWAWKTPDSAESVNGANDEIPPLPDDQTFQPDELEQLLQSIQEDSHLGSSIIDPPHSSMTNSVLPDEDCLMFYDAPFDSTMCDDGFAQNGILGSAATNLSGIGMVDDGMPYFDAMDGNLFNDILGSIQQPDGSSSHAFNGPVLTQEVNNTMFTYSPTQKVLEPNILVGAPSSARLPEAGSQLNCVVLPDGQAKSSTIGKGFVRILDSISAPPAFAGEFPAIHRKSLAHISGGRPNTLHVSAEVIRVGSLAVPSGADKWALQKDQGMELVFSADFEPDARIHCGCNTITAVLRGGFCLFFVSAIMLLVSYEVGMCIYGK

SEQ ID NO: 8692 - protein, 301 aa, Zea mays
  Clone ID: TF_ZmC24820_1.pep
SLEATTMHGRQRKAHLDLKLKSAGIGADAQLRACLDIVHHQVAVCLARHRPQPDGAELDADGHAGPHGERHEPGRPLLQQLRRDGAVEPRLPRERDARVHGGAVALVQRREGAAAQHGAVEGRRHVAAVVVDPDAAVRVVGRHVHVERVGHRGRRAVHVEAGHRQAVHVERRDLGPEHQVQDPRGGAQRNGEQNEGEDGVAHAPAAAAALAPRRRGRGRGRRRRGRGCHRQLVVAGFLAAPRRLLRRRGRRRRRARAHWVDPVVVCHARIVRVHALLSNPRRARSCTKNARTQAAAARLDR

SEQ ID NO: 8693 - protein, 263 aa, Zea mays
  unsure (1)..(263): unsure at all Xaa locations
  Clone ID: TF_ZmC58420_1.pep
MELPPGFRFHPTDEELITHYLARKAADPRFAPRAVGEADLNKCEPWDLPSRATMGDKEWYFFCVKDRKYPTGLKANRATESGYWKATGKDREIFRGKALVGMKKTLVFYTGRAPRGGKTGWVMHEYRLQGKHAAASSSSSLVPSSVSCGASSQQDEWVLCRVFKKSIEPPSVPGSKRSSSVACMGTEGTGVGVGPSSMSTEDDFAACAALPPLMDVSGGSGANMSLSAAAAAAFIEVTPPAGAAPAPHVTCFSXAPLEGQFLN

SEQ ID NO: 8694 - protein, 373 aa, Zea mays
  Clone ID: TF_ZmC1367_1.pep
MVMANPDMLPPGFRFHPTDEELILHYLRNRAANAPCPVAIIADVDIYKFDPWDLPSRAAYGDKEWYFFSPRDRKYPNGIRPNRAAGSGYWKATGTDKPIHSSTTAGESVGVKKALVFYEGRPPKGTKTNWIMHEYRLAADAQAAHAYRPMKFRNASMRLDDWVLCRIYKKASCQVPAMAAVPQLSDHDQDEHCGFDDNPYAAMLLQGASYSYPAPPHAAAGAQRMPRIPSLTELFNDPSLAHFFEEGGGMQDMARLSNPQQQQQHAPLLGRAVTSQQLLLNNGHSMPGGGQAQMDPHPPAAAASTSSAAAGNNKRKRSSTTTDAGALSSSQASEAKKPNGSCFGATFQIGNGLQGPSLGHHHMPLHSNMGTMN

SEQ ID NO: 8695 - protein, 171 aa, Zea mays
  Clone ID: TF_ZmC13898_3.pep
MLQQSPARLSAASPAPAGMDRPAQAPTQLPPGFRFHPTDEELVVLYLRRKALARPLPAAVIPVVHDVARLDPWDVTGASEGEGYFFSLRRAPATGRRRRAESGYWKATGKEKPGFLQSGGVGGEHRQLLVGVKTELCFHRREAPASSRTGWIMHEYRLDVPRGVADQRKKM

SEQ ID NO: 8696 - protein, 129 aa, Zea mays
  unsure (1)..(129): unsure at all Xaa locations
  Clone ID: TF_LIB3060-026-Q1-K1-A3.pep
SGLRRTLELYRYDPWELPSMAAIGEKEGXFYVPRDRKYRNGDRPNRVTASGYWKATGADRTIKADNSXPIGLKKTLVFYSGKAPKGXRSSWIMNEYRLPPDDTDRYHKTEISFCRVYKRTGIDNGGHGH

SEQ ID NO: 8697 - protein, 517 aa, Zea mays
  Clone ID: TF_ZmC2195_3.pep
MEVLRDMHLPPGFGFHPSDIELVSHYLKRKILGQKIEYDLIPEVDIYKHEPWDLPAKCNLPIKDNKWHFFASRDRKYPTGSRSNRATLAGYWKSTGKDRAIKLNKLTLGTKKTLVFHEGRPPSGRRTEWIMHEYYIDENGCKVSPDMKDAFVLCRVTKRNDWSLDNDNEVGNRSSHLEQPDAATSVVSTVKPEDVAASVICPEESNHATTPIGSAELSNDVAQAAITPAAITPDSTTPNGGNELETWLQELLDPSPPFNLVADTGSADVCPTEQYAESSNLQNPGSMAPNIRPGHASPIQDGTDATDYLFTDDLPEDLYSMLYPGTDQFNDSIFLEQTGQEGNNNQTNYMMGIGSYVLPNNFENETPNAELQLDHENNKMDMSNENIDTGITIRRRRATAPPANISLAAGKIKMQVGIKRMVTSNSESINQTMKFTDNSGRRLDLRTDVEHQKKNANNVISAKQSDAANHEAHSNQGYLEGFKRCSSAGFRAYIFVALFVVGVAALVLHYHRSNANL

SEQ ID NO: 8698 - protein, 472 aa, Zea mays
  Clone ID: TF_ZmC24893_1.pep
MGSWQQGELQGAAMDGAAAAATGSGGGHRVVGSRNEEHGKYLSESSCCPRCGHKLDPKLDWLGLPAGVKFDPTDQELIEHLQAKVWPASAAAPSHPLIDEFIPTIEGEDGICYTHPERLPGLTKDGLSRHFFHRPSKAYTTGTRKRRKIQPPVADASSSSALPAQQQHQQQQRSETRWHKTGKTRPVVVAGRQRGCKKILVLYTNFGKNRKPDKTNWVMHQYHLGDKEEEREGELVVSKIFYQTQPRQCGVAAEPAATAASSDTVEEAADPPAPEGLVVPPPPDVAGAFQGAAGIDEFSFAQFRSSFEEVDVGASVQVSMRDEEEMHAAHLNLHQDHNLHRNQFGNQEHRRRMAATAAAFHINTPVEPITTMITSSPVVHGSAILQHPEAYGHGSSTYCHHQHQMEEDEQLHQQPQNFDGRRSTSGLEEVIMGCSSRRSKRAEASGPGGNKESRGWQYPSFWPSGSQQDHHG

SEQ ID NO: 8699 - protein, 112 aa, Zea mays
  Clone ID: TF_LIB5115-005-B2-PF1-D6.pep
MDAIRSDDIEKQDEVMLPGFRFHPTDEELVRFYLKRKIQQKSLPIELIRQLDIYKYDPWDLPKLASTGEKEWYFYCPRDRKYRNSTRPNRVTGAGFWKATGTDRPIYSSDGS

SEQ ID NO: 8700 - protein, 356 aa, Zea mays
  Clone ID: TF_ZmC345_1.pep
MDTFSHVPPGFRFHPTDEELVDYYLRNKVASNKIDLDVIKDVDLYKIEPWDLQEKCKIGTEEQNEWYFFSHKDKKYPTGTRTNRATTAGFWKATGRDKPIYTKSCLVGMRKTLVFYRGRAPNGHKSDWIMHEYRLETTENVTAAPEEGWVVCRVFIKKRVEAVRRMADGAPPWFDGHVPGGFMAPAGLGSPRQLMHHHPNPAAAAPLLYSGQQLYHCKPELEYHHLLQPSQEALLQQLPQLVESPKPPPPAFIDQGSCSLQSPDEASGYNTTPQQPPPMTTEAAYMDDDSVTDWRVLDKFVASQLFSHGDGMAKEDGYPNPGQALFQAENKQPEEALDYASTSASGGGGGEANMWK

SEQ ID NO: 8701 - protein, 160 aa, Zea mays
  Clone ID: TF_ZmC58420_2.pep
MEHDVHHQHQQAMELPPGFRFHPTDEELITHYLARKAADARFAPRAVGEADLNKCEPWDLPSRATMGEKEWYFFCVKYRKYPTGLRTNRATESGYWKATGKDREIFRSKALVGMKKTLVFYTGRAPRGGKTGWVMHEYRLHGKHASSSRLMPSSVRAGAS

SEQ ID NO: 8702 - protein, 225 aa, Zea mays
  Clone ID: TF_ZmC218_42.pep
METPPRGRWPPGFRFSPTDEELVLYFLKRRIASGRPCPYVADVEVYKSHPSHLPERSALQTGDRQWFFFSRMDRKYPNGSRASRTTGDGYWKATGKDRFICGGGRAVGNKKTLVYHHGRAPRGERTDWVMHEYTLLADALPPAAQGREFYALYKLFQKSGAGPKNGEQYGAPFREEDWLDDDDERVIAGAAANPVPNTNSPPSTMEEHAITDRELPIEGLDQPLS

SEQ ID NO: 8703 - protein, 475 aa, Zea mays
  Clone ID: TF_ZmC151_3.pep
FEIVSYYLKRNMGKKLIVDAISEVDLYKFPPWDLPEKSSLRSKDLEWFFFCPCDKKYPNGSRTNRATPNGYWKTSGKDRIIMLNSRTVGMKKTLIFHEGKPPKGDRTDWVMYEYKMEDEYLVSTGFSKDTYVLCKIFKKSGLGPRIGEQYGAPFDEAEWDNAEAETSIFPLMTSSEVVNPTEGPHTQPVAPAGALQEPLHNSSATCVVEGSPFDHATANTCAEGVTFGYTVASSAIEDMPAQLSGDGVVSMNNISSEVNDMYSPHDCDEFLLEEMSRFLNDPPMRNTPYGECSGLPPMSEAEAHAFEVNSFDLYKELSGLIELGGMDNNFNTSNVETTDYLVLPPDRELSTDGYMELNDLLASDSSFPIPVNFLLRTINLCSILWLSTMCIMMSLLCQVLWNQQCLAFSTIFLPIMDPMSQMRKTTTWTRPSLSRDWSNNMPALFCVLTCLDCSDVATCSSLLLQLYPPWMSRYC

SEQ ID NO: 8704 - protein, 218 aa, Zea mays
  Clone ID: TF_ZmC1229_1.pep
APRGEKTGWVMHEFRLEGRLPQPLPRSAKDEWAVCKVFNKELQAARSEPLLAAAGAAELERVGSLGFLNELLDSAELPALVGADVDEVIDFKGPAPASVPDASYLPVKMEEHALLQMQQCQYQPPPPMFYPSQYFSLPAMNSGHLPPAIRRYCKAEQQVVSAQTASVISPSRETGLSTDPNAAGGYAEISSAATPSSSHQFLPELDDPALNLADLWKY

SEQ ID NO: 8705 - protein, 262 aa, Zea mays
  Clone ID: TF_UC-ZMFLMO17336E02_FLI.pep
MEVKKEATKATLPPGFRFRPTDEELIVHYLRRRALASPLPAAVDIPDVRILAHDPSDLLPPGFGEQERYFFTCKEAKYVKGRRANRATGAGYWKATGKEKPVAVAVHRGVQGQSQGQAVLVGMKRSLVFYRGKPPTGSKTEWVMHEYRLAGAGLAPCRRRHADADADADAVARAPAEGWVLCRVFRKKGSAAAAAVARRPGDRSDGEGDESAGGGGGRGFIDFFARADAAGRRRRAPSPAVSSRWLADASPQPEQEATSRGP

SEQ ID NO: 8706 - protein, 159 aa, Zea mays
  Clone ID: TF_LIB3960-012-Q1-N6-H1.pep
APCPAPVIAEVDIYKFDPWDLPAKAVFGEAEWYFFSPRDRKYPNGVRPNRAAGSGYWKATGTDKPITLSSSSSAAAAAGMIGVKKALVFYRGRPPKGVKTSWIMHEYRLAEALHAVVNAYRPTRFKNNASSSMRLDDWVLCRIYKKTTPQLAYSMSAAA

SEQ ID NO: 8707 - protein, 74 aa, Zea mays
  Clone ID: TF_cC-zmpo148030h05a1.pep
MENPVGLRFPPTDKDIVFYYLRPKNSDRDTSHVDRVISTVTIRSFDPWELPCKCFYEFSSSTIGYFLSLGFFSL

SEQ ID NO: 8708 - protein, 151 aa, Zea mays
  Clone ID: TF_ZmC119_1404.pep
ARNRATKSGYWKATDKDHVIHTPCSWPAAAAGHHRTVVGMYKTLVFYRGRAPNGVKTSWVMHEFRMENPHTPPKEDWVLCRVFYKKKADAMDYADCSDQDAIAVHMACGSADPRGAAVAASDRGGRQQGGGEAPTATARGGRPRDGVATRG

SEQ ID NO: 8709 - protein, 161 aa, Zea mays
  Clone ID: TF_ZmC2195_10.pep
MEVLRDMHLPPGFGFHPSDTELVSHYLKRKILGQKIEYDLIPEVDINKHEPWDLPAKCNLPIEDNKWHFFASRDRKYPTGSRSNRATLAGYWKSTGKDRAIKLKKRTLGTKKTLVFHEGRPPSGRRTEWIMHEYYIDENECKVSPDMKDAFVLCRVTKRSD

SEQ ID NO: 8710 - protein, 99 aa, Zea mays
  unsure (1)..(99): unsure at all Xaa locations
  Clone ID: TF_ZmC1343_1.pep
ADRPALLHRNISRGPGESTKNPSADHSTAACSIWTLPTDSVRLSATEPGFRFDPTDEELVVHYLKKKAAIIXLYKFDPWELPCKYPVIYNHAKNSEIVV

SEQ ID NO: 8711 - protein, 276 aa, Zea mays
  unsure (1)..(276): unsure at all Xaa locations
  Clone ID: TF_ZmC198_15.pep
PPPPPTPTPTPGPPSGGGVASIITEDLFERMLKHRNEPDCKARGFYTYDAFITAADAFRGFGTTGSTEVQKRELAAFLGQTGHETTGGWPNAPDGAFTWGYCYKEENGATADYCDMTGEYAQWPCVAGKKYFGRGPIQLSYNYNYGPAGEDATIAQDLLSNPELVASDAXSISFKTAIWFWMTAQPPKPSCHDVATEQWTPSAADKAAGRLPGYGVITNIINGIECGKGYNEKVANRTFFYTSYCDILGISYGDNLDCYNQRPFNSAXPCWNRCSR

SEQ ID NO: 8712 - protein, 225 aa, Zea mays
  Clone ID: TF_ZmC586250_1.pep
MTVMELKALPLGFRFHPTDEELVRHYLKGKITGQIKNEVEVIPEIDVCKCEPWDLPDKALIRSEDPEWFFFAPKDRKYPNGSRSNRATEAGYWKATGKDRVIKSKGEKKKQHMIGMKKTLVFHRGRAPKGERTGWIMHEYRTTEPEFESGEQGGYVLYRLFQKQLEKTERSIPEEMDRSGYSPTPSRSTPDNMEANEEAITLINKESPESGLHGCPIELPGTIDT

SEQ ID NO: 8713 - protein, 173 aa, Zea mays
  unsure (1)..(173): unsure at all Xaa locations
  Clone ID: TF_ZmC3395_1.pep
MEARPGAWRLQQRGPGAPVAGLPIGFRFRPTDEELLLHYLRRKALACPLPAGVIPDADLARLDPSDLLLPAAAPPAGGAADDASGEHFFFHRPATRCWHEVRLGRRRVGGAAXRWRPSGKETVVVSPRCKRPVGTKRTLVFCPRRRGGGGARTDWVMHEYRLLPAVEVEAGGE

SEQ ID NO: 8714 - protein, 303 aa, Zea mays
  Clone ID: TF_ZmC545_8.pep
MVMAPAAAQQQRRRDAEAELNLPPGFRFHPTDEELVAHYLCARAAGRRPPVSIIAEVDLYRFDPWDLPERALFGRREWYFFTPRDRKYPNGSRPNRAAGSGYWKATGADKPVEHGGRTVGVKKALVFYHGKPPRGVKTEWIMHEYRLADAGARARARKPGTGTLRLDDWVLCRLYNKKNEWEKTQQQQEKKQNQKQMESEASLSHSHSDTRTPESEIDDDPFPELASLPALDDMMGPAAAAPAGAILPKEEVEDLGGLGGDDWLAGINLDDLQIPGEADFYGSMLVSPMAAKMEQDAAGFPFF

SEQ ID NO: 8715 - protein, 356 aa, Zea mays
  Clone ID: TF_ZmC227_1.pep
MAADQQPQLQEEMNDAAGGGLRLPPGFRFHPSDFEIVSFYLTNKVLNTRFTCTAITEADLNKIEPWDLPSKAKMGEKEWYFFYQKDRKYPTGLRANRATEAGYWKATGKDKEVYNAAEGVAVLVGMKKTLVFYRGRAPRGDKTNWVMHEYRLEGSGRLPAGLASATGSAAANAAAALKASAYKDEWVVCRVFHKTTGIKKTTTAAPAYQVAMAGAEMDQNQNNIPFPMPMQFSMLPDFSLDPVPPYYPYPNAGAGMPMLPMAAGIGGGAGGLHLNGAALFGNPMAAPQPMSFYHQMGTGTACAGGFDVSAPESRPSSMVSQKDDQANGAEISSMMSVAGPGPATTTTIEMDGVWKY

SEQ ID NO: 8716 - protein, 68 aa, Zea mays
  Clone ID: TF_LIB4738-084-R1-K1-H3.pep
MEHDVHHQQDMELPPGFRFHPTDEELITHYLARKAVDARFAPRAVGEADLNNREPWHLPSRAPMGEKE

SEQ ID NO: 8717 - protein, 58 aa, Zea mays
  Clone ID: TF_ZmC124792_1.pep
MNDASGGGLKLASGFRFHPSDFEIVRFYLNNKVLNTRFNWTGITEGDLNKIEPLDLPS

SEQ ID NO: 8718 - protein, 167 aa, Zea mays
  Clone ID: TF_LIB4759-009-R1-K1-A10.pep
LLEWPSRRLLASCIKSIHDIYTSDIDRTPDRLSWQVERSTMVAKVKRDGEVLVAAATGDSEEQDDLVLPGFRFHPTDEELVSFYLRRKVARKPLSMEIIKEMDIYKHDPWDLPKASTVGGEKEWYFFCLRGRKYRNSIRPNRVTGSGFWKATGIDRPIYPAAAGESG

SEQ ID NO: 8719 - protein, 356 aa, Zea mays
  unsure (1)..(356): unsure at all Xaa locations
  Clone ID: TF_ZmC750_1.pep
MHPGGGPLSVPPGFRFHPTDEELLYYYLRKKVAYEPIDLDVIREIDLNKLEPWDLKERCKIGTGPQNDWYFFSHKDKKYPTGTRTNRATTAGFWKATGRDKAIFLGSARRIGLRKTLVFYIGRAPHGKKTDWIMHEYRLDQENVEIQEDGWVVCRVFKKKSYEQRGHDVAEMVALDDEELQPFTVPVPXGTSSLPTTDHKNNPHLMQYDFPSFDPSMQLPQLMSADQPVPTLFPSHPGVATAMSSSIDVECSQNLLTMLTSNGSDGMLHVRAGGAGAGVDRFAGTTDWSILDKLLASHQNLDQLFHGKVTAASASPMAPYHQQLMELGGSSSSSSLQRLPLQYLSGETTDLLRFPK

SEQ ID NO: 8720 - protein, 91 aa, Zea mays
  unsure (1)..(91): unsure at all Xaa locations
  Clone ID: TF_LIB3182-009-P2-M1-B4.pep
AIMDADLNKNVPWDLPIKEKKGDKECYLFYQNDPKFPTELRANRANXDGYWKETGEDNEVYNAAERVAVLITMKMNLGLYTGGDTTSDKIN

SEQ ID NO: 8721 - protein, 85 aa, Zea mays
  Clone ID: TF_LIB4766-005-R1-M1-G2.pep
NGNGIIKKGSNRALVEESFFSWFGDTELKSLADGVQDEVAEIIKEDLWPNPLKYFNNEVDDEFEGDEDDDDLDGDDDDEGDDLEN

SEQ ID NO: 8722 - protein, 99 aa, Zea mays
  unsure (1)..(99): unsure at all Xaa locations
  Clone ID: TF_LIB4315-023-R1-N1-G8.pep
KGKGLANGVILEKNGTKRALPEESFFTWFSDAHPKEDVEDXMQNEVADFIKEDLWPNPFPYFNNDADEKDFYGADDGDEEEKKGAFDEDDAEKDEVGEE

SEQ ID NO: 8723 - protein, 150 aa, Zea mays
  unsure (1)..(150): unsure at all Xaa locations
  Clone ID: TF_LIB3632-022-Q1-K6-D5.pep
ARPRYLGDINWSTIEDPTGFNLGWWFDTNPFLKNFVLSKTFHMXDEDDPILEKAIGTVIEWYSGXINLSHMILTKKATMGXMNTKAITKTEDWDSFFNFLNPPHVPEDDDDLDEDTAVELLCLMXHDCDIGTLLRDKIIPQSLGWFTGDA

SEQ ID NO: 8724 - protein, 141 aa, Zea mays
  Clone ID: TF_ZmC7683_2.pep
QKVLKKKPRKGSKNTKPITKTEDCESFFPFERPPQVPDDDEEIDEDIAEQLQNEMEQDYDIGSTIRDKIIPHAVSWFTGEAAQDEEFEVMDGEDDDDEDNDDEDEDDEDDDDDDDYDSKKTKGTAGGEGQQGERPAECKQQ

SEQ ID NO: 8725 - protein, 63 aa, Zea mays
  Clone ID: TF_ZmC13098_5.pep
FGDTELKSLADGVQDEVAEIIKEDLWPNPLKYFNNEVDDEFEGDEDDDDLDGDDDDEGDDLEN

SEQ ID NO: 8726 - protein, 199 aa, Zea mays
  Clone ID: TF_ZmC518259_1.pep
MGGEKENLDLSDLNTSLPAAAAALSAEDRVGLVNALKDKLQSLAGQHADVLESLSPNVRTRVEFLRGIQSQHDEIETKFFEERAALEAKYQKLYEPLYAKRYDIVNGVVEVDGVAKEPTTENAAEGGDSDAKGVPDFWLTALKTNDVLTEEIQERDEPVLKYLKDIKWSRIDDPKGFKLEFFFDTNPFFKNSVLTNPII

SEQ ID NO: 8727 - protein, 183 aa, Zea mays
  unsure (1)..(183): unsure at all Xaa locations
  Clone ID: TF_LIB4073-015-Q6-K1-B10.pep
KVDIEYPFTFEGXXEIYKCVGCNIDWHKGKNLTVKTIKRKQKHKARGAVRTVTKQVPADSFFNFFKPPVIQENQDESKIDLEDQAILSTDFEIGHFLRARVIPKAALYYTGDIVEDDDDDDYDEEEEEEEEEGDEEEDEESESDQESRPTGKQQQRVHGVANKKKSGSGAGGANQTPAECKQQ

SEQ ID NO: 8728 - protein, 251 aa, Zea mays
  Clone ID: TF_ZmC13098_1.pep
MTAPADKGKKAKTDADGGEENEQIDGVLVLSIEKLQEIQDELEKVNEEASDKVMEVEQKYSEIRRPVYLKRGDIIKTIPDFWLTAFMSHPLLSELLTEEDQKIFKYLDSIDVDDSDVKAGYSIHLNFSENPYFEDTKLAKTYIFADDGTTTIKASEIKWKEGMGPANGNGINKKGSKRPLVEESFFSWFGDTELKSLADGVQDEVAEIIKEDLWPNPLKYFNNEVDDEFEGDEDDDDLDGDDDDEGDDLEN

SEQ ID NO: 8729 - protein, 95 aa, Zea mays
  unsure (1)..(95): unsure at all Xaa locations
  Clone ID: TF_700336790H1.pep
EKEDPKGIPEYTLTVFSXVDLLSDMVQEHNEPILKHLKDIKVKFSDAGQPMSFVLEFHFEPNEYFTNEVLTKTYRMRSEPDDSDPFSFDGPEIMG

SEQ ID NO: 8730 - protein, 215 aa, Zea mays
  Clone ID: TF_ZmC502799_1.pep
MAPKRQSAILPQPKKPRPAAAPKLEDKSASPGLPKGEKEQQEAIEHIDEVQNEIDRLNEQASEEILKVEQKYNKLRQPFFQKRSELIAKIPNFWVTTFVNHPQVSALLGEEDEEALHYLTRVEVTEFEDIKSGYRIDFYFDENPYFENKVLSKEFHLNESGDPSSKSTEIKWKSGKDLTKRSSQTQNKASRKRQHEEPESFFTWVTDHSDAGADE

SEQ ID NO: 8731 - protein, 398 aa, Zea mays
  Clone ID: TF_ZmC23984_1.pep
MDVPRSNKQPTSTPQNTPANAAPISSRAQQPNVGTIKEEELDRAAAGLFAANPALVSMMQAKLGSLVGRSSGYIESLPGSVRRRVAGLKGVQKEHSKLEAEFQEEVLQLEKKYFAKFTPLYEQRAKIVNGSTEPTEEQVKVGEQQDEDDEDDEEAGEKELNKDEGKGVKGIPEFWLSAMKNQISLAEMITDRDEAALKHLTDVRMEYLDRPGFRLIFEFEENEFFTNKTITKTYFYQEENGYGGDFIYDHAEGDKIDWKTGKDLTVRVESKKQRNKNTKQTRVVKKTVPTESFFNFFDPPSPPQDEDDDASSDIEERLELDYQLGEDIKEKLIPRAIDWFTGEALQYENIEDFDEGEFEDEDDEDEDGLSDDRDEDEESDDENDGTKPKQEAAECKQS

SEQ ID NO: 8732 - protein, 114 aa, Zea mays
  unsure (1)..(114): unsure at all Xaa locations
  Clone ID: TF_LIB3150-004-Q1-N1-D4.pep
MDGENEPYVISDLNASLPAAAAALSAEDRAGLVNALKDKLQSLAGQHADVLKTLSPNVRKRVEFLRGIQSQHDXIDGKFFEERVALEAKYHKALXKPLYTKRVLKLVKGENGGR

SEQ ID NO: 8733 - protein, 380 aa, Zea mays
  Clone ID: TF_ZmC2218_1.pep
MGGEKETFDTSDLNASLPAAAAALSAEDRAGLVNALKDKLQSLAGQHADVLETLSPNVRKRVEFLREIQSQHDEIEAKFFEERAALEAKYQKLYEPLYTKRYGIVNGEVEVDGVCDEPASENTVEGKEPDAKGVPDFWLTAMKTNEVLSEEIQERDEAALKYLKDIKWSRIEDPKGFKLDFFFDTNPFFKNSVLTKTYHMVDEDDPILEKAIGTEIEWYPGKNLTQKILKKKPKKGSKNTKPITKTEDCESFFNFFNPPQVPEDDDDIDEDTADELQSQMEHDYDIGTTIRDKIIPHAVSWFTGEAVQGEDFGELGDDDEDDDDEDDDEDDEDEEEDDDEEEDDEEESKPARKSGSGRRHKAPQKVSQGNAEQPAECKQQ

SEQ ID NO: 8734 - protein, 370 aa, Zea mays
  Clone ID: TF_ZmC7683_1.pep
MSDGKDSLDLSALGAAIPNSAELSAEDKANLVASIKNTLEGLASRHTDVLENLEPKVRKRVEKLREIQGEHDELEAKFFEERAALEAKYQKLYEPLYSKRYEIVNGVVEIEGITKESAAETPEEQKSGDETSAEQKEEKGVPAFWLNAMKNHEILAEEIQERDEEALKYLKDIKWYRISEPKGFKLEFHFGTNMFFKNSVLTKTYHMIDEDEPILEKAIGTEIEWYPGKCLTQKVLKKKPRKGSKNTKPITKTEDCESFFNFFSPPQVPDDDEEIDEDTAEQLQNQMEQDYDIGSTIRDKIIPHAVSWFTGEAAQDEDFEVMDGEDDDDEDDDDEDDEDEDDDDYDTKKTKGTAGGEGQQGERPAECKQQ

SEQ ID NO: 8735 - protein, 181 aa, Zea mays
  Clone ID: TF_LIB5116-017-A1-PF1-G8.pep
MGGEKENLDLSDLSAEDRVGLVNALKDKLQSLAGQHADVLESLSPNVRRRVEFLRGIQSQHDEIETKFFEERAALGAKYQKLYEPLYAKRYDIVNGVVEVDGVAKEPTTENAAEGGDSDAKGVPDFWLTALKTNDVLTEEIQERDEPVLKYLKDIKWSRIDDPKGFKLEFFFDTNPFFKNS

SEQ ID NO: 8736 - protein, 115 aa, Zea mays
  unsure (1)..(115): unsure at all Xaa locations
  Clone ID: TF_LIB3088-035-Q1-K1-G12.pep
GLDVEEGALKETTPDGEGDHEKGVPAFWLTAMKNIEVLAEEISERDEGALKYLKDIKWSRIENPKGFKLELFFDTNPYFINSDLTXTYHMIDEDEPILEKAIGTEIQWAPGKCLT

SEQ ID NO: 8737 - protein, 258 aa, Zea mays
  Clone ID: TF_ZmC13098_2.pep
MTAPADKGKKAKTDADGGEENEQIDGALVFSIEKLQEIQDELEKVNEEASDKVMEVEQKYSEIRRPVYLKRGDIIKTIPDFWLTAFLSHPLLSELLTEEDQKIFKYLDSIDVDDSDVKAGYSIYLNFSENPYFEDTKLTKTYSFVDDGTTTIKASQIKWKDGMGPANGNGINKKGNKRPLVVESFFSWFSDTELKSLADGVQDEVAEIIKEDLWPNPLKYFNNEVEDEFEGDEEDDDDDDDDDNLDGDDNDDDGDQEN

SEQ ID NO: 8738 - protein, 275 aa, Zea mays
  unsure (1)..(275): unsure at all Xaa locations
  Clone ID: TF_ZmC2218_4.pep
GATQARDYPLSLSINKRRRRNYAKGVPDFWLTAMKTNEVLSEEIQERDEAALKYLKDIKWSRIEDPKGFKLDFFFDTNPFFKNSVLTKTYHMVDEDDPILEKAIGTEIEWYPGKNLTQKILKKKPKKGSKNTKPITKTEDCESFFNFFNPPQVPEDDDDIDEDTADELQSQMEHDYDIGTTIRDKIIPHAVSWFTGEAVQGEDFAELGDDDDDDDDEDDDEEXREEDDDEEEMRRKKASQQGIGIRSQTEGAAGSVAALQGNAEQPAECKQRSAR

SEQ ID NO: 8739 - protein, 139 aa, Zea mays
  Clone ID: TF_ZmC2218_2.pep
LGTSRPAGFNFFNPPQVPEDDDDIDEDTADELQSQMEHDYDIGTTIRDKIIPHAVSWFTGEAVQGEDFGELGDDDEDDDDEDDDEDDEDEEEDDDEEEDDEEESKPASQDLVADIRCHRRCRREMLNNQRSASSSRMAC

SEQ ID NO: 8740 - protein, 192 aa, Zea mays
  unsure (1)..(192): unsure at all Xaa locations
  Clone ID: TF_LIB4172-012-Q1-L1-E5.pep
MTAMEESQSDISLELPLSQETFSGLWKLLPPEDILPSPHCMDDLLLPQDVEEFFEGPSEALRVSGAPAAQDPVTETPGPVAPAPATPWPLSSFVPSQKTYQGNYGFHLGFLQSGTAKSVMCTYSPPLNKLFCQLAKTCPVQXWVSATPSAGSRVRAMXIYKRXQHMTEVVRXXPHHERCSDGDGLAPPQHLI

SEQ ID NO: 8741 - protein, 280 aa, Zea mays
  Clone ID: TF_ZmC1197832_1.pep
RLEDPRFRLGFLHSGTAKSVTCTYSPALNKMFCQLAKTCPVQLWVDSTPPPGTRVRAMAIYKQSQHMTEVVRRCPHHERCSDSDGLAPPQHLIRVEGNLRVEYLDDRNTFRHSVVVPYEPPEVGSDCTTIHYNYMCNSSCMGGMNRRPILTIITLEDSSGNLLGRNSFEVRVCACPGRDRRTEEENLRKKGEPHHELPPGSTKRALPNNTSSSPQPKKKPLDGEYFTLQIRGRERFEMFRELNEALELKDAQAGKEPGGSRAHSSHLKSKKGQSRVPSSN

SEQ ID NO: 8742 - protein, 190 aa, Zea mays
  Clone ID: TF_LIB4745-011-Q1-K1-A10.pep
SPSPPSLSDHCISSPPGRRSDGAMDIKVCGVCGSGSNSALIVKCVRCNDYEHRYCMKVVARVSPQEWYCAKCQEHTNRGPKPSQGGQTELQKPCHGRDMTSERETSKLHLSQSSVVHQIISPKSLNRFENAKVKFISSEEVALLSRERPPSVTSRFTLSQPSKASSPPTTKHLSNMNCVSPSRVIKMCKP

SEQ ID NO: 8743 - protein, 306 aa, Zea mays
  Clone ID: TF_ZmC36928_1.pep
METIDHLLVSWVFARNYWFKLLTKFNLILVKQNMYRRAAEFWAELRLELLSASELFADGNSNQIWRLYWASHQRFFRHMCMSAKVPAVVRLAKEALAENKCVVIGLQSTGEARTEEAVTKYGVEMEDFVSGPRELLLKLVEENYPLPPKPDSFQQGEETVTEIQRKRALDVSFKGRVRKVAKVVDVSDDDTDDYSPSESDHESTESDEEFHMCQICNTEEEQSLLLHCSGCSRHVHPHCLSPPWTGTITDDWACYTCKIVEDEEKKQDAHVADCLKRISLLMSMKRIPCSGGKDVVISCMELPEKD

SEQ ID NO: 8744 - protein, 500 aa, Zea mays
  Clone ID: TF_ZmC4701_1.pep
MGHRATPGVAFAPPKPTFINHNEIAKNVLQFLHQPANHPSWTPPSTEYMHSRLCCQICKVDIIGTDNLLVCDACERGVHLKCLHQYGNKGVPKAEWHCSACLTQSKGKPLPPKYGKVTRTVVASKTAPPGGGAQLSLQESAENMAAKENHQKLAANGNLMKPFSIHGGSTVPDSNVLALSAVMAGSQSQLVSTLRPSIVVKAETPSNGKEGTGQPCNTAIQPNVRSSSLNNRLRSDSCLNPADSANEIMHGKHAAEISGVEAKVKSEANSEVVVSTDEELVHSSGTSIETERAKVVAIEENRAQSTFETDKMKVGETTINTGTTDQCINTEEKLPSLATSEAHTITDVKMTSNTGIPVQQHNIATIEEKTQIDAVSDPHPHAIQDIQDMEMGTNNGPPIDQTSSLVEENPPGQSSSIADACVTANTGIPTDQTQHPNESTENAVKKSPNRELYKEKPGCNITSDITQKVTSNGIMCPEDKTLCVHEDKAVGCDTEAKEEN

SEQ ID NO: 8745 - protein, 426 aa, Zea mays
  Clone ID: TF_ZmC299_1.pep
HLYDVIIVDICFVSSNCWTFVSLYCLKRSHKEKRSSYAPESGVRYDGVYRIEKCWRKIGIQGKFKVCRYLFVRCDNEPAPWTSDDHGDRPRPLPKIKELQGATDITERKGRPSWDYDDKDGWKWVVPPPVSRKPVLSGDPETDKQIRRATKRVHLSVAERLLKEFACSICRAVIKEPLTTPCAHNFCKTCLLGAYDSQSSIRERSRGGRTLRAQKIVKTCPSCPTDICDFLENPQINREMMELIETLQRKAVEEAKMTSDDAEECGDGDSEENDGDLVKGEDVSGLNEGEQDSADADANVEGSVKIVVEIKEEGKDDKRSKMGATEVVDVLVDEDAVKQTKKRKVDAEAGTNGGKRMKSSSTVEEVAVCVTPVKRSRKSGDMDDERNGSPAVSSGRRVTRSSVDDTGSADSPARRTRSRARADAGC

SEQ ID NO: 8746 - protein, 49 aa, Zea mays
  Clone ID: TF_LIB3632-035-Q1-N6-H10.pep
EACKAWFHPSCMAMAIAQAKKLDPFVCSACLKENGSKSLSNVYAPSSNF

SEQ ID NO: 8747 - protein, 150 aa, Zea mays
  Clone ID: TF_LIB3069-027-Q1-K1-H9.pep
KVQEFQHKRFYGSDMSLKGRVSELGKKEDVSEDGGDEYPPPDSDHESTESDEDFYMCQICNTEEEKNSLFCCCICASRVHPGCLTPPSTDIVNDDWSCYGCKEKVKSYLKERDAYLTELSKRYDAALDRKSKILDIIPSLDLPSNPLDDI

SEQ ID NO: 8748 - protein, 183 aa, Zea mays
  Clone ID: TF_LIB3960-010-Q1-N6-B6.pep
APPIPAPNPTDDWVDGSWTVDCSCGVTFDDGEEMVSCDECSVWVHTRCARYVRGVHTSFSCHKCRRSKRVPSSADEAEVAELLAELPTHRPPPLYRRWAEVPLPARVHVHGLPGGGDGALFRGAPAFSAALWRCTGYVPKRFGFRYCEFPSWADDNDGADALFALAREKPREMTDDVLIGTEP

SEQ ID NO: 8749 - protein, 391 aa, Zea mays
  unsure (1)..(391): unsure at all Xaa locations
  Clone ID: TF_ZmC10069_1.pep
MEPLVGEEEEVAALEGEDYCFVCKDGGDLRVCDFRGCQKAYHPACVGKDSGFLNSDEEFICEWHTCFICKGRSRYYCFCCPWQAFCQNCVKQAEFVPVLRKTKGFCTNCLRMAIMIEKNVDVDSDGERVDFNDRATYEFLFKEELQFQYSKVYXEINKRCFAALVRHNIDLIYLKKSLVVDLLREPDTFGSKVIGCLVRIKIDLNDYNSYMHKKVHQHRKLYQLGRXNRHGYVGWGSKELMEFLSSIGKDTLNSLDQHGATEVVKVYIQQKGLLARDKKKLVICDDKLKILFRRSKVRYNRIYSLLGKHIAVNMTSEDETFANSDDNNETFVRKKARIGNYSSSTPKCTPEINKRCFAALVRHNIDLIYLKKSLVVDLLREPDTFGSKVIG

SEQ ID NO: 8750 - protein, 442 aa, Zea mays
  Clone ID: TF_ZmC1921_1.pep
MTPKWSACSSNSYRELPLHENGECKSTLTESVPSPTSCFGLHTANTMCSLSSQKKDGNVYKRRKMDKDSNSPITFEEAKEMATQSCTISDDHSSLLLPIISSESEALLLNSTAGVAGPILDCEEPADVPLEPNSGTDDRCFISNMSPTSMTPDKKNAAECSSSNIGPTESITEHISPRDLCIAILMKDGLINESRTRMAHKEEFTDNDANPLLACNNCGCLEHSLKMLICDSCEAGFHLSCCIPCIKELPTDEWYCAPCLCKKPKSLYGKLSEGRINPSRNTNTRPHGMSHIEYMLKDAEPYVTGVRLGRDFQAEVPEWSGPSSSSDVYFDEPCAIDSAELTTFNLCKMSNQSHSSIGNWIQCRETLNPGDSDKQVVCGKWRRAPLYVVQSDNWDCFCCLLWDPVHADCAVPQELKTSEVLKQLKFVNMLKNQLVDQNQKPA

SEQ ID NO: 8751 - protein, 489 aa, Zea mays
  unsure (1)..(489): unsure at all Xaa locations
  Clone ID: TF_ZmC3525_1.pep
DENCSPQAEYELQDSKRSRYSSNDLRSHVALHKRTSGGTKNRRTSVSLARIKKFGSKSVCYSGSDKDNAVLAHEVNARRYSGRLSSNSPCCVCGISDLEPCNRLIECSKCYIKVHQACYGVLKVPRGQWFCRPCKNNTMDTVCVLCAIPGPXKYYSSLLGPQPMQWVHMVCGLWTPGTKCPNDTTMSAFDVSGASPAKRNTACSICDRTGGSFVKCRAVNCLVFFHAWCAHQRGLLQSEPEGEHNENIGFYGRCVSHAIVFSSHVNPKKEYFRNNNWTCARTEGFKGRKGEGFSDSSHKKYEEYSGEFGVSQEQINAWLRINGSKPCGRGQKEYIHYKQLKGWKHLVVYKSGIHGLGLYTSVFIPRGSMVVEYVGEIVGQRVADRREIEYQSGKRQQYKSACYFFKIDREHIIDATRKGGIARFVNHSCQPNCVAKIISVRNEKKVMFFAERHINPGEEITYDYHFNREDEGQRILCFCRSRYCRRYLN

SEQ ID NO: 8752 - protein, 209 aa, Zea mays
  Clone ID: TF_ZmC62111_1.pep
LVGRERGSDDDELNEAVVARSEPKNLVQPNASVPLTSQGFNQLLDQPGPSDPSVVYKDSICNRCGKVAGAGSVLKCYRCMLPCHISCIEATGSPISTGRWCCKNCSAGTKEPVEGDMVLAHGNPNCLHESCVVCDRLAACRSPKCDNSRALVISSVDPEIDTCYSCKICGGTEEDEKRFLICGNVLCRYMYYHIGCLKSMQISTSVERG

SEQ ID NO: 8753 - protein, 486 aa, Zea mays
  unsure (1)..(486): unsure at all Xaa locations
  Clone ID: TF_ZmC89463_1.pep
LVGGPPHKKTAPKKLSPKKKQKIQKKQSRKIETRRNQIVLKCKXKFGKRGKRGRPRKNPTDLSKNEPSKIHESEPSNVSKNEPVKRISKRLHDKYMKSNSNVSENAASSSKRKRTVSQYSYWLNGLRWSQNPHDERARSFRKERVVFPSEDAEISEVSPVCCLCEKCYNEEDIYIACEKCEDWFHGDIYSVNIENVNNLIGFKCHRCRRISLPVCPYAETVTVVKGQSDEDHCIKFVDQCVGKFVEDEDPNCPKDLGAPGSLQELHDHEIEQGLNVHITEIEFSYDNCLEELNDHGCSKEFDAHSTEKDLEDDKSLKKVDIHNELRALDDLGSEKEPGDHYNNWKALDSYNSWKLLDSHNSQEELDCTTNSKFSPKEIPCPMELDGFSSLKLVSHNILEELDNHNCLKENGNENSSKELDNNGSPKDSGDCLAEHFNSSRISGNEALVLTPETDSVNESLGLQSKDDPGKSVPTEHEIDLQVVVTL

SEQ ID NO: 8754 - protein, 187 aa, Zea mays
  Clone ID: TF_ZmC1247420_1.pep
NNYGNKDDSGDDCDGSSDDGDGSSDDDVTDQICALCDDGGHLLSCDGPCKRSFHPTKKDGRESKCESLHYTSAEVKRIGTYLCANCKNKQHQCFRCGELEPSHGPNAKVFQCNQASCGYFYHPKCIAQLLDPNATDGELERRIMAGMSFPCPIHWCFKCGHMENKAQRALQLAVCRRCPRAYHRECL

SEQ ID NO: 8755 - protein, 197 aa, Zea mays
  Clone ID: TF_LIB4766-109-A1-K1-G9.pep
MADTGRDAFPDEAEPAFTLDEYMEDIEAVELEADLVLGGDEGKECTYAGGYLKRQAVFSCLTCVPDGVAGVCTACSLACHDGHEIVELWTKRKFRCDCGNSKFGGHLCKLCPEKDSENSANTYNHNFKGSYCTCGRPYPDPEAKEQVEMIQCSICEDWFHGDHIGLNSIEEIPRDEEGEPLYEELICHKCSSGLHFL

SEQ ID NO: 8756 - protein, 168 aa, Zea mays
  Clone ID: TF_LIB3912-027-Q6-K6-F9.pep
MNIVCEVCGDIGYRQLLLCCGDCKRYAVHQYCLDKVVFDATLLEWFCYECLQRRGEVTCVASLEQVSSESPLSHAHFGPLVHQRTTKRVESVTGPYSPSDDCEELFSYPGIESIPSVQEISVDPIKTSSISEHDTIEAAASSERFTECQKASSCREITVKMAMAPSSY

SEQ ID NO: 8757 - protein, 231 aa, Zea mays
  Clone ID: TF_ZmC2557_18.pep
MDMAPASVYFNPRSVEEIFKDFSGRRAGLVRALTSDVDDFCRLCDPDKENLCLYGLPNGSWEVSPPAEEVPPELPEPALGINFARDGMQRRDWLTLVAVHSDSWLISVAFFYGARLNGNDRKRLFSMMSDLPSVLEAFADRKHGRDRSGVDSSGKSRHSSKRGKDGHAKSFRAAAPAAKEYDEDDDEEDEEEHTETFCGSCGGLYNASEFWIGCDICERWFHGKCVRITPA

SEQ ID NO: 8758 - protein, 239 aa, Zea mays
  unsure (1)..(239): unsure at all Xaa locations
  Clone ID: TF_LIB4980-054-R1-K1-A2.pep
MVCRVTSPPEVDLLHCSTCATPWHSPCLSKAPALADAASWSCPDCSLDSATVAAPSAPANTLVAAIRAIESDNTLSDQEKARRRQALLAGDAPDVADDDDAVDDTFEIVGKNFSCVFCMKLPERPVTTPCGHNFCLKCFQKWIQNKKRTCGKCRAPIPAKMAEQPRINSALVEVIRMAKISKNHNSAGSAVPYHYMRNDDRPDKAFTTDRAKKAGKANASSGQIFVTIAPDHLXLYLQK

SEQ ID NO: 8759 - protein, 329 aa, Zea mays
  Clone ID: TF_ZmC3769_1.pep
EVLSQQGLCIKCGEGGQLLECNGCFLAAHSSCFGSSATFEGTNFFYCPVCLYKKATEAYKKAKITYCETRKNLVAFLGTAQATNQPDKQLNGAQPGAANRDEEPHDEQHSKGCGASKGAHENEVYNLAHQDEEHHQQRKKQKINAIGKSYPKEVLTEKVLFQNSDPASINKHSVLQNNNKTPVKDPEKKQQAGDEEARKEAGNENSSHETGASSPRRCDPPSNQDVEADQDDSLTTSNQSGGSDEIEATSSNDSAKQSSPPWRGMGHNKKGLHEKEPAVSSKSRKGIGKQDQHMHTSRRKKKLHTCKSAIPILLRHLEDAKNSVGQKKK

SEQ ID NO: 8760 - protein, 412 aa, Zea mays
  Clone ID: TF_ZmC8733_1.pep
MADTGRDAFPDEAEPAFTLDEYMEDIEAVELEADLVLGGDEGKECTYAGGYLKRQAVFSCLTCVPDGVAGVCTACSLACHDGHEIVELWTKRKFRCDCGNSKFGGHLCKLCPEKDSENSANTYNHNFKGSYCTCGRPYPDPEAKEQVEMIQCSICEDWFHGDHIGLNSIEEIPRDEEGEPLYEELICHKCSSVCHFLKLYPDTIWASGKPNLAVETDASDSNVMKKPSGHADPEKHENGALVDNTVGEKTSVENDSTKAIAVPEEANLGSSSGNNCKLGVDVNTMPAITDKSEPFFMSKGWRETLCRCETCFNFYAQRGIAYLIDKEDSIEEYEKIAKQKREMKLEQQQGAETNFLNSLNHVQKIEMISGINDMKNEFQSFLESFDASKPVTSDDIHSFFENLAKKKKQRLS

SEQ ID NO: 8761 - protein, 240 aa, Zea mays
  Clone ID: TF_ZmC8733_5.pep
PRTTKGVGRLRQLEADLVLGGDEGKECTYAGGYLKRQAVFSCLTCVPDGVAGVCTACSLACHDGHEIVELWTKRKFRCDCGNSKFGGHLCKLCPEKDYENSANTYNHNFKGSYCTCGRPYPDPEAKEQVEMIQCSICEDWFHGDHIGLNSIEEIPRDEEGEPLYEELICHKCSSVCHFLKLYPDTIWASGKPNLAVETDASDSNVMKKPSGMLTLRNMKMVLLWIIRVARRPLVGKDSTK

SEQ ID NO: 8762 - protein, 135 aa, Zea mays
  unsure (1)..(135): unsure at all Xaa locations
  Clone ID: TF_LIB4743-111-Q1-K1-G10.pep
LITNSVESVRDAGPWRDRKNESIATKYPSLNITYPSIKKHTKKKPIVKPMVNCTNTKVRMAKVTTHTSAEASRSCETIGTESSKSNHVKNQQVDHANPVALNTEQSCPLIVNSLSTLXDNHQYHLLYTTEGLACK

SEQ ID NO: 8763 - protein, 1087 aa, Zea mays
  Clone ID: TF_ZmC133_37.pep
MEASAGLVAGSHNRNELVVIRRDGDPGPKPPREQNGQVCQICGDDVGLAPGGDPFVACNECAFPVCRDCYEYERREGTQNCPQCKTRYKRLKGCQRVTGDEEEDGVDDLDNEFNWDGHDSQSVAESMLYGHMSYGRGGDPNGAPQAFQLNPNVPLLTNGQMVDDIPPEQHALVPSFMGGGGKRIHPLPYADPSLPVQPRSMDPSKDLAAYGYGSVAWKERMENWKQRQERMHQTGNDGGGDDGDDADLPLMDEARQQLSRKIPLPSSQINPYRMIIIIRLVVLGFFFHYRVMHPVNDAFALWLISVICEIWFAMSWILDQFPKWFPIERETYLDRLSLRFDKEGQPSQLAPIDFFVSTVDPLKEPPLVTTNTVLSILSVDYPVDKVSCYVSDDGAAMLTFEALSETSEFAKKWVPFCKRYNIEPRAPEWYFQQKIDYLKDKVAANFVRERRAMKREYEEFKVRINALVAKAQKVPEEGWTMQDGTPWPGNNVRDHPGMIQVFLGQSGGLDCEGNELPRLVYVSREKRPGYNHHKKAGAMNALVRVSAVLTNAPYLLNLDCDHYINNSKAIKEAMCFMMDPLLGKKVCYVQFPQRFDGIDRHDRYANRNVVFFDINMKGLDGIQGPIYVGTGCVFRRQALYGYDAPKTKKPPSRTCNCWPKWCFCCCCFGNRKQKKKTTKPKTEKKKLLFFKKEENQSPAYALGEIDEAAPGAENEKAGIVNQQKLEKKFGQSSVFVTSTLLENGGTLKSASPASLLKEAIHVISCGYEDKTDWGKEIGWIYGSVTEDILTGFKMHCHGWRSIYCIPKRVAFKGSAPLNLSDRLHQVLRWALGSIEIFFSNHCPLWYGYGGGLKFLERFSYINSIVYPWTSIPLLAYCTLPAICLLTGKFITPELNNVASLWFMSLFICIFATSILEMRWSGVGIDDWWRNEQFWVIGGVSSHLFAVFQGLLKVIAGVDTSFTVTSKGGDDEEFSELYTFKWTTLLIPPTTLLLLNFIGVVAGVSNAINNGYESWGPLFGKLFFAFWVIVHLYPFLKGLVGRQNRTPTIVIVWSILLASIFSLLWVRIDPFLAKDDGPLLEECGLDCN

SEQ ID NO: 8764 - protein, 225 aa, Zea mays
  Clone ID: TF_ZmC1236834_1.pep
MEANRGMVAGSRGGVVTIRHDGDGAAAKQLKNVNEQICQICGDTLGLSATGDIFVACNECAFPVCRPCYEYERKEGNQCCPQCKTRYKRHKGSPRVRGDEEEDGVDDLDNEFNYTQGNVQGPQWQLQGQGEDVDISSSSRHEPHHRIPRLTTGQQMSGDIPDASPDRNSIRSPTPSYVDPSIPVPVRIVDPSKDLNSYGVGSVDWKERVESWKVRQDKNMIQVRR

SEQ ID NO: 8765 - protein, 284 aa, Zea mays
  Clone ID: TF_ZmC313479_1.pep
RFHPMVQEQDAPNALASDADHPAPPPRLLSKHRPRRRAAAPRPPLPPPAPPLPARRLPDLSQCHCCGFRFRTPQPGARPKRRPLCPLSSLWRVVLLCAECLSLVRCGAVCSYCLSLDNLPPEDSAVVCRRCNRYVHRSCIPAEHRTAVIQPVDVEDFLCVDCRPTVRSKNGGFNLGLNLDACIWDRTSVARENALRKAVEVKPASKRGNDAVGGSGLVGRGSDVPVLPDEELALQLHLAMNGSQRISRSGGASADPAKGKNDGVASRICNTNQDISRNKYDGSA

SEQ ID NO: 8766 - protein, 198 aa, Zea mays
  Clone ID: TF_ZmC2027_16.pep
MAANKGMVAGSHNRNEFVMIRHDGDAPVPAKPTKSANGQVCQICGDTVGVSATGDVFVACNECAFPVCRPCYEYERKEGNQCCPQCKTRYKRQKGSPRVHGDDEEEDVDDLDNEFNYKQGNGKGPEWQLQGDDADLSSSARHDPFLKGLMGRQNRTPTIVIVWSILLASIFSLLWVKIDPFISPTQKTAALGQCGVNC

SEQ ID NO: 8767 - protein, 152 aa, Zea mays
  Clone ID: TF_5006147.pep
VCMVCGVAAPSEVDLLRCSTCATPWHSPCLSNPPALSEAAIWSCPDCSGDPVAPAAPAAGGELVAAVRAIEADTTLSDAEKARRRQNILAGRSAASAPDDDVDDSAEDDVLNIFGRSFSCAFCMKLLDRPVTVLQMSLIRSMLASMFKINNC

SEQ ID NO: 8768 - protein, 318 aa, Zea mays
  Clone ID: TF_ZmC531693_1.pep
MARKKATVEQLRTLNKVREFKRRRNMHKAAGAGPGNKGENVCAICDDGGNLTCCEGCCQRSFHLDNEHNCIKTLGLTIQEAKNIIEKGDFICKNCQYKQHQCFICGSLGSSDDTDTASQQVFQCEHDDCARFYHPKCVAQMLYPDSQELFELHVAAGESFTCPMHECIVCKEVDNKKDKSMQFAVCRRCPTVYHRKCLPRDIIFKPKKGRRGPMRRAWKNMLPDRILIFCMKHEIVRELQTPARNHIVFPESNVLKTFQALYAQREAPDHSSSKQTHSSPPPAARDQNQCYCSSPLCSFAPSSVFMRPHPGSSGWLDD

SEQ ID NO: 8769 - protein, 63 aa, Zea mays
  Clone ID: TF_LIB4171-042-Q1-K1-E2.pep
KKEEGVTPFCGSCGTKDGKGEFWICCEKCDRWFHGKCVKIPPARVEPLKPSKCPDCSPKRARA

SEQ ID NO: 8770 - protein, 256 aa, Zea mays
  Clone ID: TF_ZmC24647_1.pep
MDPGAGAHYSARTAEEVFRDFRGRRAGMIKALTNDVEKFYQLCDPEKENLCLYGYPNETWEVTLPAEEVPPEIPEPALGINFARDGMNEKDWLALVAVHSDAWLLAVAFYFAARFGFDKEARRRLFNMINNLPTIFEVATGVAKKQNKEKEPNSTSKSNKPSSKMTTRPESHLKATKVAPPKDEDDESGEEYEEEEERDNTLCGSCGTNDGKDEFWICCDSCERWYHGKCVKITPARAEHIKHYKCPDCNNKRAGA

SEQ ID NO: 8771 - protein, 138 aa, Zea mays
  Clone ID: TF_ZmC62616_2.pep
MLLDSESYESGVRIGTKFQAEVPKWSGPISSREDEFAEPTELDRSKTTMLSFEDKKTSIGNWIQCREVLDTGVVCGKWRRAPLFVVQSSDWDCSCSVVWDPIHADCAVPQELETVKVHEQLKYINKLKNRLGDSNQKR

SEQ ID NO: 8772 - protein, 252 aa, Zea mays
  Clone ID: TF_ZmC211414_1.pep
LRAAHWMVQRENGNTLHQEYANSAPYCVPFDFVHKNSRMFYNPFNGNISSQPEPSPPYISGGILADEMGLGKTVELLACIFAHRRPISLDFSVFQNKTEMDQIKRQKVERVECICGAASESSAYTGLWVQCDICDAWQHADCVGYSPKRNILFADTTEDVVSTNKKSTMKSGFRRKKKPRCSIVETEDKYICALCLELIEATQTNILSHATLIVCPAPILAQWHSEITRHTRPGSLKVCIYEGARNLDPSTI

SEQ ID NO: 8773 - protein, 155 aa, Zea mays
  unsure (1)..(155): unsure at all Xaa locations
  Clone ID: TF_21216428.pep
RGALVAVHSDSWLVSVAFYYAARLNRSDRKRLFGMMNDLPTXXEVVSSGVKQSKERDRSGTDNGGRNKLSVKQTSEPRLENNAREPDEGYDEDDSNHSETLCGTCGGIYSADEFWIGCDVCEKWYHGKCVKITPAKAESIKQYKCPSCCNXPRPI

SEQ ID NO: 8774 - protein, 73 aa, Zea mays
  Clone ID: TF_LIB3689-230-Q1-N6-A12.pep
SYQGRLQWHPSQCLATLCGTCGGIYSADEFWIGCDVCEKWYHGKCVKITPAKAESIKQYKCPSCCNSKRPRPL

SEQ ID NO: 8775 - protein, 297 aa, Zea mays
  Clone ID: TF_ZmC17187_1.pep
MPPLAARVVSSLGSRPHRDQSSLSLPAFLLRLALAGGQAHRRRAMDASYRRAGTGSGSAPRSVEDIYKDYRSRRSAILRALTHDVEEFYALCDPEKENLCLYGYANEAWEVALPAEEVPTELPEPALGINFARDGMNRGDWLALVAVHSDSWLVSVAFYYAARLNRSDRKRLFGMMNDLPTVFEVVSSGVKQSKERDRSGTDNGGRNKLSVKQTSEPRLENNAREPDEGYDEDDSNHSETLCGTCGGIYSADEFWIGCDVCEKWYHGKCVKITPAKAESIKQYKCPSCCNSKRPRPI

SEQ ID NO: 8776 - protein, 228 aa, Zea mays
  Clone ID: TF_ZmC17187_2.pep
MDASYRRAGTGSGSAPRSVEDIYKDYRSRRSAILRALTHDVEEFYALCDPEKENLCLYGYANEAWEVALPAEEVPTELPEPALGINFAFYYAARLNRSDRKRLFGMMNDLPTVFEVVSSGVKQSKERDRSGTDNGGRNKLSVKQTSEPRLENNAREPDEGYDEDDSNHSETLCGTCGGIYSADEFWIGCDVCEKWYHGKCVKITPAKAESIKQYKCPSCCNSKRPRPI

SEQ ID NO: 8777 - protein, 250 aa, Zea mays
  Clone ID: TF_ZmC2557_29.pep
MDMAPAAVSSNPRSVEEIFKDFSGRRAGLVRALTSDVDDFCSFCDPDKENLCLYGLPNGSWEVSPPADEVPPELPEPALGINFARDGMQRRDWLSLVAVHSDSWLISVAFFYGARLNANDRKRLFSMISDLPSVFEAFADRKHVRDRSGVDSSGKSRHSSKRGNDGHAKNSRAAAPAAKEYDDDDDEEDEEHTETFCGSCGGLYNANEFWIGCDICERWFHGKCVRITPAKADHIKHYKCPDCSSKKIRQ

SEQ ID NO: 8778 - protein, 250 aa, Zea mays; identical to SEQ ID NO: 8777
  Clone ID: TF_ZmC2557_30.pep

SEQ ID NO: 8779 - protein, 131 aa, Zea mays
  Clone ID: TF_LIB4757-014-Q1-K1-A10.pep
LGPSGRPEKNYCKRRLLHELSISLLKGQKMSNRQSDDLCSICSDGGQLLLCDTCPRAFHRECVGLSSATKGTWCCRYCENRQQRESCLAYNNNAIAAGRVEGVDALEQIFTRSIRIATTLETGFGGCALCK

SEQ ID NO: 8780 - protein, 93 aa, Zea mays
  Clone ID: TF_jC-zmXLIB3526P054bg08a1.pep
EVPSLNLFLDTGKSYSLCQLQAWSIEQKVRKEHAKDPMSLQADQNDDTCGSCGDGGELICCDNCPASYHQACLSCQVCYPDVIRFIWTFYLGK

SEQ ID NO: 8781 - protein, 184 aa, Zea mays
  Clone ID: TF_LIB3354-003-P1-K1-A4.pep
SESSSDSEFVVSGKELEELREPEPPKAAPNLHVSLRRICITRHGEGKGKEKQEHEEAGKPICGICLSEELRATVQGVLNCCSHYFCFACIMEWSRVESRCPLCKQRFTTITKSSKVDLGLGVRKAVVKVEERDQVYQPTEEEIRRWLDPYENVVCIECNQGGDDNLMLLCDICDSSAHTYCVGL

SEQ ID NO: 8782 - protein, 218 aa, Zea mays
  unsure (1)..(218): unsure at all Xaa locations
  Clone ID: TF_LIB3279-224-Q6-K6-A4.pep
GIKEGSISRDGIKCMCCNELFTVENFEVHAGSSTPLPSSHMFLKDGRSLSQCLVEFMGGNKPRDPLHVRLKGSSSDLESDSICSVCHDGGDLLLCDNCPSSYHHDCVGLEVEAIPEGSWYCPSCRCGICNLSDYDPDTSQFTEKTIVYCDQCEREYHVGCTRNSDHQLICRPEGCWXCSRGCSNVFQHLQEVIGKQVPTPIEGLSCTILKFCRANGGD

SEQ ID NO: 8783 - protein, 255 aa, Zea mays
  Clone ID: TF_ZmC21748_1.pep
MDGDGGGAGALHHHTRSPEDVFRDFRARRAGIVKALTTDVEKFYQQCDPEKENLCLYGLPNETWEVTLPAEEVPPELPEPALGINFARDGMVEKDWLSLVAVHSDAWLLSVAFYFGARFGFDKDARRRLFTMINNLPTVYEVVTGVAKKQSKAPNGSSKSSKPNSKPSKLTNSNSKPAKPAHPKEEEDSGREDAEEDQAYLCGSCGESYANGEFWICCDVCEKWFHGKCVRITPAKAEHIKQYKCPSCSTKRSRE

SEQ ID NO: 8784 - protein, 241 aa, Zea mays
  unsure (1)..(241): unsure at all Xaa locations
  Clone ID: TF_ZmC21748_4.pep
MDGDGGGAGALHHHTRSPEDVFRDFRARRAGIVKALTTDVEKFYQQCDPEKEXLCLYGLPNETWEVTLPAEEVPPELPEPALGINFARDGMVEKDWLSLVAVHSDAWLLSVAFYFGARFGFDKDARRRLFTMINNLPTVYEVVTGVAKKQSKAPNGSSKSSKPNSKXHPKEEEDSGREDAEEDQAYLCGSCGESYANGEFWICCDVCEKWFHGKCVRITPAKAEHIKQYKCPSCSTKRSRE

SEQ ID NO: 8785 - protein, 301 aa, Zea mays
  Clone ID: TF_ZmC1977_1.pep
PLFSSSDHLLLLALRLPNLAAVSWAWDSRSAICVRVWPATAPPEAALPSAPLREAWPSPTSSPTRDAAAAPAPTPATAPSRLAPTPLKWYCPSCVEPDVALKHKNHGRSHEGCDVCEWLVVKPEEPAEDVSEPELAVKTQESSVSSMGEDSEPDLSTTALANLCKNCGTCEDEDRKFMVCGHGLCSFKFYHVLCLKERQIASEKQKNLKCWYCPSCLCRRCFKDKDDEKIVLCDGCDEAYHIYCMDPPCESVPRGKWFCTRCSARRSVQGMQRYEKSILEKVKRAPGANGPKVQASAGPEK

SEQ ID NO: 8786 - protein, 93 aa, Zea mays
  unsure (1)..(93): unsure at all Xaa locations
  Clone ID: TF_LIB4760-024-R1-K1-C1.pep
MGRAAPSSSPSSPQLGRKRTAAPTPEPPTPQRHCSMVDVMRRSRAVAAPPPVARARVYTYYETLLCETCGLGDRDDQMLXCDRCDRGCHTFCL

SEQ ID NO: 8787 - protein, 256 aa, Zea mays
  Clone ID: TF_ZmC24647_2.pep
MDPGAGAHYSVRTAEEVFRDFRGRRAGMIKALTNDVEKFYQLCDPEKENLCLYGYPNETWEVTLPAEEVPPEIPEPALGINFARDGMNEKDWLALVAVHSDSWLLAVAFYFAARFGFDKEARRRLFNMINNLPTIFEVVTGVANKQNKEKGPNSTSKSNKTSSKMTSRPESHSKATKVAVPPKDDDDESGEEYEEEERDNTLCGSGGTNDGKDEFWICCDSCERWYHGKCVKITPARAEHIKHYKCPDCNNKRARA

SEQ ID NO: 8788 - protein, 341 aa, Zea mays
  Clone ID: TF_ZmC4031_2.pep
SLQADQNDDTCASCGDGGELICCDNCPASYHQACLSCQDIPDGNWYCSSCLCDICGEVIDSKELVTSLPALDCSQCERQYHVKCVSAKVPCNEDGSGTWFCGRKCHEIYMTFRSRVGVPDHMDDDLCFTVLRNNGDKKVRTAEEIALMAECNMKLMIATSIMEECFLPILDPRTGIDIIPSILYNWRSDLHFNYKGFYTVVLESDDSMVSVASIRLHGAILAEMPLVATSKENRQQGMCRRLMDYIEEMLKSLKVEMLLLSAIPHLAETWTSTFGFREIDESDKKRLSKVRLAAVPGTVLLKKDLLCECSGADAGEPPSPKPFQVYSRVPGARTGLDAVCQ

SEQ ID NO: 8789 - protein, 331 aa, Zea mays
  Clone ID: TF_ZmC28160_1.pep
MCSFCSLLQSEDQLKNQLSVKMSKGNCPALAAPRPLISSAKGLYTGIEEINLLKEIVDKARNLNAYLMQILDDSDCYHGEDLTVIFKSLLVALKATSASGLYDDNVSCRIESVLSRYLWKKQIHKLLYGGKKSSIQEVLCLDEEGSHLEICDQDFFKLEISKIKETSLQWLAKAEEVACDSGELALDLVYGLIAEGENLSVDFEKELKLLRDRSVLYCICCKPDDNRAMIACDQCDEWYHFDCINLLGPPPESFFCPACHPNNGEESVSLARSEDDEDRSSTGAGAHTPPDRVVERDLIKLLSCHSGSSWSESRRAPHRTARRRSSFVGLL

SEQ ID NO: 8790 - protein, 203 aa, Zea mays
  Clone ID: TF_jC-zmshLIB3587P047b02b1.pep
ELLYKRFTTITKSSKVDLGLGVRKAVVKVEERDQVYQPTEEEIRRWLDPYENVVCIECNQGGDDNLMLLCDICDSSAHTYCVGLGREVPEGNWYCGGCRLGDEGPSYTGIQRTVAYERQNYRSHVGSSVSFGMAVPGGTFERPSSINPRHSFQGIDLNLSPREFPGESHPAESQVSTDSVSTPTGRAGKTISGRRELQRYIQS

SEQ ID NO: 8791 - protein, 489 aa, Zea mays
  unsure (1)..(489): unsure at all Xaa locations
  Clone ID: TF_ZmC877_1.pep
VDDDDDDFIVDDEVIVNRHPXKKARIGSGRETVVDPQVSIEEETWPDLESDSSDFEFATSDEEPNNVETPVAEQTTVRKGGRRGXSESESSSDSEFVVSGKELEELREPEPPKAAPNLHVSLRRICITRHGEGKGKEKQEQEEAGKPICGICLSPTRPPTRXEELKATVQGVLNCCSHYFCFACIMEWSRVESRCPLCKQRFTTITKSSKVDLGLGVRRAVIKVEERDQVYQPTEEEIRRWLDPYENVVCIECNQGGDDNLMLLCDICDSSAHTYCVGLGREVPEGNWYCGGCRLGDEGPSYTGIQRTVAYERQNYRSHVDSSSVSFGMAAPGGTFERPSSINPRHSFQGIDLNLSPREFPGESHPAESQVSTDSVSTPTGRAGRTISGRREIQRYIQSLFRPSLPSRPDTYHNIAQNSGGVSRNEPNRWNFPSSSEANTSQNLPDGIQNHHSDLPFVQAHSNFAPFMSLDGDDFQQIEGVKSNLRNMQ

SEQ ID NO: 8792 - protein, 161 aa, Zea mays
  Clone ID: TF_ZmC311_1.pep
QNNNNNNLLAWGSQKNSRKEITGQGTNISSSIHRDKSACPLGCHHLRLHKPTGLLPTYTQPILRLLDSVCQSNAYTFRGTRILSFLFVPSHPQRRCLFSWSSSCCLHLGPFGIRNTLDALQDRLLIPLHPVRRPPCTTRRAEPFTSRDRTARWIHAVSVVS

SEQ ID NO: 8793 - protein, 260 aa, Zea mays
  Clone ID: TF_ZmC350427_1.pep
REYLTACIEAGKFVDEEPFEWFGTGFNDGRTISFDAPRKWRNIRQQMGHGAFYGMQIVAYGQFILPTLDTVKRAVKAGDGAVLATSPPYTRFLDSGVDFAVVSESISRTDAWVQEFISHGIPCVSADYLVEYVCKPGQPLDRHVLFETNCVASKSLEKLTKKQVEMATAEKSEPSEDDDPEDLSCSACGRRDRGDVMLICGDEAGEAGCGIGMHIDCCDPPLDAVPDDDWMCPRCAVPEPETETKHARGTERRGRGSRRR

SEQ ID NO: 8794 - protein, 255 aa, Zea mays
  Clone ID: TF_ZmC21748_2.pep
MDGDREGAAAVHHHARSPEDVFRDFRARRAGIVKALTTDVEKFYQQCDPEKENLCLYGLPNETWEVTLPAEEVPPELPEPALGINFARDGMVEKDWLSLVAVHSDAWLLSVAFYFGARFGFDKDARRRLFTMINNLPTVYEVVTGVAKKQSKAPNGSSKSSKSNSKPSKQINSNSKPVKPAHPNEEEDSGREDAEEDQAYLCGSCGESYANGEFWICCDICEKWFHGKCVRITPAKAEHIKQYKCPSCSTKRSRE

SEQ ID NO: 8795 - protein, 52 aa, Zea mays
  Clone ID: TF_LIB3591-115-Q1-K6-A4F2B.pep
AWGKTYANGEFWFCCHVCEKGFHGKCVGITPPKAERINQYKCPGSSSKRSRE

SEQ ID NO: 8796 - protein, 257 aa, Zea mays
  unsure (1)..(257): unsure at all Xaa locations
  Clone ID: TF_ZmC1446_1.pep
MNGGGSGLAPNAAHTADEVFRDYKGRRAGMIKALTTDVERFFKLCDPXEKENLCLYGYPDETWEVTLPAEEVPPEIPEPALGINFARDGMNEKDWLALVAVHSDSWLLSVAFYFGARFGFDRETRRRLFSLINNMPTIFEVVTGAAKKQAKEKTPNSSSKSNRPSSKVQSRAESRSKAKVPQDEEESGDDDEDEEADEHNNTLCGTCGTNDSKDQFWICCDNCEKWYHGKCVKITPARAEHIKQYKCPDCTNKRARA

SEQ ID NO: 8797 - protein, 288 aa, Zea mays
  Clone ID: TF_ZmC1446_2.pep
MNGGGSGLAPNAAHTADEVFRDYKGRRAGMIKALTTDVERFFKLCDPGECARSLWFLAPGCGVIAEEASVVFLLGLRCFEKENLCLYGYPDETWEVTLPAEEVPPEIPEPALGINFARDGMNEKDWLALVAVHSDSWLLSVAFYFGARFGFDRETRRRLFSLINNMPTIFEVVTGAAKKQAKEKTPNSSSKSNRPSSKVQSRAESRSKAKVPQDEEESGDDDEDEEADEHNNTLCGTCGTNDSKDQFWICCDNCEKWYHGKCVKITPARAEHIKQYKCPDCTNKRARA

SEQ ID NO: 8798 - protein, 195 aa, Zea mays
  unsure (1)..(195): unsure at all Xaa locations
  Clone ID: TF_ZmC831741_1.pep
VRAQSPFRHGSAAASRHRPQRGPAAAVERHPAGAGPVAAAGVGSARPSSSSSSSSAAAAAVSSSPAAAAAPGCAQPTGAAPAGGPRRGASGPPPPRTEEYTFWAHRERARRLAPWSGAAAAPSAAAGASPWGGGGXGNPPAPCSXCXRQEILGGTLVCDACDRGFHPNCVRVWPALFPPPPPPNEGLDLPCVGKA

SEQ ID NO: 8799 - protein, 135 aa, Zea mays
  Clone ID: TF_LIB3059-004-Q1-K1-G10.pep
FPGRPTRPPTRPGDTILGYRAVQVNWKDLDYCNVCDMDEEYEDNLFLQCDKCRMMVHARCYGELKQLDGGLWLCNLCRPGAPRVSPKCCLCPVTGGAMNPTTDGRWAHLACAIWIPETCLKDVKRMEPIDGLSII

SEQ ID NO: 8800 - protein, 257 aa, Zea mays
  unsure (1)..(257): unsure at all Xaa locations
  Clone ID: TF_ZmC1446_3.pep
MDGGGSGPAPNAAHTAEEVFRDYKARRAGMIKALTTDVERFFKLCDPEKENLCLYGYPDETWEVTLPAEEVPPEIPEPALGINFARDGMXEKDWLALVAVHSDSWLLSVAFYFGARFGFDREARRRLFSLINNMPTIFEVVTGAVKKQQAKEKTPNSSSKSNKPSSKVQSRAESRSKAKVPKDEEESGDDDGDEEAEEHDNTLCGTCGTNDGKDQFWICCDNCEKWYHGKCVKITPARAEHIKQYKCPDCTNKRVRA

SEQ ID NO: 8801 - protein, 588 aa, Zea mays
  Clone ID: TF_ZmC4031_1.pep
KQKANIASLNNCVSMDNLTVNPIDPVVLNEGEQTGTAITEQVPVPLNLVLENKNDKDQGEQSSETSEQLMSKEPQKRDIKRQKRTWSHTCKFDDDDLLMTAVIYKLTARYRNSFHRKLRNKFGFRRLPTYRWENEDKGDRKKFPGEARTVLNKLLEMGIVARVDILQCHGPGGKNVLKDGNITASGIQCQCCGTTFTMSKFKCHAGLRQEVPSLNLFLDTGKSYSLCQLQAWSIEQKVRKEHAKDTMSLQADQNDDTCGSCGDGGELICCDNCPASYHQACLSCQDIPDGNWYCSSCLCDICGEVIDSKELVTSLPALECSQCERQYHVKRVSAKVPCNEDGSGTWFCGRKCHEIYMTFRSRVGVPDHMDDDLCFTVLRNNGDKKVRTAEEIALMAECNMKLMIATSIMEECFLPILDPRTGIDIIPSILYNWRSDLHFNYKGFYTIVLESDDSMVSVASIRLHGAIVAEMPLVATSKENRQQGMCRRLMDYIEEMLKSLKVEMLLLSAIPHLAETWTSTFGFREIDESDKKRLSKVRLAAVPGTVLLKKDLLCECSGADAGEPPSPKPFQVYSRVPRGRTGLDAVCQ

SEQ ID NO: 8802 - protein, 592 aa, Zea mays
  unsure (1)..(592): unsure at all Xaa locations
  Clone ID: TF_ZmC37301_1.pep
HGPYLCPKHTRCHSCGSGVPGSGHSTRWFLGYTCCDACGRLFVKGNYCPICLKVYRDSEVIPMVCCDVCEKWVHIECDGISEEKYQQFQADQNLQYTCAACRGECSQIRDTEDAIRELWKRRDVADHELMATLRAAAALPSLEDVSPPYQNSDDEKLGAYALKNESRNTLKFSLKSNSSKPPPDTPEQEKIVFKSSGSNKKPSKKKSGQANKTVDGHDEIFLERRHAVKSSNSCLGDQTIDDNHDMSPFKNDDNAYISSSTRSSEKNLKSPSMKAVTNNADMIPKVKIKGSKVSSLHYKDGEENTSKTDTGKATKLVIHLGSRHKTRSGSPKSELSNYQREQDLGSIHGRKIDVTSQLKGSRSEVKERSVMKLVRETGVQQRNSLLGDLGTSKKHATGKRSNALISGMENGNETGTRNRPFAQKQSHSSQVDENQGTADSPDNLKPSLLKLKFKRPHYEQLNTQASQPEEPTSWVSQQEEQLNVAKGQRSKRKRPSMEKADGLDGITPAKRXSRARDEVMDANWILRKLGKDAIGKRIEVHLTSDGKWHQGMVSNVMGGTLCIRLDNGRSENVELGKQAIRLIASRSKGGKR

SEQ ID NO: 8803 - protein, 555 aa, Zea mays
  Clone ID: TF_ZmC1977_2.pep
MACDGAARGRPPKRPASGGLAQPNVVTYKRRRRGTGANAGHSAVTSGPDPAEMSAVVHAIDSQQGGRQTLGRHWRNWRDTLEGVLQSTAGKQGSGGIQSCIRAALRFSGCPPTEHGNLAHDGGAGRDDPVGAVHSEENSGALVQLEDGTAAPLEANKTMCHNALFDILISEKFAMLCDLLAATFHVSKPDDVIGLQIIDAKMRNGDYAQNHALLDHDIKQIWKKFEHVGQEMAGLASSLLLISQASNQKQASGVSEIDVAEHKIEETSLVGVARKALRELTPQCDSGYSTIPKRTGRSGSDGICKDCGRKADSKGRIICDRCEAAYHVSCLKLAIDEEAPAKWYCPSCVEPDVALKHKNHGRSHEGCDVCEWLVVKPEEPAEDVSEPELAVKTQESSVSSMGEDSEPDLSTTALANLCKNCGTCEDEDRKFMVCGHGLCSFKFYHVLCLKERQIASEKQKNLKCWYCPSCLCRRCFKDKDDEKIVLCDGCDEAYHIYCMDPPCESVPRGKWFCTRCSARRSVQGMQRYEKSILEKVKRAPGANGPKVQASAGPEK

SEQ ID NO: 8804 - protein, 310 aa, Zea mays
  Clone ID: TF_ZmC17187_3.pep
MDASYRRAGAGSGSAPRSVEDIYKDYRARRSAVLRALTHDVEEFYALCDPEKENLCLYGYANEAWEVALPAEEVPTELPEPALGINFARDGMNRRDWLALVAVHSDSWLISVAFYYAARLNRSDRKRLFGMMNDLPTVFEVVSGGVKQSKERDRSGTDNSGRNKLSAKQTSEPRLENNAREPDEGYDEDDGYHSETLCGTCGGIYSADEFWIGCDVCEKWYHGKCVKITPAKAESIKQYKCPSCSFKEGEAVAKPMNAGSLRMWDVWCRRGALQSLQAGEGQETSIYKIRTILLSSLCLMLTFFTYDKLM

SEQ ID NO: 8805 - protein, 177 aa, Zea mays
  unsure (1)..(177): unsure at all Xaa locations
  Clone ID: TF_LIB3689-236-Q1-K6-B3.pep
QTSWDNRLHKLVFNVLLDGTEVAYYVDGQRKVDGYIKDHRIYCNHCNRVVSPSAFEAHAGMXNIFTSNGVSLHELAMKISKDMELSERETDDLCRECGQGGDIFPCKICPRSFHPACVGLSKVPAEWYCDSCRNLVQKEKALAXNKNAKAAGRQAGVDSIEQXMKRAIRIVPISDDL

SEQ ID NO: 8806 - protein, 112 aa, Zea mays
  unsure (1)..(112): unsure at all Xaa locations
  Clone ID: TF_ZmC229769_1.pep
MGSPCWYCPSCLCRCLCDKDDDLSILCDSCDEAYHIYCITPSHTSIPKGQWYCSSCSVERAXEGMRQYERRTLKLHRKEDAGLQSWNFDGVDLLLSAAEQLRIDEQLETRTD

SEQ ID NO: 8807 - protein, 273 aa, Zea mays
  Clone ID: TF_ZmC26156_3.pep
IRHEAHAGSEVNKPYRNILVDGLDIDLLHCLINAWNMQSDAERQDFFPVSIEGDDPNDDTCGICGDGGNLICCDGCPSTFHMSCLGLEALPTDYWCCSNCSCKFCHEHSSDDAEDTADVDSSLHTCSQCEEQYHGACSPDIDSIATNLSSQTGNLFCQQSCRLLFEELQNLLAVKKDLEPEYSCRVVQRIHEEVPEEVLALDKRVECNSKIAVALSLMDECFLPIVDQRTGINLIRNVVYNCGYAAIFLQAKKNPYSFKYPLYNMQAVGTMAF

SEQ ID NO: 8808 - protein, 235 aa, Zea mays
  Clone ID: TF_ZmC147944_1.pep
MAALADIDSSALPPSESSKGKGKMDEEEEDEAEGAEKMCGICYLDGRRAIRGELDCCAHFFCFVCIMAWGRVESRCPFCRARFHTIRRPPVAGRFPDERIVSIQERNQVHHPQGNGSSIVGGDPYVNTICTVCSSSSDDELLLLCELCDSAAHTYCVGLGTTVPEGDWFCKDCGTIRDDQLRWQAENQGEFEISMDVPGAEPVPAPSISGVVDEDHDLERHMRVVARRMTRFLHL

SEQ ID NO: 8809 - protein, 168 aa, Zea mays
  unsure (1)..(168): unsure at all Xaa locations
  Clone ID: TF_LIB4726-021-R1-K1-B8.pep
LIRALTTDVEKFYVMCDPEKDNLCLYGLPNETWEVNLPAEEVPPELPXIYEVVTGTAKKESKEKTPKSSNKTNKSGSKPSRQVEPNSRVPKMPPPKDEESEGEEGEPQEDHESALCGACGLGYDDFWICCDLCETWFHGKCVKITPNKAEHIKQYKCPSCTGSKRAKA

SEQ ID NO: 8810 - protein, 256 aa, Zea mays
  Clone ID: TF_ZmC183_1.pep
MDGGAGFPGTPVPRSPEDVFRDYRARQAGLIRALTTDVEKFYVMCDPEKDNLCLYGLPNETWEVNLPAEEVPPELPEPALGINFARDGMNEKDWLSLVAVHSDSWLMSVAFYFGARFGFDKESRKRLFTMINNLPSIYEVVTGTAKKESKEKTPKSSNKTNKSGSKPSRQVEPNSRVPKMPPPKDEESEGEEGEPQEDHESALCGACGLGYDDFWICCDLCETWFHGKCVKITPNKAEHIKQYKCPSCTGSKRAKA

SEQ ID NO: 8811 - protein, 147 aa, Zea mays
  Clone ID: TF_ZmC183_3.pep
LKQSDGVTFGWLRCRKRLFTMINNLPSIYEVVTGTAKKESKEKTPKSSNKTNKSGSKPSRQVEPNSRVPKMPPPKDEENEGEEGEPQEDHESALCGACGLGYDDFWICCDLCETWFHGKCVKITPNKAEHIKQYKCPSCTGSKRAKA

SEQ ID NO: 8812 - protein, 245 aa, Zea mays
  Clone ID: TF_ZmC183_4.pep
MDGGAGFPGTPVPRSPEDVFRDYRARQAGLIRALTTEKDNLCLYGLPNETWEVNLPAEEVPPELPEPALGINFARDGMNEKDWLSLVAVHSDSWLMSVAFYFGARFGFDKESRKRLFTMINNLPSIYEVVTGTAKKESKEKTPKSSNKTNKSGSKPSRQVEPNSRVPKMPPPKDEESEGEEGEPQEDHESALCGACGLGYDDFWICCDLCETWFHGKCVKITPNKAEHIKQYKCPSCTGSKRAKA

SEQ ID NO: 8813 - protein, 173 aa, Zea mays
  Clone ID: TF_ZmC13516_1.pep
MDPSELPELSRTAMLICCKVCGGPEEVDKRFLICDHYLCLYKYYHISCLTTEQIASDVQMGSQRWYCPSCLCRVCLCDTDDDQIILCDCCDQGYHLYCLSPPRRKVPKGHWDCEPCKERREKEKRILMLHRKDYDEDILKSGEFHGPNLLLKAAKKVKRDEEVKVAKTKSTRK

SEQ ID NO: 8814 - protein, 268 aa, Zea mays
  Clone ID: TF_ZmC2619_1.pep
RPVTGRARNPPAAQPEASPSPAPPLTVVAGPVSSAPRTVEDIYKDYAARRAGLVRALTSDVDGFYSMCDPEKENLCLYGLPNGGWEVSLPVEEVPPEMPEPALGINFARDGMRRRDWLSLVAVHSDAWLVSVAFFFAAKLNGNDRKRLFNMINDHPSVYEIMADRKGRENNPGVDNSSKSRHSTKRSNDGKIKNSRVAVGECRYENDEDHSETLCGSCSGLYNSSEFWIGCDICERWFHGKCVRITPAKAEQIKHYKCPDCSYKKSRQ

SEQ ID NO: 8815 - protein, 77 aa, Zea mays
  Clone ID: TF_LIB3957-003-Q1-K6-G5.pep
KDEDDSGGEEEEEEEDHENTLCGSCGDNYGQDEFWICCDACETWFHGKCVKITPAKAEHIKHYKCPNCSGSGKRARA

SEQ ID NO: 8816 - protein, 540 aa, Zea mays
  Clone ID: TF_ZmC26156_1.pep
KRTTKVEIQRLRQKKEKKNTTNSTRLHLGNERKKRGGCALLVRGSNKESGSTTDGFVPYEWKRTIFSWLIDLNVLSVNTKLNCLDESHSKVLLEGFVTRDGINCSCCSEVISVPEFVTHAGSEVNKPYRNILGDGLDIDLLHCLINAWNMQSDAERQDFFPVSIEGDDPNDDTCGICGDGGNLICCDGCPSTFHMSCLGLEALPSDYWCCANCSCKFCHEHSSDGAEDTADVDYSLHTCSQCEEQYHEACSPETDSITNLSSQTGNLFCQQSCRLLFEELQNLLAVKKDLEPEYSCRVVQRIHEDVPEEVLALDKRVECNSRIAVALSLMDECFLPIIDQRTGINLIRNVVYSCGSNFARLDFRGFYIFILERGDEIIAAASVRIHGTKLAEMPFIGTRNMYRRQGMCRRLVDGIEMILSSLNVEKLIIPAITELVDTWTSKFGFSPLEDSEKQEVKSISMLVFPGTGLLQKPLLKALPNEEQCSQGDKTEKSSDVVNEDSPCSDASADPLGLGVKEHEDSSKDADGTCNGDVSQECPHS

SEQ ID NO: 8817 - protein, 254 aa, Zea mays
  Clone ID: TF_ZmC3619_1.pep
MDGGGTHRTPEDVFRDFRARRAGMIKALTTDVEKFYQQCDPEKENLCLYGLPNETWEVNLPAEEVPPELPEPALGINFARDGMDEKDWLSLVAVHSDAWLLAVAFYFGARFGFDKESRKRLFVMINNLPTIYEVVTGTAKKQTKEKTPKSSSKSNKAGPKPPRQPEPNSRGSKMPPPKDEDDSGGEEEEEEEDHENTLCGSCGDNYGQDEFWICCDACETWFHGKCVKITPAKAEHIKHYKCPNCSGSGKRARA

SEQ ID NO: 8818 - protein, 644 aa, Zea mays
  Clone ID: TF_ZmC1774_1.pep
LHSWGLLVAKFCAVAETRPEDNIDISFFFPVKRAVLRGVIKRIGILCSCSSCKGRKVVSPYYFEVHAGSTKKHPSDYIFLENGNNLHDVLRACTNATLDMLEPAIRKAIGPAPQERISRCKSCKSSFSTLRSGKFALFCDSCLESKGAKNNISSSKVGRSQTSSAKVYKSASPGAKSSSVGRLTRKDKGMHKVVFMSGILPEGTDVGYYVGGKRLLDGYIKELGIYCHCCSTVVSPSQFEGHAGRAARRKPYHNIYMSNGVSLHELSISLLKGQKMSNRQSDDLCSICSDGGQLLLCDTCPRAFHRECVGLSSATKGTWCCRYCENRQQRESCLAYNNNAIAAGRVEGVDALEQIFTRSIRIATTLETGFGGCALCKLHDFSKKKFSTRTVLLCDQCGREYHVGCLKEHNMADLTALPEGAWYCSTDCVRINQTLQDLLNSGGEPVLAMDLDVIKKKREVKGFNDDDADLDVRWRVLKDKSSDDSKLVLSKAVAIFHETFDPIIQVSTGRDLIPAMVYGRSARDQDYTGMYCTVLTVNNIVVSAGLFRIMGSEIAELPLVATSRDRQGLGYFQALFSCIERLLSSLEVKHFVLPAAEEAESIWTERFGFAKISQDELREYLKGGRTTVFQGTSNLHKLVAKLEC

SEQ ID NO: 8819 - protein, 116 aa, Zea mays
  Clone ID: TF_LIB5116-009-A1-PF1-G2.pep
MNNGSIKKRSKHDTSISTSAKKIRGHDGYFYECVECDLGGNLLCCDSCPRTYHLECLNPPLKRAPPGNWQWPRCRTKQVSLKLLGNADADTSKRERTKRMRTSTIADSPSPHNKSL

SEQ ID NO: 8820 - protein, 251 aa, Zea mays
  Clone ID: TF_ZmC2557_16.pep
MDMAPASVYFNPRSVEEIFKDFSGRRAGLVRALTSDVDDFCSLCDPDKDNLCLYGLPNGSWEVSPPAEEVPPELPEPALGINFARDGMQRRDWLTLVAVHSDSWLISVAFFYGARLNGNDRKRLFSMMSDLPSVLEAFADRKQDRDRSGVDSSGKSRHSSKRGKDGHAKSSRAAAPAAKEYDEDDDEEDEEEHTETFCGSCGGLYNASEFWIGCDICERWFHGKCVRITPAKADHIKHYKCPDCSSKKMRQ

SEQ ID NO: 8821 - protein, 251 aa, Zea mays
  Clone ID: TF_ZmC2557_28.pep
MDMAPASVYFNPRSVEEIFKDFSGRRAGLVRALTSDVDDFCSLCDPDKENLCLYGLPNGSWEVSPPAEEVPPELPEPALGINFARDGMQRRDWLTLVAVHSDSWLISVAFFYGARLNGNDRKRLFSMMSDLPSVLEAFADRKHGRDRSGVDSSGKSRHSSKRGKDGHAKSFRAAAPAAKEYDEDDDEEDEEEHTETFCGSCGGLYNASEFWIGCDICERWFHGKCVRITPAKADHIKHYKCPDCSSKKMRQ

SEQ ID NO: 8822 - protein, 617 aa, Zea mays
  Clone ID: TF_ZmC113_1.pep
QSKQYCGICKKIWHHTDGGNWVCCDECQIWVHVECDLTCNNVEDLENADYFCPDCKSKSKTVPATENLNTSTSECASTSKGKLTAMIAVCCNGEDALYVPEKHMILCQCKSCKERMMSLNEWEKHTGSRKKNWKMSIRQKSTGELLINLLDDIPCGTSKYSNPGIKKEELLQLQANPYSPVCAKWTTERCAVCRWVEDWDYNKIIICNRCQIAVHQECYGACAVQDLTTWLCRACESPQQKRECCLCPVKGGALKPTDIDGLWVHVTCAWFQPKVSFPVDETMEPAMGIMSIPVEYFKKTCVICKQMHGACTQCYKCSTYYHAICASRAGYCMELQCSERSGRHITKMVSYCDFHSTPDPDNVLIVKTPEGVFSTKFFLQNGEKQTAARLVRKENHQEKVLPPIISDCLVAKCLTYEMSKYKKQPGEAIAHRIMGPRHHSQDFIDGLNACMDRKDDQSFSTFKERLRYLQKTENLRVSCGRSGIHGWGLFAARNIQEGQMVIEYRGEQVRRCVADLREAQYHREKKDCYLFKISEDVVIDATDKGNIARLINHSCMSNCYARIMTVSDDRSEIILIAKRDVSAGEELTYDYLFDPDESEDCRVPCLCKAPNCRGYMN

SEQ ID NO: 8823 - protein, 467 aa, Zea mays
  Clone ID: TF_ZmC1899_1.pep
YIPLRSIIKDGMVTWEGIVCNCCKKNLSVSDFMAHAGRSHPQSSLGLFLESGKSYTLCLVEAWSAESMSRRSNAWGRKVEAIDESDDTCGFCGDGGELLCCDNCPSTYHQACLSAKELPEGSWYCHNCTCQVCGGPFSEKEVSTFSAIFKCFQCGDAYHDTCIEQEKLPLEDQISQTWFCGKYCKEIFIGLRSHVGTDNILDSDLSWSILRCNNDGQKLHSVQKIACLAECNMKLAVALTLLEECFIRMVDPRTGVDMIPHVLYNKGSNFARVDYQGFYTVILEKGDEILCVASIRVHGTKAGELPFIATSVDFRRQGMCRILMSIIEKMLCSFNVKMLVLSAIPELVSTWVSGFGFKPIEDAERKQLHNVNLMLFPGTSLLTKRLDGFIMATKPGEEKDIHEVSGVPNLKRMPNGKANEHFKLHDLDLSGTEFKAEVSVNGPFRTLKHECGSAAWFQSTKLAVGEV

SEQ ID NO: 8824 - protein, 243 aa, Zea mays
  Clone ID: TF_ZmC2849_3.pep
PPFWPPAHLPPLRNTHGRIDCKQFIKHYDEHALRTPSNPFLLCVRCSIELLDHPKDYTTPPEELVLLPASATLGDLKVQASKAFQETYLMFQSFQTEQLPDFPNFSDTTPVKHVLGSGQLLRVRGRCTGDYRRIVQFRMERGLENWTVDCSCGAKDDDGERMLACDICGVWQHTRCSGISDFEEVPENFICRKCASPRKGDGRGGGGSNGGGTMEVTASGRCKDEIGASVGGAGKYGRMATVG

SEQ ID NO: 8825 - protein, 137 aa, Zea mays
  Clone ID: TF_ZM4317.C4.o3.fg.pep
MKLNIKIERRRLHMMINNHPTVSEVVIGSGEKQPKACNTNYETKSSSIKEPSSSSKLAEEPLPKKERQIIKEDGGGEDEAYPCGTCGGMYSENGVFWIGCDICDKWYHGDCVRITPAEATHIDQYSCPACSNKRSRE

SEQ ID NO: 8826 - protein, 249 aa, Zea mays
  Clone ID: TF_ZmC1419_1.pep
MGFLEDFQASVEALPSMLHRNYSLMRELDKSLHGVQLENEQRCQQEIEDIKHGLESGSITYDPAKLKFSEEAMEEQKHCVRIADEKVALATQTYDLVDAHIQQLDQFMRKLEEIRQEKEAAAAVTAGTAVATTATPTVNAGATTADANPKSGRSGERGRGGRKKAKVPTEQSVPVPVPLPPIDLELPVDPNEPTYCLCNQVSYGEMVACDNPNCKIEWYHYGCVGVKEQPKGKWYCPNCIGFQKKRKGK

SEQ ID NO: 8827 - protein, 241 aa, Zea mays
  Clone ID: TF_ZmC17187_4.pep
MADAASGRGHVVYPPRSAEDIFKDYRARRSAILRALTHEVEDFYAQCDPDKENLCLYGYANEAWEVALPAEEVPTELPEPALGINFARDGMNRRDWLALVAVHSDSWLLSVAFYYAARLNRNDRKRLFGMINELQTVFEVVSGARQQQSKERSSMDNGGRAKPVKIENNGKVTDEAYEDDSDHGETLCGTCGGIYNADEFWIGCDMCERWYHGKCVKITPAKAESIKHYKCPSCSSKRARQ

SEQ ID NO: 8828 - protein, 90 aa, Zea mays
  Clone ID: TF_ZmC3042_5.pep
LACDELGTRFLSRYCKCEMPYNPDDLMVQCDACKHWFHPSCVAMTIEQAKKLDHFVCSDCFKENGSKRLSNAYATSPNFEPKAEPKRQRR

SEQ ID NO: 8829 - protein, 118 aa, Zea mays
  Clone ID: TF_21211304.pep
VVTGTAKKEPKEKTPKSNIKTNKSGSKPSRHTEQPNSRVPKMPPPKDEESEEEEGEPQEDQESALCGACGLGYDDFWICCDLCETWFHGKCVKITPAKADHIKQYKCPSCTGSKRAKV

SEQ ID NO: 8830 - protein, 148 aa, Zea mays
  Clone ID: TF_LIB4740-015-R1-K1-E12.pep
AFYFGARFGFDKESRKRLFTMINNLPSIYEVVTGTAKKEPKEKTPKSNIKTNKSGSKPSRHAEQPNSRVPKMPPPKDEESEEEEGEPQEDQESALCGACGLGYDDFWICCDLCETWFHGKCVKITPAKADHIKQYKCPSCTGSKRAKV

SEQ ID NO: 8831 - protein, 234 aa, Zea mays
  Clone ID: TF_ZmC183_2.pep
IGYLERGLIGALTTDVEKFYVMCDPEKENLCLYGLPNETWEINLPAEEVPPELPEPALGINFARDGMDEKDWLSLVAVHSDSWLMSVAFYFGARFGFDKESRKRLFTMINNLPSIYEVVTGTAKKEPKEKTPKSNIKTNKSGSKPSRHTEPNSRVPKMPPPKDEESEEEEGEPQEDQESALCGACGLGYDDFWICCDLCETWFHGKCVKITPAKADHIKQYKCPSCTGSKRAKV

SEQ ID NO: 8832 - protein, 101 aa, Zea mays
  Clone ID: TF_uC-zmflteosinte083c04b1.pep
MADAEHLTHTQPSRHAEPNSRVPKMPPPKDEESEEEEGEPQEDQESALCGACGLGYDDFWICCDLCETWFHGKCVKITPAKADHIKQYKCPSCTGSTRAKV

SEQ ID NO: 8833 - protein, 102 aa, Zea mays
  unsure (1)..(102): unsure at all Xaa locations
  Clone ID: TF_LIB3632-049-Q6-K6-H9.pep
SSSKSXKPSSKVQSRAESRSKAKVPKDEEESGDDDGDEEAEEHDNXXLCGTCGTNDGKDQFWICCDNCEKWYHGKCVKITPARAEHIKQYKCPDCTNKRVRA

SEQ ID NO: 8834 - protein, 505 aa, Zea mays
  Clone ID: TF_ZmC1927_1.pep
LESKQPQDPLTTSYTCNGSSSLTPSSKEALLKNISSGKKGGSAGKVTNKDNRLHKLVFNVLLDGTEVAYYVDGQRKVDGYIKDQRIYCNHCNKVVSPSAFEAHAGEGSRRKPYDNIFTSNGVSLHELAMKISKDMELSERETDDLCRECGQGGDIFPCKICPRSFHPACVGLSKVPSEWYCDNCRNLVQKEKALAENKNAKAAGRQAGVDSIEQIMKRAIRIVPISDDLGGCALCKQKDFNNAVFDERTVILCDQCEKEYHVGCLKNQWQVELKELPEGEWFCCSSCSETRSSLDKIISDGAQLLVEPDLEIIKKKHVTRGLCMDTSKDLKWQLLSGKRTTEDGSILLSAAVPIFHQSFDPIREALTGRDLIPEMVNGRGPKEGMPGQDYSGMYCALLTVGSTVVSAALLRVMGGDVAELPLVATSQDVQGLGYFQALFSCIERMLVSLKIKHFVLPAAHEAEGIWMKKFGFSRTTPEELEAYLNGAHLTIFHGTSYLYKAVPMS

SEQ ID NO: 8835 - protein, 550 aa, Zea mays
  Clone ID: TF_ZmC2398_1.pep
MAATVRRAASSVLSRFLLTKPSPSPASAAGNNSALLGSGAAALHRFSTAPASAAAAAEEPIQPAVEVKHTQLLINGNFVDAASGKTFPTLDPRTGEVIARVAEGDSEDIDRAVAAARRAFDEGPWPRMTAYERCRVLLRFADLIERHAEEVAALETWDNGKTLAQAAGAEVPMVARCVRYYAGWADKIHGLVAPADGAHHVQVLHEPVGVAGQIIPWNFPLLMFAWKVGPALACGNTVVLKTAEQTPLSALYVANLLLEAGLPEGVLNVVSGFGPTAGAALSSHMGVDKLAFTGSTGTGQIVLELAARSNLKPVTLELGGKSPFIVMDDADVDQAVELAHQAVFFNQGQCCCAGSRTFVHERVYDEFVEKSKARALKRVVGDPFRDGVEQGPQIDGEQFNKILRYVQSGVDSGATLVAGGDRVGDRGFYIQPTVFADAKDEMKIAREEIFGPVQTILKFSGVEEVIRRANATPYGLAAGVFTRSLDAANTLSRALRAGTVWVNCYDVFDATIPFGGYKMSGVGREKGIYALRNYLQTKAVVTPIKNPAWL

SEQ ID NO: 8836 - protein, 246 aa, Zea mays
  Clone ID: TF_LIB4738-035-Q1-K1-E6.pep
MEVAVAVAAAAEAEEDEAAAAAATSTLQQSGRKQPRAIGSGRYRSVSRDLEEAAPKKPLPPSSQGLDLGGLPVLDVFQVYSCLRSFSKQFFLSTFSLETFVAALWSTYVNPLIDWVHFTLLRALKSHLEDSANEGDPSAVHCIRNLNWELLDLATWPIYLTEYLLTRGSELRLSESDGNDEGFKSTGVRRKKRGRGSSAKVAVGSSQFPEGSTEVDDGNSDECYLCGMDGNLLCCDGCPAAFHSKC

SEQ ID NO: 8837 - protein, 297 aa, Zea mays
  Clone ID: TF_ZmC13126_1.pep
CARGKEFKKPEKPINHKGTKEQVSMKPRSPPREGKHLEKPCEIVDVEQYEAVAEALRKSDEAADAKGASLKDVTRNGADEVAGQEQGREQEPVDVEDDDDGVRCAVCASTDGDPSDPIVFCDGCDLMVHASCYGNPLARAIPDGDWFCSPCVAGRGKPAAARRRSCCLCPAGGGAMKRTTEGKWAHISCALLVPEVFFRDPDGRDGIDCSRVPAHRFARGCYVCGGNNNGCALECSQPKCGLGFHVSCGLGAGLCIEYQEGKGGGGAIVAGFCREHTELWEKQQLTGKYKIVARGQE

SEQ ID NO: 8838 - protein, 102 aa, Zea mays
  Clone ID: TF_LIB4073-010-Q6-K2-B4.pep
MVRYRVRSLSERSHEVYRQQLHGQEQGHHGQEEQGLSPEHVEVYERTHGQSHYRRRHCSRRRLHRIHRRQHRSCRRRKRRSCRHRRRHRRGCRTRKRTCRRH

SEQ ID NO: 8839 - protein, 128 aa, Zea mays
  unsure (1)..(128): unsure at all Xaa locations
  Clone ID: TF_LIB3357-002-P1-K1-H2.pep
MASVGGAVAGGVGAPTPHVLAVDDSSVDRAIIAAILRSSRFRVTAVESGKRALELLXEPNVSMIITDYCMPEMTGYELLKKVKESSKLKQIPVVIMSSENVSTRIRRCLEEGAEDFLVKPVRASDVSR

SEQ ID NO: 8840 - protein, 401 aa, Zea mays
  Clone ID: TF_ZmC617_1.pep
MDNALRITDASSRRPTNLGKDLAMTEPAADRKCQSLVMENNAVKEKNPGEKSKSAVIGHADSYPSQFLETNLGKQQYRNGYKNQEFREKDIFNHSNSSAFSRYGNKRIEPSGEIQFFPSPCVIGQGHVHGKNPVFQPNGVLLPPNEHNTGESTRQARISLDSRTEGAAILCSTSAREDAGANSSSHRKDSMSHPSYGFIPVPIPVGAMMPYHCGAILQPVYYPQGPLMHCNSSAINKATIHQTSGQSNYREDCGSGRPSQVDEHKQSEEKHQLHHSRQIHRESGQPVDMVRAHMDHANQSASCSRDICKGSGCTGSGEADTNANTTVALESGNESGIQNSDRSRREAALMKFRMKRKDRCFDKKVRYHSRKKLAEQRPRVKGQFVSQKLKAAMATEAETDS

SEQ ID NO: 8841 - protein, 67 aa, Zea mays
  unsure (1)..(67): unsure at all Xaa locations
  Clone ID: TF_LIB3180-050-P2-M1-A9.pep
CFFFLLESTIMEHDAFKNIPIIMMSSHDSVSIDFKCMLKGAAYFLVXPIRKIELRNLWHLDWRKTTC

SEQ ID NO: 8842 - protein, 194 aa, Zea mays
  Clone ID: TF_ZmC8_2.pep
MFHPVIAVDSARKAMEFLGLKDGGEEQAVDMVLTDYCMPEMTGYDLLKAIKALNPLEPIPVVVMSSEDEPQRISRRCLSAGAEDFIVKPLQSKDVQRLRNCSAAARPSKGAAPCEAAVVAKRNQKPPHPAGAASPSGRRASLAGVAMVLHSSGVEYLPLLLKLVVLAYAALCLGELLHRWASSDGRCSLSPWCA

SEQ ID NO: 8843 - protein, 73 aa, Zea mays
  Clone ID: TF_uC-zmrob73055d04b1.pep
SPPASASAAANGRALVRWDQILPRRFLRVLLVEHDDSTRHIVTALLRKCGYRVDDVADRMKACDVMLERAYDF

SEQ ID NO: 8844 - protein, 131 aa, Zea mays
  unsure (1)..(131): unsure at all Xaa locations
  Clone ID: TF_LIB4172-033-R1-K1-B10.pep
PHRAVTPRLLEKLGFRVPSVASGVQSTRSFAPEPSFQVVVLGLPLQRTDGLKMARPIRKFSNKNWLPLIVALTARIDSKVPNGCPRSGINGLIQKPAPLTALGNXLYRVLQNRLKGPPMVFLAFKIFKKPL

SEQ ID NO: 8845 - protein, 356 aa, Zea mays
  unsure (1)..(356): unsure at all Xaa locations
  Clone ID: TF_700170928_FLI.pep
MVWFEYLVVEVKVAFRRRSVPSQKVPSLELSLKRSRSCGDGANDTVNDDEQRNSALRRSNLSAFTRYHTSAASNQGGTGLVGSCSPHDNSSEAVKTDSTYNMKSNSDAAAIKQGSNGSSXNNDMGSTTKDVVTKPSTNNERVMLPSAIKANGYTSTFHPVQQWMVPDNATAGKAKADEVANNAGRNSHPGDVQSNLTQQHRPTLHYVHFENSGSGALQCGSSNVFDPPLEGQATNNYGVKAGSNSGSNKGQNNGSTAGASTAAANAGRTDTEIRAIDKSGPGGGSGSGNDTYVRRLAASMTPRQEQLKKYREKKKDRNFGKKVRYQSRKRLADQRPRVRGQFVKQAVQNQEGDGER

SEQ ID NO: 8846 - protein, 169 aa, Zea mays
  unsure (1)..(169): unsure at all Xaa locations
  Clone ID: TF_ZmC751_14.pep
MTVDELKLQARASGGHGAKDQFPVGMRVLAVDDDPTCLKILENLLLRCQYHXATALKLLREKKDQFDLVISDVHMPDMDGFKLLELVGLEMDLPVIMLSANGETQTVMKGITHXACDYLLKPVGIGIRKKIKKKKKKKKKCEKKKKKKKQKKKKKKKIKQKKKKKMKHT

SEQ ID NO: 8847 - protein, 109 aa, Zea mays
  Clone ID: TF_ZmC2028_4.pep
VTHRLLEKLGCRVLSVASGVQCTSSFAAEPSFQLVVLDLALQRTDGLEVARAIRKFSSNSWLPLIVALAARIDDKVRDGCQRSGISGLIQKPATLAALGDELYRVLQNS

SEQ ID NO: 8848 - protein, 135 aa, Zea mays
  Clone ID: TF_11041691.pep
MASRKCLGGEGSAPAPHVLAVDDSSVDRAVIAGILRSSQFRVTAVDSGKRALELLGTEPNVSMIITDYWMPEMTGYELLKKIKESSRLKEIPVVIMSSENVPTRINRCLEEGAEDFLLKPVRPSDVSRLCSRVLR

SEQ ID NO: 8849 - protein, 61 aa, Zea mays
  Clone ID: TF_ZmC8939_5.pep
SSEFGSRAHWHVPILAMTADVIQATFEKCMQCGMDGYVSKPFEEQQLYSAVAHFLETDEIE

SEQ ID NO: 8850 - protein, 279 aa, Zea mays
  Clone ID: TF_ZmC5787_2.pep
MAARLRRSPISSPIPPPSLCISLYPPPHSSVETTYPACSTYLRSPAMTVLDAESRFHVLAVDDSIIDRKLIEMLLKSSSYQVTTVESGNKALELLGLRDNGAEDASPPSSSSSSSSSSSPDHQEIDVSLIITDYCMPGMTGYDLLKRVKGSSSLKDIPVVIMSSENVPARISRCLQDGAEEFFLKPVKPADMKKLKSHLLKRKQPNQKNKPQAQAVESPEQQLDPHPQPVHEPEEAAADRNGVNKRKAAAMEEGLTVVVTAPESTKPRRLSTSSLTVET

SEQ ID NO: 8851 - protein, 235 aa, Zea mays
  unsure (1)..(235): unsure at all Xaa locations
  Clone ID: TF_ZmC5787_4.pep
MTVLDAESRFHVLAVDDSIIDRKLIEMLLKSSSYQVTTVESGNKALELLGLRDNGAEDASPPSSSXSSSSSSSPDHQEIDVSLIITDYCMPGMTGYDLLKRVKGSSSLKDIPVVIMSSENVPARISRCLQDGAEEFFLKPVKPADMKKLKSHLLKRKQPKQKNKPQAQAVESPEQQLDPHPQPVHELELEEAAADRNGVNKRKAAAMEEGLTVVVTAPESTKPRRLSTSSLTVET

SEQ ID NO: 8852 - protein, 235 aa, Zea mays
  Clone ID: TF_ZmC8_3.pep
MEAAAGGVEAEGVMRVLVVDDSPVDRRVAQLLLSSDSCAGSFHVIAVDSARKAMEFLGLKDGGEEQAVDMVLTDYCMPEMTGYDLLKAIKALNPLEPIPVVVMSSEDEPQRISRCLSAGAEDFIVKPLQSKDVQRLRNCSAAARPSKGATQCEAAVVAKRNHKPHPAAAGAGAASPSGRRASLAGVAMVLHSSGVEYLPLLLKLVVLAYAALCLGELLHRWASSDGRCSLSPWCA

SEQ ID NO: 8853 - protein, 158 aa, Zea mays
  Clone ID: TF_ZmC339_6.pep
MAAAAAAPTSVVPSPSPAPKASDSRKTVVPVDASELEKHVLAVDDSSVDRAVIARILRGSRYKVTAVESATRALELLALGLLPDVSMIITDYWMPGMTGYELLKRVKESAALRGIPVVIMSSENVPTRITRCLEEGAEGFLLKPVRPADVSRLCSRIR

SEQ ID NO: 8854 - protein, 176 aa, Zea mays
  Clone ID: TF_ZmC10160_1.pep
RQTMQGNIWAVLDGQGLPESMTLVLRFQLQPSLASSNLLGGSFDQEHYSSLPSNQIAGLKVLLIDDDEINLVVARKLLERLGCTVSSGSGLMDSSSACASFQLVMVNLEMSAIDPLDAASRIRQQYRSSHWPLVMAMTSEQNVWEKCAQSGINGVLKKPLVLLEVKEELERILQNT

SEQ ID NO: 8855 - protein, 124 aa, Zea mays
  Clone ID: TF_ZmC33_1.pep
MATQSPHVLVVDHSRVDCLVASIVLNSFNIRVTVAGGAMEALEFLDANNSHVDLILTDYCMPDMTGYDLLREVKESPRLKHIPVVITCTDVIPERIIECFEGGAEEYMIKPLKVSDVPRILSYM

SEQ ID NO: 8856 - protein, 566 aa, Zea mays
  Clone ID: TF_ZmC131_1.pep
LGMLQMLMDTDLDTTQQDYVRTAQASGKTLVSLINEVLDQAKIESGKLELEVVPFDLRTVCDDILSLFCGKAQEKGLELAVFVSDQVPQTLIGDPGRIRQIITNLVGNSIKFTEKGHIYLTVHVVEEIMHCLEVETGTQYTNTLSGYPVANRKRSWENFRLFSRELNSSEMPFAPIASDSISLMISVEDTGAGIPFDAQSRVFTPFMQVGPSIARIHGGTGIGLSISKCLVGLMRGEIGFASKPQVGSTFTFTAVLTRVHSSRNENKSSEFKEINALVVDHRPVRAKVTKYHLQRLGVQTELTTDLDQYISKNNCGSQIAKLVLIDKETWLKESHSMPLLVTKLRNKDQPDSTKLFLLENPKSSVKSNSHIFREYNLNVIMKPLRASMLQVSLQRALGGIDKLHCRNGVVGNSTLGSLLHKKRIIVVDDNIVNLKVAAGALKKYGAEVTCADSGKKAITLLKPPHSFDACFMDIQMPEMDGFEATKRIRVMERDLNEQIERGEAPPECAGLRQWRTPILAMTADVIQATHEQCLKSEMEGNVSKPFEGEQLYREVARHFSNRGELQ

SEQ ID NO: 8857 - protein, 157 aa, Zea mays
  Clone ID: TF_ZmC339_3.pep
MAAAAPAPASVAPSSAPKATGDSRKTVVSVDASELEKHVLAVDDSSVDRAVIARILRGSRYRVTAVESATRALELLALGLLPDVSMIITDYWMPGMTGYELLKCVKESAALRGIPVVIMSSENVPTRITRCLEEGAEGFLLKPVRPADVSRLCSRIR

SEQ ID NO: 8858 - protein, 153 aa, Zea mays
  Clone ID: TF_ZmC353097_1.pep
LGRGVALSGLVKASSVRPPMAGAAAERKAIRVLLVEDEEIHRVLARALLRSACGGVELHEAGTGAEAVRRVRDGGAAAAYDLIITDWKMPVMDGHEATRQIRAMGVTTPIVGLSSDTLPPDVDAFIKAGADDFTPKPLSKEKLVRILTKFHLA

SEQ ID NO: 8859 - protein, 540 aa, Zea mays
  Clone ID: TF_ZmC745_1.pep
FDLRSILDDVISLFSSKSREKGIELAVYVSERVPELLLGDPGRFRQIITNLVGNSIKFTERGHIFVQVHLADHSNLATEPKVESVANGMNGHKDEKTAVATSVSLNTLSGFEAADSRNSWENFKLLLSYEKNEMPYESVSDKVTLVVSVEDTGIGIPLDAQAKVFTPFMQADSSTSRTYGGTGIGLSISKCLVELMGGQINFVSRPHVGSTFTFTAVLKRCDRSAIGDSKPVMLHPLPSSFKGLSALLVDRRPVRATVTKYHLQRLGIACDVVATIELALGVLSGRNGSSLTSMKQPCMLLIESDSWGFNIDVSLRSRLLEMKQNGHTHVLPKIILLAAAESGKLKEHYAVDSVITKPLKASALAACLFQTLGIKQSSNERSDNSGSLYGLLLGKNILVVDDNKVNLRVAAGTLKKFGAKVECVESGKDALALLQVPYKFHLCLMDIQMPEMDGFEATKQIRAMEAKANEQAVACDDSEIDGATRAARWRLPVLAMTADVIQATHEECTKCGMDGYVTKPFEEKQLFQALQKFLDPGMSC

SEQ ID NO: 8860 - protein, 148 aa, Zea mays
  Clone ID: TF_LIB4977-010-R1-K1-B10.pep
MEVAGACCHAGEERKVAVPIGNDAEVEPCVIAVDDSSVDRAIVTALLRRSKYRVTAVDSGKRALEILGSEPNVSMIITDYWMPEMTGYDLLKKVKESSKLKRIPVVIMSSENVPTRITRCLEEGAEDFLLKPVRPSDISRITTRMLLH

SEQ ID NO: 8861 - protein, 75 aa, Zea mays
  unsure (1)..(75): unsure at all Xaa locations
  Clone ID: TF_ZmC8939_3.pep
EKKIXDMIMMGEISANNYGNKAHWHVPILAMTADVIQATFEKCMQCGMDGYVSKPFEEQQLYFAVAHFLETDETE

SEQ ID NO: 8862 - protein, 767 aa, Zea mays
  Clone ID: TF_ZmC2028_1.pep
MVVGTALLRGVSSAWILLFLSSLLLSPSAASVDFGHCGGCDDADDGALSSTYNILQCQKVSDFLIAAAYFSIPLELLYFATCSDLFPLKWIVLQFGAFIVLCGLTHLITVFTYEPHSFHLVLALTVAKFLTALVSFATAITLLTLIPQLLRVKVRENFLMNKARELDREVGRMKRKEEASWHVRMLTQEIRKSLDRHTILYTTMVELSKALELQNCAVWMPDETRSTMILTHQLRERDIMDPQKHSIPIDDPDVQEIKATKDAKVLGPDSALGVSSRSKHEAGPVAAIRMPMLRVSNFKGGTPEVMQTSYAILVLVLPNDGSLGWGRRELEIVEVVADQVAVALSHAALLEESQLMREKLAEQHRDLLQAKDEAMRAGDARNSFQTAMYDGMRRPMHSILGLVSMMQQESMNPEQRLVMDAIAKTSSVASTLMNDVMQTSTMNCEHLSLVRRPFNLHSFIKEVVGVVRCLTGCKGVEFEFQVENSLPERIIGDEKRVFHIVLHMVGTLTDRCNAGCISLYVNVHNEVEDRHNHDWMLRRANFSGGYVCVKFEIRIRKSKGYLLSSSSSQISQGSKPNNSEMGLSFNMCKKIVQMMNGNIWSVSDSKSIGETIMLVLQFQLEPVTPVSGASSDLYRSSAIPNFNGLRVLLADSDCTNRAVTHRLLEKLGCRVLSVASGVQCISSFAAESSFQLVVLDLDMQTMDGFEVARAIRKFSSNSWLPLIIALAARIDDNIRDRCQRSGVNGLIQKPVTLAALGDELYRVLQNN

SEQ ID NO: 8863 - protein, 768 aa, Zea mays
  Clone ID: TF_ZmC2028_2.pep
MVVGTAPCGVSVSSVWILLLLSSLLLSPSAASVDFGHCGGCDDADDGALSSTYNILQCQKVSDFLIAAAYFSIPLELLYFATCSDLFPLKWIVLQFGAFIVLCGLTHLITVFTYEPHSFHLVLALTVAKFLTALVSFATAITLLTLIPQLLRVKVRENFLMNKARELDREVGRMKRKEEASWHVRMLTQEIRKSLDRHTILYTTMVELSKALELQNCAVWMPDETRSTMILTHQLRERDIMDPQKHSIPIDDPDVQEIKATKDAKVLGPDSALGVSSRSKHEAGPVAAIRMPMLRVSNFKGGTPEVMQTSYAILVLVLPNDGSLGWGRRELEIVEVVADQVAVALSHAALLEESQLMREKLAEQHRDLLQAKDEAMRAGDARNSFQTAMYDGMRRPMHSILGLVSMMQQESMNPEQRLVMDAIAKTSSVASTLMNDVMQTSTMNCEHLSLVRRPFNLHSFIKEVVGVVRCLTGCKGVEFEFQVENSLPERIIGDEKRVFHIVLHMVGTLTDRCNAGCISLYVNVHNEVEDRHNHDWMLRRANFSGGYVCVKFEIRIRKSKGYLLSSSSSQISQGSKPNNSEMGLSFNMCKKIVQMMNGNIWSVSDSKSIGETIMLVLQFQLEPVTPVSGASSDLYRSSAIPNFNGLRVLLADSDCTNRAVTHRLLEKLGCRVLSVASGVQCISSFAAESSFQLVVLDLDMQTMDGFEVARAIRKFSSNSWLPLIIALAARIDDNIRDRCQRSGVNGLIQKPVTLAALGDELYRVLQNN

SEQ ID NO: 8864 - protein, 167 aa, Zea mays
  Clone ID: TF_ZmC745_2.pep
ITQSSNERRDNSGSLHGLLLGKNILVVDDNKVNLRVAAGTLKKFGAKVECVESGKDALASLQVPHKFHLCLMDIQMPEMDGFEATKQIRAMEAKANEQAVACDDSETDGATRAARWHLPVLAMTADVIQATHEECTKYGMDGYVTKPFEEKQLFQALQKFLDPGMSS

SEQ ID NO: 8865 - protein, 58 aa, Zea mays
  Clone ID: TF_uC-zmroteosinte077a02a1.pep
VGVRQWRTPILAMTADVIQATHEQCLKSEMDGYVSKPFEGEQLYREVARFFLNQDQVQ

SEQ ID NO: 8866 - protein, 785 aa, Zea mays
  Clone ID: TF_ZmC8939_1.pep
YSRSTGKGALTSPFKLLKSNHLGVVLTFTVYKYDLPPNATPQERIHATLGYLGASFDVPSLVDKLLEQLASKRKIVVNLYDTTNHTSPIEMYGSDFTPSGDLHISSIDFGDPTRKHEMHCRFKHEPSLPWSAIIISTAVAIIVLLVGHIIYATLNSLEKAEHDYRVMRELKGQAEAADIAKSQFLATVSHEIRTPMNGVLGMLQMLMDTELDTTQQDFVVTAQESGKVLINLINEVLDLAKIESGRIELEAVPFDVRDILDNVISLFYDKSQAKGIELAVLVSDQVPDVLIGDPWRFRQIITNLVGNSMKFTEQGHIFVQVHLVKELNRKGNNFCDVSAHNREILYDSDNSMLWNTLSGLEVADSWRSLENFTMFKNSNGETDTIRLAVRVEDTGIGITKDAQMRIFTPFMQADSSTSRTYGGTGIGLSITKRLVELMGGEIGFTSKSGVGSTFSFTAIFKENRGCPGDMKRYYSEPTPLDFQGMRALIIDGRSARAEVTMYHLRRLGIQCSLVATSESESASSALMKACTSSKNNPDMVLVDTEAWGKGSGLAFYHRFVDCQLKGAHKFSQPMPKTILLGSSISPVESDYLRLTGFGDCIRKPLRLSTIVACLRKTLGVGVTRQQSRDQSLVLQSVLTGKQILVVDDNAVNRKVAAGSLKKYGSKVTCVDSGSDAIDMLKPPHTFDACFMDVQMPEMDGFEATRLIRSIEKKINDMIMMGEISANNYGNKAHWHVPILAMTADVIQATFEKCMQCGMDGYVSKPFEEQQLYFAVAHFLETDETE

SEQ ID NO: 8867 - protein, 479 aa, Zea mays
  Clone ID: TF_ZmC131_2.pep
PQTLIGDPGRIRQIITNLVGNSIKFTEKGHIYLTVHVVEEIMHCLEVETGTQYTNTLSGYPVANRKRSWENFRLFSRELNSSEMPFAPIASDSISLMISVEDTGAGIPFDAQSRVFTPFMQVGPSIARIHGGTGIGLSISKCLVGLMKGEIGFASKPQVGSTFTFTAVLTRVHSSRNENKSSEFKEINALVVDHRPVRAKVTKYHLQRLGVQTELTTDLDQYISKNNCGSQIAKLVLIDKETWLKESHSMPLLVTKLRNKDQPDSTKLFLLENPKSSVKSNSHIFREYNLNVIMKPLRASMLQVSLQRALGGIDKLHCRNGVVGNSTLGSLLHKKRIIVVDDNIVNLKVAAGALKKYGAEVTCADSGKEAITLLKPPHNFDACFMDIQMPEMDGFEATKRIRVMERDLNEQIECGEAPPECVGVRQWRTPILAMTADVIQATHEQCLKSEMDGYVSKPFEGEQLYREVARFFLNQDQVQ

SEQ ID NO: 8868 - protein, 200 aa, Zea mays
  Clone ID: TF_ZmC779_1.pep
MVLELNSQAERVSSSRGDLVSVSGAAPCKVPEEQSLHKKSKCSPTSNKAKILLVEDNKVNIIVAKSMSQQLGHGIDIVNNGMQAIRAVQQHQYDLILMDVHMPEMDGLQATKLIRSFENTGCWDVSVKPEDNPMITDSAISSDSAHAKKQGQRVPIIAMTANSFAESAEECLAAGMDSYISKPVNFQNINECLQRYLVSQ

SEQ ID NO: 8869 - protein, 738 aa, Zea mays
  Clone ID: TF_ZmC887_1.pep
QFIGNTTTSCARNKDIEVTGYDVTNASDAMVLYGPSSLDEQVPFLHVSMLDFGDPFRKHEMRCRYRQKLPMPWSAITNPLGTFVIWMLLGYSIAAAYSRYDKVTEDCRKMEELKTQAEAADVAKSQFLATVSHEIRTPMNGVLGMLDMLLGTDLTMTQKDYAQTAQMCGRALITLINDVLDRAKIEAGKLELEAVPFDLRSLMDDVVSLFSSKSREKCIELAVFVCDNVPKVVIGDPWRFRQILTNLVGNAVKFTERGHVFVRVCLAENSNMEANQVLHGAMNGKGGRVESTANGAFNTLSGFEAADRRNSWQYFKLLLSDKESLLDDLEGENSNQSDSDRVTLAISIEDTGVGIPLQAQDRVFTPFMQADSSTSRNYGGTGIGLSISKCLAELMGGQISFTSHPSVGSTFTFSATLKHSYKDISGDSSRSLTEALPTAFKGMKAILVDGRPVRSAVTRYHLKRLGILLQVVNNMNAVVKAFPGQNGAAGSREKASILFIESDFWRPETDVQLLNHLREQKNGQLSDGHKVVLLVTSEADKDKYGSIFDIVMCKPIRASTIASSIQQLLKVEIAERKDNQNRPSFLRSLLVGKNILVVDDNKVNLRVAAAALKKYGANVSCVESGKDAISLLQPPHRFDACFMDVQMPEMDGFEATGQIRQMELKANEERKNKLAPIEGATTAEYHLPVLAMTADVIQATYEECIKSGMDGYVSKPFDEEQLYQAVSRLVVGTTDSAV

SEQ ID NO: 8870 - protein, 156 aa, Zea mays
  Clone ID: TF_ZmC339_1.pep
MAAAAAAPASVAPSSPKAAGDNRKTVVSVDASELEKHVLAVDDSSVDRAVIARILRGSRYKVTAVESATRALELLALGLLPDVSMIITDYWMPGMTGYELLKRVKESAALRGIPVVIMSSENVSTRITRCLEEGAEGFLLKPVRPADVSRLCSRIR

SEQ ID NO: 8871 - protein, 686 aa, Zea mays
  Clone ID: TF_ZmC4195_2.pep
MPANDHHPNGLLQESAPGLQHDDMENQQQQVCWERFLLKDTLNVLLVESDASTRQVVSALLRCCMYQVISAKNGQQAWSYLEDKGNNIDLVLTEVFMPGVSGISLLNRIMRHSVFKNIPVIMMSSSDDMSTVFKCLSKGAVDFLVKPIRKNELKNLWQHVWRQRCHSSSGSGSESGIQTQKCAKSKGVNESGNNSGSNDDEAGMGLNARDDSDNGSGTQAQNLWTKLAVEIDSPQATSLDQLADPPNSTCAQVIHSKSEICSNRWLPDKSNRNCKKPKNTNDDFKGKDLEIGGPENLYMGHQSSPNGRSIKAADHENNSKESMMENLEEPTVRAADLIGSMAKNMDTQQAARAAEDTPNFSSKVPEGKGKNNQNDKYVLPSLELSLKRSRSCGDGANNKNTVKDDEQRNCVLRRSNLSAFTRYHTSAASNQGGTGLVGSCSPHDNSSEAVKTDSTYNMKSNSDAAPIKQGSNGSSNDNDMGSTTKDVVTKPMLPSAIKANGYTSAFHPVQQWMVPANATAGKTKADENTARNHYVHFENGGSGALQCGSSNVFDPPLEGQATNNYGGVKAGSNSGSNKGQNNGSTAAANAGLAETEIQAMDKSGVGGGNGNGSGSGSGNDTYVRRLAANMTPRQAQLKKYREKKKDRNFGKKVRYQSRKRLADQRPRVRGQFVKQAVQNQDGARER

SEQ ID NO: 8872 - protein, 186 aa, Zea mays
  Clone ID: TF_ZmC887_2.pep
CKPIRASMIASSIQQLLKVEMPERRDNQNRPSFLRSLLVGKNILVVDDNKVNLRVAAAALKKYGANVSCVESGKDAISLLQPPHCFDACFMDVQMPEMDGFEATRQIRQTEMRVNEERKNKLVLIEGSTFVEYHLPVLAMTADVIQATYEKCIKSGMDGYVSKPFDEEQLYQAVSRLIVGTTDSTV

SEQ ID NO: 8873 - protein, 816 aa, Zea mays
  unsure (1)..(816): unsure at all Xaa locations
  Clone ID: TF_ZmC4195_1.pep
MPANDHHPNGLLQESAPGLQHDDMENQQQQVCWERFLLKDTLNVLLVESDDSTRQVVSALLRCCMYQVISAENGQQAWAYLEDKRNNIDLVLTEVFMPGVSGISLLSRIMSHNICKNIPVIMMSSSDAMSTVFKCLSKGAVDFLVKPIRKNELKNQWQHNXRQHRHILSCVFEKKKMFSYLEHSLEVVEEKVAIRRCSSLLIILIAKNVLTVEARWKKLVRDPMQVTSVRVLIIINRRTHYXNYVVQIDCPQAISLDQLSDSATRTGAPVIHSKSEICSHRWLPGSSNRNCKKQKYTNDDFKGKDLEIDGPGNLYMDHQSSPNERPIKAADHENNSKESMMGNLGDATVRAADLIGSMAKNMDAQQAARAADTPNFSSEVPEGKGKNDDFKGKDLEIGGPRNLYMDHQSSPNERPIKAADHENNSKESMIENLEEPTVRAADLIGSMAKNMDTQQAARAAEDTPNFSSKVPEGKGKNDQHDNYVLPSLELSLKRSRSCGDGANDTVNDDEQRNSALRRSNLSAFTRYHTSAASNQGGTGLVGSCSPHDNSSEAVKTDSTYNMKSNSDAAAIKQGSNGSSNNNDMGSTTKDVVTKPSTNNERVMLPSAIKANGYTSTFHPVQQWMVPDNATAGKAKADEVANNAGRNSHPGDVQSNLTQQHRPTLHYVHFENSGSGALQCGSSNVFDPPLEGQATNNYGVKAGSNSGSNKGQNNGSTAGASTAAANAGRTDTEIRAIDKSGPGGGSGSGNDTYVRRLAASMTPRQEQLKKYREKKKDRNFGKKVRYQSRKRLADQRPRVRGQFVKQAVQNQEGDGER

SEQ ID NO: 8874 - protein, 128 aa, Zea mays
  Clone ID: TF_ZmC131_3.pep
GALKKYGAEVTCADSGKKAITQLKPPHSFDACFMDIQMPEMDGFEATKRIRVMERDLNEQIERGEAPPECAGLRQWRTPILAMTADVIQATHEQCLKSEMDGYVSKPFEGEQLYREVARFFQNQDQVQ

SEQ ID NO: 8875 - protein, 157 aa, Zea mays
  Clone ID: TF_ZmC311956_1.pep
MGTQIVREQTSGSLTAIVVDENLCHARAASCMLANLQCKVIVYASPVDALKFLKDHQRDTDFALVEVNMKEMHGFQFLDMSRKLHKSLQVIMMSADTTWPTMKRSVELGARFLIKKPLDANTMNNLWQHLDLKFQRTDKIKALFPGWSYCDMFSFSF

SEQ ID NO: 8876 - protein, 97 aa, Zea mays
  Clone ID: TF_LIB5117-009-Q1-PF1-H11.pep
PSMDGLQATKLIRCFENTGCWDASVKPEDNEMIANSAISSDCVQDKKGKRVPIIAMTANSFAESADECLAAGMDSYISKPMNFQKTKECLQRYLLSQ

SEQ ID NO: 8877 - protein, 107 aa, Zea mays
  unsure (1)..(107): unsure at all Xaa locations
  Clone ID: TF_ZmC353097_2.pep
ALLRSPVGGVELDEARTGXEAVRRVRDGGAAGAYDLIITDGKMPVMDGREATRQIRAMGVTTPIVGLSSDTFPSDVDAFLKAGADDFTPKPLSKEKLVRILAKFNLA

SEQ ID NO: 8878 - protein, 61 aa, Zea mays
  Clone ID: TF_LIB3205-080-P1-N1-G10.pep
ATLRHTPFHSIHLPCFMDSTELPKTPSELMNYMLLIQFLLTFLLGLVLNLICSHSTLYFPH

SEQ ID NO: 8879 - protein, 336 aa, Zea mays
  unsure (1)..(336): unsure at all Xaa locations
  Clone ID: TF_ZmC9712_3.pep
MQLPLLIKILLLCHQLPLPVINWDQGRVNEHTSVCRINRRFHQLPEFDQLKKSCRKRLAGHNERRRRPPPGPLASRYGRHAASLGGNQKLVFTLXCRLGDQSSRLFFVTANVHVLGPEEPGRLRSFMLDFSYPRVSSAMRGGFPAVRPGGERVPGGIQWQAGLDPRHHQGAVAGYGAHYGSEGGSSSSARPPVFPGPELPPGGCLAGVPADSSCALSLLSTQPWDAAHSHSHSHAAPTAGFDGGSPVAPSLMAASSYIAPSPWTETDSWGHEGGRSVPQLPPDDVPLGEVHSGSSSHHGQFSGELELALQGNRPAPGSAAPPAPRNNQGSAGTFDQ

SEQ ID NO: 8880 - protein, 274 aa, Zea mays
  Clone ID: TF_ZmC14746_1.pep
DADKRSCRKRLDGHNRRRRKPQPDTMASASFIASQQGTRFSPFAHPRLEASWPPGVMKTEESPYHITHQIPLGSSSSSRQQHFVALGAATPAYAKEGRRFPFLQEGEISFATGVVLEPPAAAPACQPLLRTGAPSESSGAGGSKMFSDQGLARVLDSDCALSLLSAPANSSGIDVSRMVRPTEHVPMAQQPVVPGLQFGSASWFPRPQASTGGSFVPSCPAAVEGEQQLNAVLGPNDSEVSMNYGGMFHVGGGSGGGEGSSDGGTSSSMPFSWQ

SEQ ID NO: 8881 - protein, 76 aa, Zea mays
  Clone ID: TF_cC-zmle189110e02d1.pep
TMKTTTREGLKKRGKWSFIMSTTDQSVNVSYKLVYNFSFSRCCINSSTLHLGSPTPLQLVPETKGIANFSSLFISC

SEQ ID NO: 8882 - protein, 68 aa, Zea mays
  Clone ID: TF_ZmC200243_1.pep
MSSEEWITHVFQCGPHPFRFHQLLEFDQLKESYHRRLIGHNERRRRPPPGPLVSHYGRLAALFGGDKS

SEQ ID NO: 8883 - protein, 47 aa, Zea mays
  Clone ID: TF_ZM5059.C4.o2.fg.pep
MIYRADLSKCRDYRRRHKVCEAHSKTLVVVVAGREMRFCQQCSSLFI

SEQ ID NO: 8884 - protein, 56 aa, Zea mays
  unsure (1)..(56): unsure at all Xaa locations
  Clone ID: TF_LIB3069-037-Q1-K1-C4.pep
STRPASCCRFHLLGEFDKVKRSCRKRLDGHNRXRRKPQPDPLNPAGLFGNHHGVTR

SEQ ID NO: 8885 - protein, 177 aa, Zea mays
  Clone ID: TF_ZmC18262_3.pep
AASGDGSDDSGAANNNGALPLPLPPPHGVEDNNSPAELAGAGGTSRAVARRVAAAGASPAAAARRGAALNAAAAGGAGPSCQVERCSADMGVEKRYNRRHKVCDAHRKASVVLLAGLRQRFCQQCSRFHELSHFDDTKRSCRLRLAGHNERRRRNPAEAQDQHGGRGDPGSHHLQIR

SEQ ID NO: 8886 - protein, 161 aa, Zea mays
  Clone ID: TF_ZmC182445_1.pep
PGHAQQAAPACSVQGCDADLSQCRDYHRRHKVCVAHSKAPFVTVAGQQQRFCQQCSRFHLLEEFDEVKRSCRKRLDGHNRRRRKPQPDPLNPAAGLFGNHHHGGVTRFTSYPHRFTKSIAKPEWAVVKTETDAFQDQYYPAVHLNGAGAGALFHDKDRKHF

SEQ ID NO: 8887 - protein, 311 aa, Zea mays
  Clone ID: TF_ZmC1701_1.pep
QVEGCKVDLSSAKEYHRKHRVCEPHSKAPKVVVAGLERRFCQQCSRFHGLAEFDQKKKSCRRRLNDHNARRRKPQPEALSFGSSRLSAMFYDTRQHTSLLFGQGPYGQMRSCASSSWDNPGGGFKFAETKGPWLRAGGVDGLHQSSQQVWNNFMPHGVHQDFDGFTAFKGTNAKVLHQGVEASAVASNQNGAPQPDLHRALSLLSNSWAGAGTDQHPTAQLRHHAALSSSLAASSVSVAQASPAGLWQDGGGGAALSHHDYAHAQARFQAIDALGGAGAAAAVAAGQELLQLPRPPSPYDDGSSSRYDLMR

SEQ ID NO: 8888 - protein, 244 aa, Zea mays
  unsure (1)..(244): unsure at all Xaa locations
  Clone ID: TF_ZmC18238_6.pep
MQREVGPQVAPPLFLHQIQPMPPHAAAAAKKRGHPWPAAGAAEAGAGNWNPRLWDWDSRALTARPSSDALRLAGGQPQPAAEAQRQGARRXLNLQLGLREDSTTPMDASPTPPAASLSPSPPASGQDPVVRPSKRVRSGSPGSAGGDGGGAANGGAGYPMCQVDDCRADLTGAKDYHRRHKVCETHSKTIRAVVANQAQRFCQQCSRFHPLAEFDEGKRSCRRRLAGPNPRRRKTPPADVFFAS

SEQ ID NO: 8889 - protein, 297 aa, Zea mays
  Clone ID: TF_ZmC735_1.pep
PPTRPPTRPVNGLELRFCQQCSRFHNLAEFDQQKKSCRKRLAGHNERRRRPPPGPLASRYGRLAAPLGEEPGGRFRSFMLDFSYPRVPSAMRDGFPAVRPGGERVPGSNIQWQAASLDPPPPHHQSAAAGYGAHSYGSPGSSSSSRPPVFPAGPELPPGGGCLAGVPTDSSCALSLLSTQPWDAAGHSAGHGHGHAASLPATAGFDGNPVAMASSYIAPPSPWTDSRAHEGGRRNVPQLPPDVPLGDVHSGPGTHHGQFSGELELALQGNRPAPAPRNGQGSAGAFDQAGSTTEWSL

SEQ ID NO: 8890 - protein, 123 aa, Zea mays
  Clone ID: TF_ZmC18262_1.pep
VRASCMTEEREHADVVGFYLIWRWWLPGSPRPPCWSCASAGFLRRRSLCPARRRRQTTSSTHRACTGHRTFGTGPATYRDYTSDNRTTIPIRTINYAIYSSALLNCLQVTLHLTTSRLRGRSA

SEQ ID NO: 8891 - protein, 329 aa, Zea mays
  Clone ID: TF_ZmC117363_1.pep
MDWAAASGSPSWGAAATDPGPTMLSFAGPSSSAADAEVRLQDFAAGLAQSSRPTGAAPGAGRRSRAAVGGAGAEACSVDGCRSDLSRCREYHRLHKVCEAHSKAPVVVVGGQERRFCQQCSRFHMLSEFDEEKRSCRKRLDGHNRRRRKPQHDLTNLGGFFPYQVNQFEFPQTIPTVGQNSDAVHLVGRQQPFSISFSRTPPDEFPHPQGQGGGSSVLHHLHAARPGHHAEGSSSHTGSSTRDNALSGTLGPECALSLLSSSLRRPSTAGVPAVGQPQVTASSTTAAAVSQAATAAVATAAFAASAGHHVFVPDAMFEDPSQALPFSWQ

SEQ ID NO: 8892 - protein, 82 aa, Zea mays
  Clone ID: TF_jC-zmXLIB3527P102Dc10d1.pep
GQATGGGTYTLISNDDITHLLCVRGGRTSAYIIPRKSASASTSSCCQIDGSRAPVSVASDHHAMHNGCRPLTTRTALYTPCA

SEQ ID NO: 8893 - protein, 681 aa, Zea mays
  unsure (1)..(681): unsure at all Xaa locations
  Clone ID: TF_ZmC749_1.pep
FCQQCSRFQLLQEFDEGKKSCRSRLAQHNGRRRKVQPQAVVNGNSMSENQSLSSTLILLLKQLSRLESGSSSEPINHPNSLVNLLKNLAAIASTQSYQDILKNANSNSILSNDGNNAANGSTVHEQTIRSIPISGESLAEEPAVKSRVHDFDLNDACFEEVESRTDKIVFKLFGKEPKDFPVDLREQILHWLSHYPTDMESYIRPGCVILTIYLRLPNWMWDELDDDPASWIEKLISLSNDGLWRKGWLYARVQDCLTLSYNGSLMFASPWQLVIGDKHQRLCVTPIAVAXCASSVKVSVKGRAHVSVTMPSTIDTVGKHASRMKPADQITFGVEKKQLSINQTLSCRQCVQQAQQLAFXIPEQIRFLSNRTAMLSLVSIAAVCVCVGLIMKSLPQVGCMKPFLWXQYRLGPQLIDCRRASPICIRCMMKMFAPSEASFFKAFTCFKKKKKKQNVLLTAVKKRSKPLVEFLLRYTATDYAPVGGGAGAPVQFLFTPAMTGLSNITPLHIAATISDATGVLDALTDDPRQLGIKAWKNARDATGFTPEEYARKRGHISYIQLVQDKIDRRVSRAHVSVTIPSTIDTAGKHASRLKPADQITFGVEKKQRGMNQTLSCRQCVQQVQQLAFHPRTNRFLSNRTAMLSLVSIAAVCVCVGLIMKSLPQVGCMKPFLWDNIRWGPN

SEQ ID NO: 8894 - protein, 317 aa, Zea mays
  Clone ID: TF_ZmC229717_1.pep
GPSRPAGLEFDEAKRSCRKRLDGHNRRRRKPQPDTMSSGSFMTSQQGLFSSAGTRLSSFPAPRPEPSWSGVIKSEDSSYYTHHPVLSNRPHFAGTSTSPAYSKEGRRFPFLQDGDQVSFSASGAGTLEVSTVCQPLLKTTAAVAPPPPESSKMLAPVLDSDCALSLLSSPANSSSVDVSRMVQPAERIPMAQPLVPGLQHHQFGVSPVPDWFACSQAGSGAVPTRRRVRLPPGRGERAAQHRPGAELRRGGHEMNYHGIFHVGGDGSSDGTSPSLPFSWQKLAFRFKRPAVYRFSCTSGHRTSSLFFPRFSNLFSAP

SEQ ID NO: 8895 - protein, 135 aa, Zea mays
  Clone ID: TF_ZmC18262_2.pep
EVQGLQLRSTSYASYAGLLLLRRHRRHGPLELGGAGPSCQVERCSADMGVEKRYNRRHKVCDAHRKASVVLLAGLRQRFCQQCSRFHELSHFDDTKRSCRLRLAGHNERRRRNPAEAQDQHGGRGDPGSHHLQIR

SEQ ID NO: 8896 - protein, 405 aa, Zea mays
  unsure (1)..(405): unsure at all Xaa locations
  Clone ID: TF_ZmC9712_2.pep
AGGASGGDEGDGQLHGLKFGKKIYFEDAGGSSSSGGSGSASATAPPATQQPSPPAASPRAAPGGGRRGRAAAGGAGPSLPPAPPRCLVDGCNADLTDAKPAYYCRHKVCEMHSKEPRVLVNGLELRFCQQCSRFHQLPEFDQLKKSCRKRLAGHNXXXXXXXXGPLASRYGRHAASLGEPGRLRSFMLDFSYPRVSSAMRGGFPAVRPGGERVPGGIQWQAGLDPRHHQGAVAGYGAHYGSEGGSSSSARPPVFPGPELXXGGCLAGVPADSXXXXXXXXXXXXXXXXXXXXXXAAPTAGFDGGSPVAPSLMAASSYIAPSPWTETDSWGHEGGRSVPQLPPDDXXXGEVHSGSSSHHGQFSGELELALQGNRPAPGXXXRAAPRNNQGSAGTFDQAGNTMDWSL

SEQ ID NO: 8897 - protein, 69 aa, Zea mays
  Clone ID: TF_ZmC120974_1.pep
MKRPRLRPGGAGGAQCPSCAVDGWGADLSKCRDYHRRHKVCETHSKTPIVVVTGREMRFCQQCSRVLYS

SEQ ID NO: 8898 - protein, 445 aa, Zea mays
  Clone ID: TF_5931779.pep
MMMMNTSAAMSPASTDVVVVDDFSLGVGVGAMHQPYVVGFDADAGMGIIMPSVVVDRPLLQQNTNLLEEYDSFDFAAAAGLLLPFQELPAGLLPPANYLPPPTPISMAMAMSPPSLLLTTLPGVPVPTAAAADVVYGGLGGGGAGGLSFVLKREAGGGGGMIGGLNLGRRTYFSPAAVDRLLGGGGLGVGLGMSVLGLGVGAAAHQQQQQPPPRCQAEGCKADLSAAKHYHRRHKVCEFHTKASAVAAAGKQQRFCQQCSRFHVLAEFDEAKRSCRKRLTEHNRRRRRKPISEQGNDHSSLPPPPPKTADTCMTTSYNDDPNSASNTAAAKSAAISQNGGVSCLDVLDNEQRGGSGADGAISGRAAPAAASREGREPGLRAMMQRRVHWSMAGGWTTTNRRFITSLVVMQTQQQSSTAATSCRARRSVSDQQNGGCNGFFEVDFI

SEQ ID NO: 8899 - protein, 440 aa, Zea mays
  Clone ID: TF_5931777.pep
MMMNTNAMSPTASTDADFSFGPLQPYVGFDVAGMGMPSVVVERSSSLLQHNTSSSSHNNNLGLYDSFDFAAAAGLPFQESGLLPPASLPLAPSPPSMAAMAMPPSSLLLTLPGVPAAADVVYNPFGGGGAGGFLKREDGGPLVDAAGGGGRIGLNLGRRTYFSPADVLAVDRLLTRSRLAGGGVGVGLGMGLGMGVLGLGAAHHQQPPPRCQAEGCKADLSAAKHYHRRHKVCEYHAKASAVAAAGKQQRFCQQCSRFHVLAEFDEAKRSCRKRLTEHNRRRRKPSSAQDEDSSPPPPKKLDTCITNTASYNDDLKSASNTAAAAISPNGSGVSCLDVMDNGQTSSAAAPTALSLAAPPPPPLHEKDGSLDSMLMQRVLQGRREDDDDEQRRHFITSLVMQTTQQQHSGGGGAGNILSCSSVSDQHNGGGCNGFFEVDFI

SEQ ID NO: 8900 - protein, 134 aa, Zea mays
  Clone ID: TF_LIB4746-102-R1-K1-C4.pep
MEWTAPKPASSPPLLWDWGDHAATGSGSSSDAPARRGGKEREAKRARAGEDRGGGELRCQVEGCGLDLSRVKDYHRKHRVCEAHTKSPRVIVAGQERRFCQQCSRWVAFLLAFACPLHASALACSVRLLPSSFL

SEQ ID NO: 8901 - protein, 435 aa, Zea mays
  Clone ID: TF_5931781.pep
MMTGRLNVATSSSPGGDDFLFMPMQQHQPPPPPPPPYVGFEHGHGVAGGGSQRVAGGVQHHLYDGLDFAAAALQFQQQAEAPHLHQQQLLTLPSSLGPMAPPPPPPPPLPMPMPVPGMPGDHVYPALGMVKREGGGADGRIGLNLGRRTYFSPGDMMAVDRLLMRSRLGGGGGAFGLGFGFGFGGAHHQAPPARCQAEGCKADLSGAKHYHRRHKVCEYHAKASVVATGGKQQRFCQQCSRFHVLSEFDEVKRSCRKRLAEHNRRRRKPPTTASSKDAASPPANKKPNCGSITSSYSTDNKNLNTAKSTMSSNTGSVISCLDQAAGNKQLQARPTLTLGASPDKDQQQQQQLRAMLQAQAAAGGGHHHHHQEQHFITSLQVHNNDGCGGGNSSSNNNIILSCSSVCSSALPSANGEVSDQNNAGGMHNLFEVDFM

SEQ ID NO: 8902 - protein, 222 aa, Zea mays
  Clone ID: TF_LIB4171-035-R1-L1-D5.pep
KFGTRLRSPNPELTSPNRRPGAWSGRSRSPPHRLPSSGNWGDHAATGSGSSSDAPARRGGKEREAKRARAGEDRGGGELRCQVEGCGLDLSRVKDYHRKHRVCEAHTKSPRVIVAGQERRFCQQCSRFHALSEFDQKKRSCRRRLSDHNARRRKPQPDAFTFASAKLPSTLFDDRRQISFVWNKAPVSHVRPFTSPWDSSSDLKPPYAKEISDVSTKVGTIT

SEQ ID NO: 8903 - protein, 201 aa, Zea mays
  Clone ID: TF_ZmC5424_29.pep
PTRPASCCRFHLLGEFDEVKRSCRKRLDGHNRRRRKPQPDPLNPAGLFGNHHGVTRFTSYPQLFAASMEQPKWSVVKTEADVFQDQYYPAVHLNGAGGGAIGSHFHGKERKHFPFLTSHSNGGGGGDVATAAALGCQPFTITTTAASESDSKQSNGNCALSLLSDNPTSAQTVMIPTTAQSLAAVMQHGGRLPGSVSAQRR

SEQ ID NO: 8904 - protein, 113 aa, Zea mays
  Clone ID: TF_LIB4969-009-A1-XP1-H2.pep
MEWTVPKRARADDGEVRCQVEGCGLDLSRVKEYHRKHRVCEAHTKSPRVVVAGQERRFCQQCSRFHALSEFDQKKRSCRRRLSDHNARRRKPQPDAFAFASARLPSFGNVFIS

SEQ ID NO: 8905 - protein, 331 aa, Zea mays
  Clone ID: TF_ZmC9188_2.pep
MEWTAPKRAASPPSPPLLWDWGGDHAGATGSGSGSSGDAPARRGGREREAKRARADDGEVRCQVEGCGLDLSRVKEYHRKHRVCEAHTKSPRVVVAGQERRFCQQCSRFHALSEFDQKKRSCRRRLSDHNARRRKPQPDAFAFASARLPSSSFDDRRQISFVWNKAPVSHPFTSPWDSSSELPHAKEIREVSTKVGTITGQVHLDKSYVSNAVPSLTHGKDEPWPMKGPDMSIAASKFDGAPDLQRALSLLSVGACGLPDPVHQTSCVIQFTSASENSGDLHLSHGANSGLASCGDGQHIASQPQAQLVRFTMDTSNSVYEPSFFSVNQIN

SEQ ID NO: 8906 - protein, 440 aa, Zea mays
  Clone ID: TF_ZmC3282_1.pep
MGSFGMNWNQKDPMVWDWEHLVPSVSNAVTRHGSANSSGGTLTSNSELGHGSSKSSISASIDSPSGVGNSLEFNFAAVERHVKNTGTNGRVDDSGNSPSSMIAFNQGEPLISLKLGKRAYFENACGGQDAKVSAASDVTSAATVVKKTKVSQQNAKNWYCQVEGCKVDLSSAKDYNRKHKVCVVHSKATKVVVAGLERRFCQQCSRFHGLAEFDQNKRSCRRRLMHHNARRRKPQADTISFNSSTMFYDTRQRTNLFFSQPLYGQVRSNAGSSWDNLGGLKFMETKHPPVHPTKTASPDELHFSALQITSAAAHTGHHHDLDGFMAFKGTSTKVLNQGVEAWAAASSSNNGGPEGGRALSLLSDGSWGSSSAVIQQPTSHADAGALLPPFATVAVSNAAAAAAGHPLDPSPGRFWPQDDHPPLVDGPATQIPELAHLRIW

SEQ ID NO: 8907 - protein, 343 aa, Zea mays
  Clone ID: TF_ZmC9712_1.pep
SQTKQAGNPHKAADGSERWRWPARCQVDGCNVDLTDVKPAYYCRHKVCKMHSKEPRVLVNGLEQRFCQQCSRFHQLPEFDQLKKSCRKRLAGHNERRRRPPPGPLASRYGRHAASLGEPGRLRSFMLDFSYPRVSSAMRGGFPAVRPGGERVPGGIQWQAGLDPRHHQGAVAGYGAHYGSEGGSSSSARPPVFPGPELPPGGCLAGVPADSSCALSLLSTQPWDAAHSHSHSHAAPTAGFDGSPVAPSLMAASSYIAPSPWTETDSWGHEGGRSVPQLPPDDVPLGEVHSGSSSHHGQFSGELELALQGNRPAPGSAAPPAPRNNQGSAGTFDQAGNTMDWSL

SEQ ID NO: 8908 - protein, 142 aa, Zea mays
  Clone ID: TF_ZmC1835_47.pep
MGRVRTKTVKKTSRQVIEKYYSRMTLDFHTNKKVLEEVSILPSKRLRNKVAGFSTHLMRRIQRGPVRGISLKLQEEERERRMDFVPEKSALEVEEIRVDKETMEMLAALGMADLPGVERQAEVSNAPAYGRPQYGGPRRDRV

SEQ ID NO: 8909 - protein, 367 aa, Zea mays
  Clone ID: TF_ZmC39687_1.pep
GVDLSAVKQYYCRHKVCNMHSKEPRVFVAGIEQRFCQQCSRFHQLHEFDQGKRSCRRRLIGHNERRRKPPPGPLTSRYGRLAASLQEPGRFRSFLLDFSYPRVPSSVRDAWPGIQHGGDRMLGTVQWHGHQEPPHPHRSAAAGYGNHAAYNCHGGLVAGGAPMLSSAAFELPPGGCVAGVAATPACALSLLSTQPWDTTFPRPPVPSNARGRRLRRHPGGAVRHGEQLRGVERLDGLAGPRCRRRQERAASRRCSAPGPPRLRGGPLLRRARARPAGKRRAATPAARRPWRLRRRHLQPFHHQRDELVPVAALPAFIRSPRHEMWREHFCIGHHPGFVRLTLPFSFFQGGETGIPNHSRSTVNSLPV

SEQ ID NO: 8910 - protein, 845 aa, Zea mays
  Clone ID: TF_ZmC353_1.pep
MENGDVNEDERNGKKIRVQGGGSSGPACQVEGCGADLTAAKDYHRRHKVCEMHAKATTAVVGNTVQRFCQQCSRFHLLQEFDERKRSCRRRLAGHNKRRRKTRPDTASCGTASIEDKISNYLLLSLIGICANLNSDNVQHSNGQELLSTLLKNLGSVAKSLEPKELCKLLEAYQSLQNGSNAGTSGTANATEEAAGPSNSKLPFVNGSHCGHASSSVVPVQSKATIVVTPEPASCKLKDFDLNDTCNDMEGFEDRQEGSPTPAFKTADSPNCASWMQQDSTQSPPQTSGNSDSTSTQSLSSSNGDAQCRTDKIVFKLFDKVPSDLPPVLRSQILGWLSSSPTDIESHIRPGCIILTIYLRLVESAWQELSENMSLHLDKLLSSSTDNFWASGLVFVMVRRRLAFMLNGQIMLDRPLAPSSHHYCKILCVKPVAAPYSATINFRVEGSNLLSTSSRLICSFEGRCIFQEDTDSVAENDEYEDRAIECLSFCCSVPGPRGRGFIEVEDSGFSNGFFPFIIAEKDICFEVSELESIFESSSIEHADANDNAREQALEFLNELGWLLHRANRMSKENVTDTSVATFSMWRFRNLGVFAMEREWCAVIKMLLDFLFIGLVDVGSRSPEEVVLSENLLHAAVRRKSVNMVRFLLRYRPNKNSKGTAQTYLFRPDALGPSMITPLHIAAATSDAEDVLDVLTDDPGLIGISAWSNARDGTGFTPEDYARQRGNDAYLNLVQKKIDKHLGKGRVVLGVPSSICSVITDGVKPGDVSLEICMPMSASVPGCLLCSRQARVYPNSTSRTFLYRPAMLTVMGVAVVCVCVGILLHTFPRVYAAPTFRWELLERGPM

SEQ ID NO: 8911 - protein, 412 aa, Zea mays
  unsure (1)..(412): unsure at all Xaa locations
  Clone ID: TF_ZmC3704_1.pep
MEASFLRKDGGDQASAATMSGEHRNKGLDWDLNDWRWDANLFLATPAAIAPSESISRELSRGQGEIDFGVVVDKRRRLSPEEDGSGGCSNSAVADGDNSHVVCVQRGRNTEETRPRKGANSSTTPSCQVDGCQADLSGARDYHKRHKVCEAHTRTTVVCINNVEHRFCQQCSRFHLLHEFDDGKKSCRSRLAQHNGRRRKVQPQPAVNGNSMNEDQSLSSTLFLLLKQLSGLESGSSSEQINHPNSLVNLLKNLAAIASTHAYQDVLKNATSISSNDGNNAANGSIMHEQTIRSIPVRRESLAEEPAVKRRVQDFDLNDSCIEEAESRTDKIAFKLFGKEPKDFPVYLREQILNWLWHYPTDMXSYIRPGXVILTIYLDLPNWMCDEFNDDPSSWIENLISSSNDGFWRTGW

SEQ ID NO: 8912 - protein, 424 aa, Zea mays
  Clone ID: TF_ZmC37965_1.pep
MMSGRLNAATPASPGDDFSFAPMQMPPPPPYVGFEHGGGGQRGAGAMQAQQHHLYDGLDFASALQFQQEASSHSHHHQLLTLPSSLGPMAPSMPMPMPMPLPMQMPVPGDHVYHPALGTMVKREGGGADGGRIGLNLGRRTYFSPGDMLAVDRLLMRSRLGGVFGLGFGGAHQHQVPRCQAEGCKADLSGAKHYHRRHKVCEYHAKASVVAANGKQQRFCQQCSRFHVLSEFDEVKRSCRKRLAEHNRRRRKPATTASSKDAASPPAANKKTNGGSITCSYSTENKNDDLSCRAKSTMSSNTSSVISCQLDQPGNKHQLARPTLTLGASQDNKDHQQQLSTMLHVQAAGGYHHQEQQHFITSLQVHNNGGSGNNNNNNIILSCSSVCSSLPPPPSAPNGEVSDQNTAANNGNGNMHNLFEVDFM

SEQ ID NO: 8913 - protein, 348 aa, Zea mays
  Clone ID: TF_ZmC229717_2.pep
GSESVIKLVLLCASTKHRGRRICAVVFCFDKNPQIFKPHLFKLLHTFHLLAEFDEAKRSCRKRLDGHNRRRRKPQPDTMSSGSFMTSHAGTRFSSFPVPRPEPSWPGVIKSEDSGSYYAHQRHPVLSSRPHFAGGGGSTPPAYSSKEGRRFPFLQDGCDQQQVGGFNAGAGAGAQQLEVSSTSTVCQPLLKAAAAAAPPPPPESSSSNKMFSDGLAPAVLDSDCALSLLSSPANSSSVDVGRMVVHQPAEHIPMAQPLVPGGLQQQQQHHPFGGSPAWFACSQAGSSAVSAGGFACPPGVESEQLNTVLVPSSDGGGHDMNMNYHGIFHVGGDGSSDGTSPSLPFSWQ

SEQ ID NO: 8914 - protein, 34 aa, Zea mays
  Clone ID: TF_700381372H1.pep
AALWDPGPEAARLRFRCFRYEEATGTQQALAQLR

SEQ ID NO: 8915 - protein, 386 aa, Zea mays
  unsure (1)..(386): unsure at all Xaa locations
  Clone ID: TF_ZmC1439_6.pep
MTASTSSTLTSSRGYSGRASSRKRGIEAVSDSNIFVENLVEKEEFLHTFSKECEYIRTAVTNGSAIKHDGSYESDPAVEIVRVELQGAAAFLXYSRLVPLVLLLVEGSTPIYIGEHGWEMLLVVKKATQEAGSKFELLGFASVHNFYHYPESIRLRISQILVLPPYQGEGHGLGLLEAINYIAQSENIYDVTIESPSDYLQYVRSSIDCLCLLMFDPIKPALGAIVSSLKETNLSKRAQSLRMVPPVDLMETVRXKLKIKKKQFLRCWEILVFLSLDSQDHKSMDNFRACIYDLMKGEILGSASGTNRKRLLQMPTSFNKEASFAVYWTHEIGDVDEQTVXQQPEDLRTQEQQLNELVDIQIEEIDGVAKNVTSRGKDKMAELAVQ

SEQ ID NO: 8916 - protein, 188 aa, Zea mays
  Clone ID: TF_ZmC79675_1.pep
RSLESLHIDDLGIAADEAVAINSVLELHCVVKESRGALNSVLQTIRKLSPKAFVLVEQDAGHNGPFFLGRFMEALHYYAAVFDALDAALPRYDARRARVEQFHFGAEIRNVVGCEGAARVERHERADQWRRRMSRAGFQSMPIRMAARAREWLEENAGGGGYTVAEEKGCLVLGWKGKPVIAASCWKC

SEQ ID NO: 8917 - protein, 158 aa, Zea mays
  unsure (1)..(158): unsure at all Xaa locations
  Clone ID: TF_LIB4976-049-A1-K1-B8.pep
MMQFTHTAPPPPPLHPNGHAGGLGLGLFLDVGAPRAARPWPGSFPTPASKISLGNLNSTSCMEQLLVHCANAIEANDATLTQQILWVLNNIAPPDGDSNQRLTAAFLCALVARASGTGXCKGFTAAVAXXRRVXRAHVTGFTAVELASFVDLXPWHRF

SEQ ID NO: 8918 - protein, 190 aa, Zea mays
  Clone ID: TF_ZmC189640_1.pep
TRFAADLGISFEFNAVAFDPLDPLPPTGLSVAPGDAVAVHLSVGSGVPSAATFRVVKELRPAVVVCVDHGCHRGDLPLSHHALSVVRSSAAFLESLDAAGAPADAVARLEEYVVRPRVERLLLGDRMPPWRTMLDSAGFAPVQLSNAAEAQAECLVRRTPTPGFHVEKRQAALALRWQDSELVMVSAWRC

SEQ ID NO: 8919 - protein, 124 aa, Zea mays
  unsure (1)..(124): unsure at all Xaa locations
  Clone ID: TF_LIB3918-030-Q2-N1-H7.pep
RFRGAFFPFPPLFYMLGGTFPRGPDQRVFFESPLFGXRAIPVFSFQGLERMERPQTFNQWRVGFQKIGFRQLPFNQGFFKGVSQKVRCFPKGFLFFKNPRWFFQGWKGRLVLGLSPWKPDPRFF

SEQ ID NO: 8920 - protein, 82 aa, Zea mays
  unsure (1)..(82): unsure at all Xaa locations
  Clone ID: TF_LIB3116-007-Q1-K1-E8.pep
SVNLVACEGFERLERDEVLGKWXALLRMPVFXPFLLSILVNFTINTLLQSYSVYYKLDXRECVLYLHWKNMPRIVLSVCALC

SEQ ID NO: 8921 - protein, 361 aa, Zea mays
  unsure (1)..(361): unsure at all Xaa locations
  Clone ID: TF_ZmC1583_5.pep
IQDELAAEAKAAEVGNSISGREILVRLNQQLPPIWKPFLRSASYLKEALLLALTDGHRGSTHLSSPLDVALKLGAYKSFSDLSPVLQFANFTTTQALLDEITSTTSSCIHIIDFDLGVGGQWTSFLQDLAHCRGTGNAXLPMLKLTVFVSSASHNPLELHLTRENLTQFVVDLGIPFEFTNINLDVFDPTELIAPSXNEVVVVCLPVGCSARTPPLPMLLQLVKQLAPKIVVAIDHGSYRGDLPFSQHFMNCFQSCMFLLDSLDAAGTNVDAASRIERFLIQPRVEDAVLGRWKAEKAMAWWAVFTSAGFAPVPLNNLAEAQADCLLKRVQVXGFHVEKCGMGLALYWQSSELVSVSVWWS

SEQ ID NO: 8922 - protein, 75 aa, Zea mays
  Clone ID: TF_700051838H1.pep
TMTFSTPGGWMRGSSLASALRRGVRRRGCGCAGGRHSSMVNAYEMFSRDIRNAVACEAAYRFERHEIFTWWLHAC

SEQ ID NO: 8923 - protein, 37 aa, Zea mays
  Clone ID: TF_LIB3069-022-Q1-K1-E10.R1.pep
PYLKFEHLIAKQAIVEVFAGCRDSHVVDFGIKEGTKW

SEQ ID NO: 8924 - protein, 98 aa, Zea mays
  Clone ID: TF_LIB3245-575-P1-K1-B1.pep
GLYVAGRWVEKFVEHCAARFAFRTLAANIEYFTAGMLHRRPVQALIVNSALLIHHLPDESVSIMNQHDRLFYMANDLLPKLVTLGEHVSNTNTSSFYS

SEQ ID NO: 8925 - protein, 172 aa, Zea mays
  unsure (1)..(172): unsure at all Xaa locations
  Clone ID: TF_700205405_FLI.pep
AELIAPSADEVVAVCLPVGCSARTPPLPMLLQLVKQLAPKIVVAIDHGSDRGDLPFSQHFMNCFQSCMFLLDSLDAAGTNADAASKIERFLIQPRVEDAVLGRRKXEKAMAWRAVFTSAGFAPVPLSNLAEAQADCLLKRVQVRGFHVEKCGMGLALYWQRGELVSVSAWRC

SEQ ID NO: 8926 - protein, 179 aa, Zea mays
  Clone ID: TF_ZmC1583_2.pep
GRRAQSRAAAAAAEERLQSAIPITQRQQARTPPLPMLLQLVKQLAPKIVVAIDHGSDRGDLPFSQHFMNCFQSCMFLLDSLDAAGTNADAASKIERFLIQPRVEDAVLGRRKAEKAMAWRAVFTSAGFAPVPLSNLAEAQADCLLKRVQVRGFHVEKCGMGLALYWQRGELVSVSAWRC

SEQ ID NO: 8927 - protein, 60 aa, Zea mays
  Clone ID: TF_LIB3136-038-P1-K1-F6.pep
HGVELERHVQPLRLLGQRHGRLRQHVPVLVHGGKAEVRRALGPRGQQVQQLDPLRGVGAA

SEQ ID NO: 8928 - protein, 527 aa, Zea mays
  Clone ID: TF_ZmC3661_2.pep
MVMDAGLHEPCALLPGSKRDSHMLVYPQIAAAANGFTAQELESLLFLSPDGITLAAGSGGGGGGGSYLNVAPTTVVPPAPTNRASPPRDVSAAPPSVGQPDDSEAFSDIVLGYINRMLMAEDIDDKFEHYPEHPAVLAAEKPFLEILAERPSSSGGSAVESPGGSSVGNSCYSARSCTCATATAASDAFGAVLTPALDFPSAAFLQPPQLYQDLSPEGSVVDAGGAWPYDSTEFYQLHSNPSSFASSNGSCATISDGFESLLSSPGVMPDVGFADFAVQSQQAMQFCRGFEEASKFLPDESKLVIDLEKPASVTSLVANIKGENRFAEVKAEKADVQAEIHRGKKHFYGDDLDAEEGRRSKHSAPAIDTDHLVREMMDKVLLCNGETCSKGVKELREALQHDVAKNSHGVHGKGSGHGKGRGKKQPKKEVVDLETLLVHCAQSVATDDRRGATELLKQIRQHASPNGDGDQRLAHCFANGLEARLAGNGSQIYKSLIMTKDNRWLLQGWKGRIVLALSTWKPDHRSP

SEQ ID NO: 8929 - protein, 117 aa, Zea mays
  Clone ID: TF_ZmC5037_1.pep
RFLEALHYYSAIFDSLDATFPADSAQRMKVEQCLLAPEIRNVVACEGAERVARHERLDRWRRIMEGRGFEPVPLSPAAVAQSQVLLGLYGAGDGYRLTEDRGCLLLGWQDRATIAAS

SEQ ID NO: 8930 - protein, 205 aa, Zea mays
  unsure (1)..(205): unsure at all Xaa locations
  Clone ID: TF_ZmC5771_4.pep
DAWADAWADAWADAWADAWADAWARLCCEPGEAVAVNLAFALSHVPDESVSPANPRDELLRRVRALGPQVVTLVEQELNTNTAPLAARFTDACAHYGAILESLDATLGRETAEKARAEAALSRKAANAVGRDGPDRLEXCEVFGKWRARFGMAGFRPVSLGSSIAEQMVAPRVGPVPPGFTVKAENGVLRLCWMGRVVTVASAWR

SEQ ID NO: 8931 - protein, 162 aa, Zea mays
  Clone ID: TF_ZmC1310_2.pep
ESPRDIGLNNIRNMRPHTFIHAIVNGSFSAPFFVTRFREALFFYSALFDALDATTPRDSNQRMLIEENLFGRAALNVIACEGTDRVERPETYKQWQVRNQRAGLKQQPLNPDVVQVVRNKVKDCYHKDFVIDVDHRWLLQGWKGRILYAVSTWVANDAPSYI

SEQ ID NO: 8932 - protein, 671 aa, Zea mays
  unsure (1)..(671): unsure at all Xaa locations
  Clone ID: TF_ZmC5771_1.pep
MEPGAPWRDPRQGYSYGVGSAMQLQLQLQQRADAAAGGGVLKRSLGELERWQHHQQQQVAAQQALYLRAVRQRTAAAVDIAALLGGTPAQPLVLPGSSFGGGLASPSSTLSSSLTTASRAAVPLMQPQLQRQVPLTTSSPQTQPFGLSTAPLPQPSVSSELFILQELEKQLLDDDDDDEPVAAMSGTGSAVTNSEWEETIQQLSSIAAAPSPGPPAAATPTNNNNNNVGMTRSPSNSSSSTASSSASCSPPTPGAASRQLLSEAAVAIADGRAQARDDEVTVKLLHGVLDIVLLAADPRGRVELVIPWSSSGYRGSXHEASASHLAALKRAANQHGDAEQRLIAMMVAALSSRIAPAASAPSQLLADLCSVEQRAGSQLLQDLSPCFRVALHAASAAIVEAVGDHRAIHLVDFDVSFPQHAALIQYLADRRVQGRSLKVTAVTDPSSPFTQSLTASLPAIEERLKKLAERAGVEYRFTVVSCRAAELDASRLCCEPGEAVAVNLAFALSHVPDESVSPANPRDELLRRVRALGPQVVTLVEQELNTNTAPLAARFTDACAHYGAILESLDATLAREIAEKARAEAALSKKAANAVGRDGPDRLERCEVFGKWRARFGMAGFRPVSLGSSIAEELVGARVGHVPPGFTVKAENGVLRFCWMGRAVTVASAWR

SEQ ID NO: 8933 - protein, 413 aa, Zea mays
  Clone ID: TF_ZmC14418_1.pep
PQPKRPHPMAGAPAPKLPSFPGPVAQAGGGFVSALKPKAEAGNDEAAAAVDQLAEAARLAEAGDAFGAREILARLNYRLPAVPTAGTPLLRSAFYFKEALRVALSPTGEALAPPAVSTPYDVVLKLGAYKAFSEVSPVLQFAHLTCVQAVLDELGAAGRIHVLDLDIGMGEQWASLMQELAQRSPAATLKVTALVSPASHHPLELNLIHENLSGFARELGVFLQFAAYNVDALDPAELVAITSGDAVAVHLPVGSAHVAAMPAVLRLVKRLGAKVVVSVDRGCDRTELSFSTHLLQAFQSCVSLLDSIDAVGGADAEAVGRIERFMVQPDVERRVVSRHRAAVAVDKPPPLPWRTVLASAGFVPVQASTFAESQAEALLKRMALMGFRVEKRGGALCLYWQRGELVSVSAWRC

SEQ ID NO: 8934 - protein, 96 aa, Zea mays
  unsure (1)..(96): unsure at all Xaa locations
  Clone ID: TF_701163921H1.pep
SFLGAVNHRLKPSIVVVMEQDADHKRPAVSGRXVEAFGYYAALFGRLDAVAAATATASAAGDRAQVERMCLGEEIKNVLLCEGAGRLERHERLSQW

SEQ ID NO: 8935 - protein, 355 aa, Zea mays
  unsure (1)..(355): unsure at all Xaa locations
  Clone ID: TF_ZmC586135_1.pep
MSFVGRVDPSTTYADNIYVHKFGAPNSNFAARRFGSDTQLFRYGPEPFNSEDYGHMGFPEAPSAAFQSSFYNQQASLTPCSDAAKDSPVCSNISQQNSQSISDNQSSGLEVEFDDEIRLKLQELEHALLDDGDDILFEVSQAGCISDEWADPMKDVSLANSPKESESSISCAGSNSGEARTPKQLLFDCATALAEYNVDEAQAIITDLRQMVSIQGDPSHRIAAYLVEGLAARIVASGTGIYKALTCKDPPTLYQLSAMQXILFEICPCXIDLVSWXANYAILEACKGEERMHIIDFDINQGSQYXTLMQFMKDDANKTRHLRITGXVDDHETVQRTVGGLKVIGQRLEKLAEDC

SEQ ID NO: 8936 - protein, 136 aa, Zea mays
  unsure (1)..(136): unsure at all Xaa locations
  Clone ID: TF_jC-zmshLIB3569P012b04b1.pep
AALVEVALRRCRLERRRRYGSIGRRGGSVRGSIFVVAIRYYXALFDSLDTSYGASYSEDSPERHAVEQLLLSREIRNLLVVGGPAPTDDVKFDGWHSTXFHEASLASSPAAQASLLLGMPLYACSPRQLRGINSRL

SEQ ID NO: 8937 - protein, 316 aa, Zea mays
  Clone ID: TF_ZmC1310_1.pep
AKRTSAADILQAYQLYMAAICFKRVVFVFSNNTIYNAALGKMKIHIVDYGIHYGFQWPCFLRWIADREGGPPEVRITGIDLPQPGFRPTQRIEETGRRLSKYAQQFGVPFKYQAIAASKMESIRVEDLNLDPEEVLIVNCLYQFKNLMDESVVIESPRDIVLNNIRNMRPHTFIHAIVNGSFSAPFFVTRFREALFFYSALFDALDATTPRDSNQRMLIEENLFGRAALNVIACEGTDRVERPETYKQWQVRNQRAGLKQQPLNPDVVQVVRNKVKDCYHKDFVIDIDHHWLLQGWKGRILYAISTWVANDAPSYF

SEQ ID NO: 8938 - protein, 139 aa, Zea mays
  Clone ID: TF_ZmC26211_1.pep
MLQGVLSRAPATDAAAAMKAKRAGASPGEEEEGDGRSARGKRQQLLGLGPATALASAAAAEEGPETRGLRLLSLLLRCAEAVAMDQLTEARELLPEIAELASPFGSSPERVAAYFGDALCARVLSSYLGAYSPLALRPL

SEQ ID NO: 8939 - protein, 508 aa, Zea mays
  Clone ID: TF_ZmC5786_1.pep
MDAHTTHIVARKNTSLSFTSNELMDHFPFAWLPMDPFTAMALSGTLSPSFSTTSTNDTMYNLNPALYASLVPPIRKPATPTTVEVGRQCKEEEDASIRLVHLLITCTSAIETGDYSIAQGNLSEARKILGEIPTSTGIGRVGKHFIDALVQRLFPAYPHAAPPSPSPSTSIDLHNNFYDAGPYLKFAYSTANQAILKAIKGYNHVHIIDFSLMQGLQWPALMDVFSAREGGPPKLRITGIGPNPIGGRDELHEVGIRLAKYAHSVGIDFTFQGVCVDQLDRLCDWMLLKPIKGEAVAINSILQLHRLLVDPDANPVVPAPIDILLKLVIKINPMIFTVVEHEADHNRPPLLERFTNALFHYATMFDSLEAMHRCTSGRDITDSLTEVYLRGEIFDIVCGEGSARTERHELFGHWRERLTYAGLTQVWFDPDEVDTLKDQLIHVTSLSGSGFNILVCDGSLALAWHNRPLYVATAWCVTGGNAASSMVGNICKGTNDSRRKENRNGPME

SEQ ID NO: 8940 - protein, 146 aa, Zea mays
  Clone ID: TF_701163921_FLI.pep
NHNAPPFSARFAEALGYYAALFDSLDAVAAATATASAAGDRAQVERMVLGEEIKNVLLCEGAGRLERHERLSQWAMYMDASGFRRVPLSFRAIRESELKLASFGMSGCRYQVESDGLLLGWGSTRLYSVSAWRPNKSGTRECTFRS

SEQ ID NO: 8941 - protein, 350 aa, Zea mays
  Clone ID: TF_ZmC10148_1.pep
HLAVLKTAANPRGDAEQRLVAMMAGALSSRIRRPPASHQHLAGLCGAEQRAEWQLLQHVSPCFGLALHGANLAILDAVADQRAIHLIDFDVSVAQHTALIDSLASRRVAGTCLKVTAVTDPTSPFTPALAQALAATGQRLKEHARQAGVEFRFRAVSCVAGEVEASRSRLGCDETGEALVVNLAFALSRVPDESVSPANPRDALLRGVRGLRPRVVTLVEQELGANTAPLAARFADACAHYGAVLESLDATLGRDSAQRARAEAALASKAANAVAREGPDRVERCEVFGKWRARFGMAGLRPVAIGQGVADRVKGRLGPAARPGFDVKLDSGRLAIGWMGRVVTVASAWR

SEQ ID NO: 8942 - protein, 417 aa, Zea mays
  Clone ID: TF_ZmC5043_1.pep
MQDLRIAMDSESEKSVRRVSGKGARGKQHGNEFVDLHTMLIHCAQAMATGDRRSATEMLKQIKQHSSLRGDATQRLAYCFAEGLEVRLAGTGSQVYQSLMAKRTSVVEFLKAYKLFLAAISLNKVHIIFSNGNIVDAVAGRSKLHIVAYGVQYGLQWPGLLHFLAGREGGPPEVRFTGIDLPQPGFRPAYQIEETGRRLSNCAREFGVPFKFHAIAAKWEMVSAEDLNIDPDEVLVVNSDCHLSNLMDEGVDADTPSPRDLVLNNIRKMRPDIFIQIVNSGTYGAPFFLTRFREALFYYSALFDMLDATIPRDNDERLLIERDIVGRSALNVIACEGADRLDRPETYKQWQVRNHRAGLKQLPLNPEVVKLARDKVKKYYHKDFLIDEDRQWLLQGWKGRVLFAMSTWVAEDNNSTF

SEQ ID NO: 8943 - protein, 734 aa, Zea mays
  Clone ID: TF_ZmC2910_1.pep
MGLDNTYGDLSGMFYGGLSYDGYTDHSSANDYFRFADPLPATVPQMAAEACSNPSSTVSRANTETDNPEDWEFISDESLDYISRMLMEEDIDEKVSMYQAESAALRAAAKPFYDILGHKFPPSPDRQLISWSMDSPSESSSSICTQSVASTVTSSSFGTRVDSNRRYDVGLSEQLEAFRGLCGQASNPLVGTSSDASNAVDELEDLLITNGGIPEYLFESLPTWDFRRGIEEAQKSLPVSDKLVIDLETGGIARPQEARKDVPLNAKKDDVLKAKKNRQSEDLDLMEGRNIKQSAFCSDEPGWIEMFDDLLRQTEKKATVLRELMRSEASKNSQVTQTKGPSGPRPRGRKPTKNDVVDLRTILIHCAQAVAADDRRTANELLKQIRHHSKPNGDGTQRLAHCFADGLEARLAGTGSQLYRKLIAKRTTASDMLKAYHLFLAASPFKRLSHFLSNQTILSLTKNASKVHIIDFGIYFGFQWPCLIRRLSKREGGPPVLRITGIDVPQPGFRPTERIEETGQRLAEYAEKFKVPFEYQGIASKWESIRVEDLKVGKDEVVIVNCLYRFRNLIDETVAVDSPRNRVLNTIRQVNPAIFIHGIVNGSYSVPFFITRFREALFHFSALFDMLETTVPRDDAQRALIEREMFGREALNVIACEGSDRVERPETYKQWQVRNLRAGFVQSPLNQEIVMKAMDKVKDIYHKDFVIDEDSGWLLQGWKGRILYAISTWKPKNN

SEQ ID NO: 8944 - protein, 600 aa, Zea mays
  unsure (1)..(600): unsure at all Xaa locations
  Clone ID: TF_ZmC1155_3.pep
MLAGCSFSSSRHQMSTAQRFDILPYGFSKRASNRGDGSGAAPRVAAPDARSGGGGGTCSFRAHPAPPVTQAVSWGAKPEPGGNGAAWERSRAVKRAHEEDAGEEYGGPVVRAKRTRMGGDGDKVWFHRSIAGTVQAAGSGDGHEAEEEKAFLVPSAAAFPHGMSAAAAGPSLAVAKKEEFSKSPSNSPASSGGTDGGSSAVPWPEQLHAQNGAAARVEAMELVVALTACADSVAACNHDAANYYLVGLGEMVSPAGITPSTAVXAYSSEALTLLRMLKVLTSYNVPILRIIKDLHPIPPILHFNLNERGGRAFDGHDRVHVIDFDIKQGLQWPGLLQSLATRVAPPAHVRITGVGESRQELQEXTGARLGRVVAALGLAFEFHAVVDRLEDVRLWMLHVKRGECVAVNCVLGAHRPLRDETGAGVXNFVGVTRSTGAAILLLGEHEDALNSGRWEARFARALRYYAAAFDAVEAAGLADASPARAKAEEMFAREIRNAVAFEAADRFERHETFTGWRQRMQEGGFQNAGIGDREALQGRMIARMFAPGNYSVQVQGDGEGLTLRWMDQAMYTVSAWTPVSDGGSTVSASVSTTASHSQHS

SEQ ID NO: 8945 - protein, 310 aa, Zea mays
  Clone ID: TF_ZmC5780_1.pep
QSRRVAVAFQAYNALSPLVKFSHFTANQAILQALDGEDCLHVIDLDIMQGLQWPGLFHILASRPRKPRSLRITGLGASLDVLEATGRRLADFAASLGLPFEFRPIEGKIGHVADAAALLGSRQRRRDDEATVVHWMHHCLYDVTGSDVGTVRLLRSLRPKLITIVEQDLGHSGDFLGRFVEALHYYSALFDALGDGAGAAEEESAERYAVERQLLGAEIRNIVAVGGPKRTGEVRVERWSHELRQAGFRPVSLAGSPAAQARLLLGMYPWKGYTLVEEDACLKLGWKDLSLLTASAWEPADDAAASAPTG

SEQ ID NO: 8946 - protein, 311 aa, Zea mays
  Clone ID: TF_ZmC3644_1.pep
PYLKFAHFTANQAILEAVQGCKHVHIIDFSIMQGLQWPALIQALALRPGGPPSLRLTGIGPPSPPGRDDLRDVGVRLADLARSVRVHFSFRGVAANRLDEVRPWMLQVSQGEAVAVNSVLQLHRLLADAPSSGDARAPIDAVLECVASVRPRVFTVVEQEADHNKPGFLDRFTEALFYYSAVFDSLDAASGGAGDAAAEAYLEREICDIVCGEGAGRRERHEPLWRWRDRLGRTGLAAVPLGANALRQARMLVGLFSGEGHCVEEAEGCLTLGWHGRPLFSASAWRAEENNQSDSRSRSSGSEESNISCSS

SEQ ID NO: 8947 - protein, 290 aa, Zea mays
  Clone ID: TF_ZmC3871_1.pep
FSNLAICKAVGGGGRKKVHIVDYGDHYYGLQWPSLLGYWGSLEAGPPEVRITAIDFPEPGFRPDARLQATGRRLTCFARRHGVPLRFHGIAARWDAVSVDELSIERDEVLVVNGLFSLGRMQEQEQDDVDRDSRPSPRDTVLGNVRKMRPDVFVLCVENSSYGAPLFVTRFREALFYYSALFDMMDAVAARDDDDRVLVEQHLFGQRALNAIACEGSDRVERPETYRQWQVRNERAGLRQLPLDPDAVRAIRRKVKDKYHRDLFIDEDQQWLLQGWKGRVLYAMSAWAAK

SEQ ID NO: 8948 - protein, 344 aa, Zea mays
  Clone ID: TF_ZmC6882_1.pep
QRLAHCFAMGLEARLAGTGSQAYQSLMAQHTSVVEFLKAYSLYMAASCFMKVRFIFSNMTICNAVAGRSKLHIVEYGVQHGFQYPGLFHLLARREGGPPEVRVTAIAVPQPGFRPAHQIEETGRRLSNIAREMGVPFKFRGIAAKWEAVRAKDLNIDPDEVLAVNSECYIGNLMDESVLVDSPSPRDTVLNNIREMRPNVFVHTVVNGTYGAPFFLTRFREALFFFSAQFDMIDATIPRDNNERLLIERDIFGTFALNVIACEGADRVERPETYKQWQVRNHRAGLRQLPLNPEVVKASRDKVKNYYHRDFLIDEDNRWLLLGWKGRVLYAMSTWVAEDNKPIF

SEQ ID NO: 8949 - protein, 147 aa, Zea mays
  Clone ID: TF_ZmC5784_2.pep
PKVVTMVEQNLRQSGSFLARFVDAIHYYWALFDSLDASYGEDSPERHVVEQQLLAREIRNVLAVGGPARAGAGGARFGSWREELARSGFRAASLAGGAAAQASLLLGMFPSDGYTLVEEKGALRLGWKDLCLLTASAWRPVQTPPCR

SEQ ID NO: 8950 - protein, 156 aa, Zea mays
  Clone ID: TF_UC-ZMFLB73073F08_FLI.pep
TNEDQFNNLHGISQLEHQKSDALALYRLEYKSSSSKRSVRSKLSSSPLNEIQQQMGRLTADSPVENKRTARSKPKANQKDTNANIHPHVNAPNQVNAPNAYQATPQVNQMTLMNGNVVYGPHLPHSEDVIYGPHLPHGYSAEGSSFFWNTSDYQYT

SEQ ID NO: 8951 - protein, 100 aa, Zea mays
  Clone ID: TF_ZmC12034_1.pep
HASARVERWLLGEEVKNIVACDGADRRERHERLDRWAARMEGAGFARVPLSYYALLQARRAAQGLGCDGFKVREEKGAFFLCWQERAIFSVSAWRGRRFD

SEQ ID NO: 8952 - protein, 253 aa, Zea mays
  unsure (1)..(253): unsure at all Xaa locations
  Clone ID: TF_LIB4766-041-R1-K1-G12.pep
LGPRAGLSPIPRAPSRGKVRSDGARRGVALHAASAAIVEAVGDHRAIHLVDFDVSFPQHAALIQYLADRRVQGRSLKVTAVTDPSSPFTQSLTASLPAIEERLKKLAERAGVEYRFTVVSCRAAELDASRLCCEPGEAVAVNLAFALSHVPDESVSPANPRDELLRRVRALGPQVVTLVEQELNTNTAPLATRFTDACAHYGAILESLDATLAREIAEKARAEAALSXXAANAVGRDGPDRLERCEVFGKWRA

SEQ ID NO: 8953 - protein, 96 aa, Zea mays
  Clone ID: TF_LIB3205-014-P1-N1-C1.pep
VTGSDSNTLWLIQRLAPKVVTMVEQDLSQSGSLLARFMDAIHYYLALFDSLDASYGEDSPERHVVEQQLLAREIRNVLAVGGPARAAGGQLLSQLS

SEQ ID NO: 8954 - protein, 107 aa, Zea mays
  Clone ID: TF_LIB3591-101-Q1-K6-E2.pep
SDIPGPRRSRQRFMVERGFFRQCALNVVACEGVDRVERPETYRQWQARNRRAGLRQLPLDPDTVRALREKVREQYHRDFVIDTDRDWILQGWKVRILYTMKTWVVDD

SEQ ID NO: 8955 - protein, 370 aa, Zea mays
  Clone ID: TF_ZmC1420_1.pep
RHSSPTGDAAQRLAHCFADGLEARLAGTGSRLYQSLMLRRTSVADFLRAYRLYMTTCCCKRVAFAFANKTIHDAFALAGRRRRLHIVDYGLGYGFQWPGLLRGLAAREGGPPELVRITGIDLPQPGFRPAQQIEDTGRRLSDCARQLGVPFEFRGIAAKREAVSPEDLGIDPAAEVLVVISLCHFRLLTDEIEVEISSSAAAAGPSGRRRPTARDQVLCNIRRMRPDVFIHGVVSGGYGTTYFPTIRHEAMFHYSAQFDLLDATVPRDSPERLLLERDIFGRAAMNVIACEGADRVERPETYRQWQARNRRAGLKQLQLQADVVKVVRDKVKDKYHRDFGIDEDQGWLLHTWKGRVLYGLSTWVAQHADP

SEQ ID NO: 8956 - protein, 137 aa, Zea mays
  unsure (1)..(137): unsure at all Xaa locations
  Clone ID: TF_LIB4767-051-R1-K1-A11.pep
MTASTSSTLTSSRGYSGRASSRKRGIEAVSDSNIFVENLVEKEEFLHTFSKECEYIRTAVTNGSAIKHDGSYESDPAVEIVRVELQGAAAFLXYSRLVPLVLLLVEGSTPIYIGEHGWGMLLVXKRXTQEAGSKLNC

SEQ ID NO: 8957 - protein, 351 aa, Zea mays
  unsure (1)..(351): unsure at all Xaa locations
  Clone ID: TF_ZmC1439_7.pep
LENLVEKEEFLHTFSKECEYIRTAVTNGSAIKHDGSYESDPAVEIVRVELQGAAAFLXYSRLVPLVLLLVEGSTPIYIGEHGWEMLLVVKKATQEAGSKFELLGFASVHNFYHYPESIRLRISQILVLPPYQGEGHGLGLLEAINYIAQSENIYDVTIESPSDYLQYVRSSIDCLCLLMFDPIKPALGAIVSSLKETNLSKRAQSLRMVPPVDLMETVRXKLKIKKKQFLRCWEILVFLSLDSQDHKSMDNFRACIYDLMKGEILGSASGTNRKRLLQMPTSFNKEASFAVYWTHEIGDVDEQTVXQQPEDLRTQEQQLNELVDIQIEEIDGVAKNVTSRGKDKMAELAVQ

SEQ ID NO: 8958 - protein, 205 aa, Zea mays
  Clone ID: TF_ZmC490712_1.pep
IAQSCCLPFEFNAVNAASHEVTLEHLDIRKGEAIAVNFAYQLHHTPDESVCIENHRDRILRMVKSLSPRVVTLVEQEANTNTAPFFSRYMETLDYYTAMFEAIDVACPRDDKVRMSTEQHCVARDIVNLIACEGAERVERHGPFGKWRSRFAMAGFRPYPLSALVNNTIRTLLNDYNSYYKLEEKDGVIYLGWKNRKLVVSSAWQ

SEQ ID NO: 8959 - protein, 102 aa, Zea mays
  unsure (1)..(102): unsure at all Xaa locations
  Clone ID: TF_LIB3069-022-Q1-K1-E10.pep
ADLLHAQLCESXRYLKFVHWIANQAILEVFAGCRRVHIIYLRIXQGMQWPALLQALALQPGCPMSFRLTRVRPPXPDETDALQLVGCKLAQLEHTMLVDLQY

SEQ ID NO: 8960 - protein, 184 aa, Zea mays
  Clone ID: TF_LIB4729-117-A1-K1-F2.pep
VAAAFQVFNGISPFVKFSHFTANQAIQEAFEREERVHIIDLDIMQGLQWPGLFHILASRPGGPPRVRLTGLGASMEALEATGKRLSDFADTLGLPFEFCAVAEKAGNVDPEKLGVTRREAVAVHWLHHSLYDVTGSDSNTLWLIHYYSALFDSLDASYGEDSPERHVVEQQLLSREIRNVLAVG

SEQ ID NO: 8961 - protein, 132 aa, Zea mays
  Clone ID: TF_LIB4738-094-Q1-K1-E4.pep
TLGLPFEFCAVAEKADNVDPQKLGVTRREAVAVHWLHHSLYDVTGSDSNTLWLIQRLAPKVVTMVEQDLSQSGSFLARFVDAIHYYSALFDSLDASYGEDSPERHVVEQQLLAREIRNVLAVGDPRRRRSAT

SEQ ID NO: 8962 - protein, 448 aa, Zea mays
  Clone ID: TF_ZmC5045_1.pep
MEMEGRKSKQSALCDEETVREMFDKVLLCTDKNCEFHSPMPADAQISGGYVKGSRNKRGRRRGRSGPGAEEEPVDLTTLLIHCAQAAAIDDHRNSSELLKQIRKHSSATGDAGQRLAHYFADGLEARLAGSGSSIYRSLAAKRTSTGDILKAFSLYVKACPFRILSHYVANTTILNATKSATRLHIIDYGIMYGFQWPVLMQRLSKRPGGPPYLRITGIDFPLSGFRPAERVEATGRRLHEYARMFNVPFEYQAIAAKWDTIQVKDLNMKSDEFVVVNCLYRMRSMVGRTVADDSPRTRVLNTIRKLNPHLFVHGIVNGTYNAPFFVTRFKEAMFFFSSIFDMLEANALRMDEHRLLIEREFFGREAVNVIACEGTERIERPETYKQWQMRNLRAGFRQLALDREIMKRARYKVSKSYQGDFLVDEDNKWMLQGWKGRIIYALSAWTS

SEQ ID NO: 8963 - protein, 476 aa, Zea mays
  Clone ID: TF_ZmC1583_1.pep
MPFHDGADIKPAHLGVPSASLLLNQHQALSAASFMPLPSFPDHQHQPHLPPPPKRHHSMPENLFLLQNQLQPPPPPPQGLRFPPLHTTAPFQLQPSLQPPRGSMKTTPAAQQHQQLLDELAAAAKAAEVGNSIGGREILARLNQQLPPIGKPFLRSASYLKEALLLALTDGHQGSTHLSSPLDVALKLGAYKSFSDLSPVLQFANFTATQALLDEIASTTSSCIHIIDFDLGVGGQWASFLQEFAHRRGTGNAPLPMLKLTAFVSSASHHPLELHLTRENLTQFAVDLGIPFEFTDINLDAFDPAEFIAPSPNEVVAVCIPVGCSARTPPLPMLLQLVKQLAPKIAVAIDHGSDRGDLPFSQHFMNCFQSCMFLLDSLDAAGTNADAASKIERFLIQPRVEDAVLGRRKAENAMAWRAVFTSAGFAPVPLSNLAEAQADCLLKRVQVRGFHVEKCGMGLALYWQSGELVSVSAWRC

SEQ ID NO: 8964 - protein, 669 aa, Zea mays
  Clone ID: TF_ZmC3661_1.pep
RGTAPGPAAPVHPGPLLARSAQALVLPQGLPHRRRQQVVTARVERTHRAGALNVEARSQVSLAPPRGRLHGCRSSPEGSVVDAGGAWPYDSTEFYQLHSNPSSFASSNGSCATISDGFESLLSSPGVMPDVGFADFAVQSQQAMQFCRGFEEASKFLPDESKLVIDLEKPASVTSLVANIKGENRFAEVKAEKADVQAEIHRGKKHFYGDDLDAEEGRRSKHSAPAIDTDHLVREMMDKVLLCNGETCSKGVKELREALQHDVAKNSHGVHGKGSGHGKGRGKKQPKKEVVDLETLLVHCAQSVATDDRRGATELLKQIRQHASPNGDGDQRLAHCFANGLEARLAGNGSQIYKSLIMTRFPCTDVLKAYQLYLAACPFKKISHFFANQTIMNAVEKAKKVHIVDYGIYYGFQWPCLIQRLSTRPGGPPRLRITAIDTPHPGFRPAERIEETGRYLKDYAETFNVPFEFRAIPSRFEAVQIEDLHIAKDELLIVNSMFKFKTLMDESVVAESPRNMVLSTIRKMNPHLFIHGIINGSYNAPFFASRFREALYHYSAIFDMLETNIPRDNEQRLLIESALFGREAINVISCEGLERMERPETYKQWQVRYQRAGFRQLPINQDIMKRAREKVRCYHKDFLIDEDNRWLLQGWKGRIVLALSTWKPDHRSS

SEQ ID NO: 8965 - protein, 96 aa, Zea mays
  unsure (1)..(96): unsure at all Xaa locations
  Clone ID: TF_LIB3152-020-P1-K1-F10.pep
PDWIEMFDDLLLQTEKKATDLLELMRNEAFKNSQVTQTKGPSGPRPLXRKPTKKDVVDLRTILIHCAQAVAADDRMTANELLKHIMHHSKPNGVGT

SEQ ID NO: 8966 - protein, 161 aa, Zea mays
  unsure (1)..(161): unsure at all Xaa locations
  Clone ID: TF_LIB4766-127-A1-K1-C3.pep
GSLASRVHSQPQPPRLSPLRFTRSRHRGGVPERQPPSPAPPRGRPRRVVRLPVALLDLVPVGRRREHERENEQRITRRRRRRASFPANHRLRHEPRRAAANQGAAGAAAASTFHGQSPVLLRGVRLAAQVPPRRQRREDRHRERPPGAWRSATGXGFWFVN

SEQ ID NO: 8967 - protein, 306 aa, Zea mays
  Clone ID: TF_ZmC3528_1.pep
RFAPDELTLCYKTLNDACPYSKFAHLTANQAILEATGAATKIHIVDFGIVQGIQWAALLQALATRPGEKPSRVRISGVPSPYLGPKPAASLAATSARLRDFAKLLGVDFEFVPLLRPVHELDRSDFLVEPDETVAVNFMLQLYHLLGDSDEPVRRVLRLVKSLDPSVVTLGEYEVSLNRAGFVDRFSNALLYYKPVFESLDVAMPRDSPERVRVERCMFGERIRRAIGPEEGAERTDRMAASREWQTLMEWCGFEPVRLSNYAMSQADLLLWNYDSKYKYSLVELPPAFLSLAWEKQPLLTVSAWR

SEQ ID NO: 8968 - protein, 91 aa, Zea mays
  Clone ID: TF_LIB3067-053-Q1-K1-C4.pep
EEPDPAPQSRKVATAAASAAAAKERKEVQRRKQRDEEGLHLLTLLLQCAEAVNADNLDDAHQTLLEIAELATPFGTSTQRVAGYFAEAMSA

SEQ ID NO: 8969 - protein, 354 aa, Zea mays
  unsure (1)..(354): unsure at all Xaa locations
  Clone ID: TF_ZmC5771_2.pep
LWSPSNSSVASSSASCSPPTXGAASRQLLSEAAVAISDNNHDTAASHLAALKRAANQHGDAEQRLIAMMVAALSSRIAPAASAPSQLLADLCSVEQRAGSQLLQDLSPCFRVALHAASAAIVEAVGDHRAIHLVDFDVSFPQHAALIQYLADRRVQGRSLKVTAVTDPSSPFTQSLTASLPAIEERLKKLAERAGVEYRFTVVSCRAAELDASRLCCEPGEAVAVNLAFALSHVPDESVSPANPRDELLRRVRALGPQVVTLVEQELNTNTAPLAARFTDACAHYGAILESLDATLAREIAEKARAEAALSKKAANAVPYWCSVPARRGSPPAGPARARGGAARRGGWPERRSR

SEQ ID NO: 8970 - protein, 100 aa, Zea mays
  Clone ID: TF_LIB4767-027-Q2-K1-H11.pep
GSWSTRVGGPPEVRITGIDFPQPGFRSATRTEGAGRRLSDFARQCGVPFKFRSIVATKWEMIFAEDLEIEPDEVLVVSGLFYFGKLMDVRRGRRRRLPEP

SEQ ID NO: 8971 - protein, 137 aa, Zea mays
  Clone ID: TF_ZmC1155_7.pep
TPSRAAIARPLVRRLSCSYRSSPSGLVFAREIRNAVAFEAADRFERHETFAGWRQRMQEGGFQNAGIGDREALQGRMIARMFAPGNYSVQVQGDGEGLTLRWMDQAMYTVSAWTPVSDGGSTVSASVSTTASHSQHS

SEQ ID NO: 8972 - protein, 180 aa, Zea mays
  Clone ID: TF_ZmC10887_1.pep
MDMFQEDTLSSATSSPASSLCTPSPHPHGSSWVQELSHDQQGLRLISLLYQCAAEVAAGAFDRANLYLEQITQLASLDAPHTLQRLAAVFADALARKLLNLVPGLSRALLPTGPGSPAEAHLVPAARRHLFDVLPFMKLAYLTTNHAVLEAMEGERFVHVVDLSGPAANPVQWIALFHAF

SEQ ID NO: 8973 - protein, 443 aa, Zea mays
  Clone ID: TF_ZmC5027_1.pep
MSIPSFPSYNQHSPLIHPPPKRHQSIGGDLYLARTRLLPPPPTGQGHAFPPLNGPAPFQLQPSPPLPHGAMKRTAAEAAQQQLLDELAAAAKAAEAGNSIGAREILARLNHQLPLLGKPFLRSASYLKEALLLALAEGHHGGCHLTSPLDVALKLAAYKTFSDHSPVLQFTNFTATQALIDEIARSTSSCIHVIDFDLGVGGQWASFLQELAHRRGAGGAALPSVKLTAFVSAASHHPLELRLTRDNIAQFAADLGIPFEFSAISADTINPAELVSATADEVVAVVLPVGCSARAPPLPAILRLVKQLAPKIVIAIDHGADRADLPFSQHFLNCFQSCMFLLDSLDAAGIDADSTCKIEKFLIQPRIEDAVLGRGKVDKPIAWRSAFAAAGFAPVPPSNLAEAQADCLLKRVQVRGFHVEKCGVGLTLYWQCGELVTVSAWRC

SEQ ID NO: 8974 - protein, 414 aa, Zea mays
  Clone ID: TF_ZmC5784_1.pep
EEPDPVPQSPKVPTAEETAAASAAAAKERKEVQRRKQRDEEGLHLLTLLLQCAEAVNADNLDDAHQTLLEIAELATPFGTSTQRVAAYFAEAMSARVVSSCLGLYAPLPPGSPAAARLHGRVAAAFQVFNGISPFVKFSHFTANQAIQEAFEREERVHIIDLDIMQGLQWPGLFHILASRPGGPPRVRLTGLGASMEALEATGKRLSDFADTLGLPFEFCAVDEKVGNVDPQKLGVTRREAVAVHWLHHSLYDVTGSDSNTLRLIQRLAPKVVTMVEQDLSQSGSFLARFVDAIHYYSALFDSLDASYGEDSPERHVVEQQLLAREIRNVLAVGGPARTGDGKFGSWREKLAQSGFRAASLAGSAAAQASLLLGMFPSDGYTLVEENGALKLGWKDLCLLTASAWRPIQVPPCR

SEQ ID NO: 8975 - protein, 184 aa, Zea mays
  unsure (1)..(184): unsure at all Xaa locations
  Clone ID: TF_ZmC12356_2.pep
ARDEVPHHFTYTTQVEHLKPLSSVKPLQGCRCLSVCLPGDANCCCAQRNGGSLPYSSSGLLVCRKTMVYECGESCRCSFNCRNRVTQKGVRIHFEVFKTGNRGWGLRSWDAIRAGSFICEYVGEVIDDANINLNDIEDDYIFQMSCPGEXTLKWNFGPELIREQSTNVSADSFETLXIKISAKR

SEQ ID NO: 8976 - protein, 84 aa, Zea mays
  Clone ID: TF_700432452H1.pep
NAEMQEVGVGLYPSISLLNHSCDPNCSIVFNGPHLLLRAVRDIEVGEELTICYLDMLMTSEERRKQLRDQYCFECDCFRCQTQD

SEQ ID NO: 8977 - protein, 123 aa, Zea mays
  Clone ID: TF_ZmC3525_2.pep
MFQVVEYVGEIVGQRVADRREIEYQSGKRQQYKSACYFFKIDREHIIDATRKGGIARFVNHSCQPNCVAKIISVRNEKKVMFFAERHINPGEEITYDYHFNREDEGQRILCFCRSRYCRRYLN

SEQ ID NO: 8978 - protein, 44 aa, Zea mays
  Clone ID: TF_uC-zmflb73150d09b1.pep
SWSWDRCCRDKVLQKGLLVKLELCRTVNKGWASRAAEPIPQGTF

SEQ ID NO: 8979 - protein, 52 aa, Zea mays
  unsure (1)..(52): unsure at all Xaa locations
  Clone ID: TF_jC-zmX700049670a1.pep
HSSNPNCYAKVILMSTNPPLXIYAKEHIEASEELFYDYPYGPDQAPSWANIP

SEQ ID NO: 8980 - protein, 130 aa, Zea mays
  Clone ID: TF_LIB3606-016-Q6-K6-B5.pep
KGKHKHQVLLDAGWGSGVLRDEDALSLDGSFYGNVGRFINHRCYDANLVQIPVEVETPDHHYYHLAFFTNKKVEAFEELTWDYGIGFDDTEGPSKPFRCMCGSRYCRDPNNLSMLPFSMHKSMKRGIMYV

SEQ ID NO: 8981 - protein, 46 aa, Zea mays
  Clone ID: TF_LIB3689-220-Q1-K6-A12.pep
NFYMCKVSKDFVIDAAFTEHASRFFNHSCQPNCRLEKWNQRVCFGP

SEQ ID NO: 8982 - protein, 227 aa, Zea mays
  unsure (1)..(227): unsure at all Xaa locations
  Clone ID: TF_ZmC3614_2.pep
YHPTIHGLLACCWTVTGSQASRGYLARAGAPCACAAAECGGIQRVCADVEADAAGPGFEAGMGSLRECGDGCASAPSCGNRRTQRGVAVRLCVVCHLHKGWGLHAAEXLNCGQFVCKYAGKEAGSFLTTEEARRQHKLYDELASGGKLCPAQIVIREHIPSSKACLRVNIDATIVGNVARFIIQLPSCDGGNLHPMLVRSSDSLLPRLCFFAAKDIVEGEELTFSCC

SEQ ID NO: 8983 - protein, 459 aa, Zea mays
  unsure (1)..(459): unsure at all Xaa locations
  Clone ID: TF_ZmC2220_1.pep
MSLKCSVGSSNFSISMEEVFKMVEEKCLHSYKMLPSDLSIGKLLSEVCQSVVQLGTMHSEVNRDSGSLHNEVVAPFVKPISCEAAVGISDDVAGGSSVLESSEPCLQNSLVAWYPELAHCKQKTTHDTTDISKGEERVRIPLVNEFGSEXCPPSFYYVPRNLVFQNAYVNISIARIGDEDCCADCSGNCLSSLVPCGCARVTGGEFPYTPEGLLKTEFLDECTSVNHFPQEHHRFYCTVCPLERSKNKASPGPCKGHLMRKFIKECWSKCGCGMQCGNRVIQRGITCKLQVFFTREGKGWGVRTVEDLPKGSFVCEYVGEVLTSSELHERAIENARNGKHKHQVLLDAGWGSGVLRDEDALSLDGSFYGNVGRFINHRCYDANLVQIPVEVETPDHHYYHLAFFTNKKVEAFEELTWDYGIGFDDTEGPSKPFRCMCGSRYCRDPNNLRRMARAAAKRK

SEQ ID NO: 8984 - protein, 511 aa, Zea mays
  unsure (1)..(511): unsure at all Xaa locations
  Clone ID: TF_ZmC3477_2.pep
MYRASXFIPDPNQVLLDAKPLRSLAPMFPAPMGVNVNQSSTPPLVCVTPVGQFSAGFGAGNLPAFGSFTTFSATSNGVSYAGIDYMTSKFGNDEDSVAICIVSAGGYENDDDDTDVLVYSGQGGNSRNTEERHDQKLERGNLALERSLHRKNGIRVVRGFKDPAMVAGKIYIYDGLYKIQESWTERTKFGVNCFKYRLQREPGQRDGAAIWKMTQRWIDDPATRGRVILADLSSEAESIPVCLVNEVDHEKGPGQFTYTNQVKYVRPLSSMTPLQGCGCQSVCLPGDASCACGQHNGGDLPYSSLGLLSCRKPMIYECGESCNCSTNCRNRVTQKGPRLHFEVFRTTNRGWGLRCWEPVRAGSFICEYAGEVIDELKVNLNDTEDDYIFQTVCPGEKTLKWNCGPELLGEASTYVSADEFEPLPIKISAKNMGNVSRFMNHSCSPNVFWQPVQYDHGDDGHPHIMFFALKHIPPMTELTYDYGVAGAESSGSGSRRTKNCMCGSQNCRGLF

SEQ ID NO: 8985 - protein, 189 aa, Zea mays
  unsure (1)..(189): unsure at all Xaa locations
  Clone ID: TF_21211472.pep
MVVSYIMFVELIFSMSIFACDICQQGLLQSEPEGEHNENIGFYGRCVSHAIVFSSHVNPKKEYFRNNNWTCARTEGFKGRKGEGFSDSSHKKYEEYSGEFGVSQEQINAWLRINGSKPCGRGQKEYIHYKQLKGWKHLVVYKSGIHGLGLYTSVFIPRGSMVVEYXGEIVGQRVADXREIEXQGETATI

SEQ ID NO: 8986 - protein, 84 aa, Zea mays
  unsure (1)..(84): unsure at all Xaa locations
  Clone ID: TF_700196512_FLI.pep
ATGKGNIARLINHSCMPSCYARIVTVSGDRSQIILIAKRDVSAGEELTXVPQPCQYNYLFDPDESEDCKVPCLCKAPNCRGYMN

SEQ ID NO: 8987 - protein, 319 aa, Zea mays
  Clone ID: TF_ZmC3767_1.pep
QLTSMALVQVRFTRAEAPTTISELPGLVCDDISGGQENIPIPATNLVDDPPVPPSGFKYLKSLQIPKDIKIPSSIIGCDCEGGCASNKKCLCAQRNGSDLPYVSYKNIGRLVEPKAVVFECGANCSCNHDCVNRTSQQGLQYRLEVFKTASKGWGVRTWDTILPGAPICEYTGVLRRTEDLDGSQNNYCFDIDCLQTMKGLDGREKRAGSEMHLPNLHPENDSDAQPAPEYCIDAHSIGNFARFINHSCQPNLFVQCVLSSHNDVKLAKVMLFAADTILPLQELSYDYGYRLDSVVGPDGKIVKLACHCGAPDCRKRLY

SEQ ID NO: 8988 - protein, 563 aa, Zea mays
  unsure (1)..(563): unsure at all Xaa locations
  Clone ID: TF_ZmC10178_1.pep
PVPHAHRTAPGGRGEVSAEKGVKPDQPGLVCFDVFCSYLPACEFILWQLDACNRPKALLLECERHSGCRSKNWRSSIKLKGSLMPFGKWIDRHQPGVCPTNPPKRSSRLMXLQKLIDLLNDPYDPVHVTLLTGYYAVCXWLFQKTANGRVCFGRSXIPVEQECYGXRGKQDFTSWVCRACEKPEQKRECCLCPVKGGALKPTNVDNLWVHVTCAWFQSQVAFASDELMEPAIGILNIQPLLFMKMCVVCKQIHGSCTQCYRCSTYYHAICASRAGYRMELHCLEKNGRQTTKKISYCAQHRSPNPDNVLIIQTPAGTFSSKKLVHSNGKVAASRLIRKDIPLDLPSEVKISENLSAARCRVYVRKDLKRSREGTIVHHVRGPCQHRWEEIDNLNPPREERDPESFCTFKERLCYLQKTEHGRVCFGRSGIHRWGLFARRDIQEGEMVLEYRGEQVRRSVADLREEKYRVQGKDCYLFKISEEVVVDATDKGNVARLINHSCTPNCYARIMSVGHDESRIVLIAKKKVCAGDELTYDYLFDPDEADERKVPCLCQTANCRKFMN

SEQ ID NO: 8989 - protein, 469 aa, Zea mays
  Clone ID: TF_ZmC4118_3.pep
MDASSVSPCDLDREFALQIAQLLATPPLQSAQEYYGELIRSKKLDGIRVSYSGKHGKGVYANRDFGEDDLVLKDQMLVGAQDSLNKIDCVVCSYCFHFIGSIEYQIGRRLYLQSLGGSGDGTTERHCHGSDVGSSTGCSGASNGNSNAVPQEVLLSLMDGNTLLPLTDQFCLPPVVACPGGCEGELYCSQSCADSDWDSYHSLLCAGSKTEPLRKSALQKFVGHANETNDIFLVAAKAITSTLLRYRKLKRQHVSHESSSSLLLEAWKPLSMGFKKRWWECVALPEDVDSSEEELFRQQIRDLAFTSLQLLKDAIFDPECAPLFSLDIYGHIIGMFELNNLDLVVASPVEDYFIYIDGLPESDKEEAEKVTGPFLDALGEDYLVPCEGTAFFPLQSCMNHSCRPNAKAFKRDEDKDGHAVIIALRPISKDEEITIAYIDEDLPYEERQAQLADYGFTCTCLKCQEERPV

SEQ ID NO: 8990 - protein, 269 aa, Zea mays
  Clone ID: TF_ZmC2742_2.pep
DEDPCIRLLSYCKKHRQPSAAERPSLESDPPEPIQVVQTDMASSSGCARTEPYNLHRRRGQKQPQVVATASLKRLYVENRPHIVSGYCQNRVGNTCGESIQPFGLSDAVQQEAIGNVSSMVEKYTIVKATFRKRLTFGKSKIHGYGVFAKVAHKAGDMMVEYIGEIVRPPISDTRERRIYNSLVGAGTYMFRIDDERVIDATRVGSIARLINHSCEPNCYSRAITILGDEHIIIFAKRDIDPWEELTYDYRLHHIGWDMTCLCDMLASA

SEQ ID NO: 8991 - protein, 122 aa, Zea mays
  unsure (1)..(122): unsure at all Xaa locations
  Clone ID: TF_LIB4704-006-R1-M1-C10.pep
QTVCPGEKTLKWNCGPELIGEDSTYVSADEFEPLPIKISAKNMGNVSRFMNHSCSPNVFWQPVQYDHGDDGHPHXMFFALKHIPPMTELTYDYGVAGAESSGSGSRRTKNCMCGSQNCRGLF

SEQ ID NO: 8992 - protein, 886 aa, Zea mays
  Clone ID: TF_ZmC3517_1.pep
METGAAAAPASRADGVRRCKILVPWRFQPGFVRQPLKQAANDAAVNGDGGNTAGAPDAKSCRADGAASDGGETNVFRDAKKFGSGRATRGKNGEVDGGEEHSERCTSSQSLKSPDVENGGRPGPGDACNLGESVRGGWVKSSPLEGTGNSRGANGGVEAGEDYNLGSSNCDASWKDARTQEFRGAGDGAACDPEVIESNVGAEKCFAKGLKKPFMDQTGSKSNGSSAPGLESEDPEGNVGLEDSSYQAAKGCSMGDGAAKENEATANGCSSATPGSIGNGTYVRKGRKAAVPWRFQARYKRSFSDAFGSNNESPDLPAYMFDSSSTQCTPATRSTVRCYASAHSGVRVSAMNNFSVKGDTECKKRKTNNDYQDESMLNNGGVVVRERIMRSLQDLRLIYRDLLDEEDNSREKVLNVRPDLKAYRIFRERFCTDFDDEKYIGSVPGIYPGDIFHLRVELCVVGLHRPHRVGIDCTKKDDGTTVAVSIVSCAQSHDIKYNLDAFVYTGLVAVAVNQRIEGTNLALKKSMDTNTPVRVIHGFTTFNGKKKFPAYIYGGLYLVEKYWREKEHGDRYVYMFRLRRMEGQKHIDIQEILQTGNSGSNDNVIIKDLSRGLERVPLPVVNKISDERPMPYCYISHLRYPRNYRPTPPAGCNCVGGCSDSNKCACAVKNGGEIPFNDKGRIVEAKPLVYECGPSCKCPPTCHNRVGQHGLKFRLQIFKTKSMGWGVRTLEFIPSGSFVCEYIGEVLEDEEAQKRTNDEYLFAIGHNYYDKSLWEGLSRSIPSLQKGPGKDDENETGFAVDASEMGNFAKFINHNCTPNIYAQNVLYDHEDISVPHIMFFACDDIRPNQELAYHYNYKIDQVHDANGNIKKKKCLCGSVECDGWLY

SEQ ID NO: 8993 - protein, 186 aa, Zea mays
  Clone ID: TF_ZmC2220_2.pep
QCGNRVIQRGITCKLQVFFTREGKGWGVRTVEDLPRGAFVCEYVGEILTSAELHERAIENARNGKHMHQVLLDAGWGSGVVLRDEDACSLDGSFYGNVGRFINHRCYNANLVQIPVEVETPDHHYHHLAFFTNKKVEAFEELTWDYGIDFDDMEGPSKPFRCMCGCRYCRDPNNPRRMGRAAAKRK

SEQ ID NO: 8994 - protein, 85 aa, Zea mays
  Clone ID: TF_700456152H1.pep
RFMNHNSQPKCETLKWTVNGDTRVGLFAVCDIPAGTELTFNYNLDCLGNEKTVCRCGASNCSGFLGDRPKTSTTLSSEEKGKKTK

SEQ ID NO: 8995 - protein, 931 aa, Zea mays
  Clone ID: TF_UC-ZMFLB73179F11_FLI.pep
MEAEAAAAVVASSASASASAGRSRPSSSAAQVTSNSAVRAGEENAASLYVLSVIDSLKKRITADRLTYIKNRIGENKTNISSYTQRTYNLSKNRQISTSKGTDSASNLLTKRQDDALCTLHSLDIIPVDKDGGTFQDESPFSSSNVMFGGNLGPKNAIIRPIKLPEVPKLPPYTTWIFLDRNQRMTEDQSVLGRRRIYYDTSCGEALICSDSEDEAIEDEEEKKEFKHSEDHIIRMTVQECGMSDAVLQTLARHMERAADDIKARYEILHGEKTKDSCKKGTEHNVKVEDLYCDKDLDAALDSFDNLFCRRCLVFDCKLHGCSQDLVFPTEKQPAWSGVDDSVPCGIHCHKLASEPDAAAGADHMLFDVEEPTHSSDNVMNQPGSNRKKNGSSGRKTKSQQSESSSTARVISESSDSEVHPISNKSPQHSPSPSKVKIGPKGGIRKITNRRIAERILMSVKKGQREMASSDSNFVSGYLLARDMKLRSDTRNGNKELIVSSQQSSPSTRSSKKKSTPQIGNSSAFAEAHNDSTEEANNRHSATDGYDSSRKEEFVNENLCKQEVYLRSWKAIEQGLLVKGLEIFGRNSCLIARNLLGGMKTCKDVFQYMNYIENNSASGALSGVDSLVKGYIKGTELRTRSRYFRRRGKVRRLKYTWKSAGYNFKRITERKDQPCRQYNPCGCQSTCGKQCPCLSNGTCCEKYCGCPKICKNRFRGCHCAKSQCRSRQCPCFAADRECDPDVCRNCWVGCGDGTLGVPNQRGDNYECRNMKLLLKQQQRVLLGRSDVSGWGAFLKNSVSKHEYLGEYTGELISHKEADKRGKIYDRENSSFLFNLNNEYVLDAYRMGDKLKFANHAPDPNCYAKVIMVTGDHRVGIFAKERILAGEELFYDYRYEPDRAPAWARKPEASGAKDDGQPFNGRAKKLAQNNRG

SEQ ID NO: 8996 - protein, 931 aa, Zea mays; identical to SEQ ID NO: 8995
  Clone ID: TF_ZmC12902_2.pep

SEQ ID NO: 8997 - protein, 249 aa, Zea mays
  unsure (1)..(249): unsure at all Xaa locations
  Clone ID: TF_ZmC3767_6.pep
QLTSMALVQVRFTRAEAPTTISELPGLVCDDISGGQENIPIPATNLVDDPPVPPSGFKYLKSLQIPKDIKIPSSIIKTASKGWGVRTWDTILPGAPICEYTGXVLRRTEDLDGSQNNYCFDIDCLQPMRVLDGREXRAGSEMHLPNLHPENDSDAHPAPEYCIDAHSIGNFARFINHSCQPNLFVQCVLSSHNDVKLAKVMLFAADTILPLQELSYDYGYRLDSVVGPDGKIVKLACHCGAPDCRKRLY

SEQ ID NO: 8998 - protein, 448 aa, Zea mays
  unsure (1)..(448): unsure at all Xaa locations
  Clone ID: TF_700203210_FLI.pep
MLMEEECVEAPSYIHIDSNAFSYRKHKSQTEEDIAVCECQYDILDPESPCGDRCLNLLTNTECTPGYCRCGVYCKNQRFQKCQYARTRLVRTGGRGWGLVADENIMAGQFVIEYCGEVISWKEAKRRAQAYETQCLKDAYIIYLNADESIDATRKGNLARFINHSXEATYLWEDDDDRFSVENIPLYDSADDEPTSINKEILVSSDGMVTQYSNISRVQSTENPGNTGTNEFAPIIVDELTTSSNGLAPMNVEPLTVSSNEFTPSNAMPMVARLVENGSTGYSAQDTHDASQNSAPKAANHANQTGPQNNSNHSTLVPVKPAPKRRGRKPKRVVHKQLDIPDICDRLTSSVACEEILYCEEVKNHAVSEIDALYDEIRPAVEEHERDSQDSVSTSLAEKWIEASCRKYKAEFDLYAAVLKNVASTPLRSKDDVGPREQNGLKYLENGS

SEQ ID NO: 8999 - protein, 696 aa, Zea mays
  Clone ID: TF_ZmC3767_4.pep
MANMDSVVVMEVAPVPIPTFMDATPLNPPLPLVVEELVLRRSARYLNRPTRPNYADQEPPKNPGGRGRGKRKRDEEKPELAAQQGTKTPGRNDSNVEAGERKPMPVTAAVPACCAGVAAEDDATPTGKSAKLRVKETLRAFNSHYLHFVQEEQKRAQAAIQEIEAKGGLKRQTKGGKKKSSKQEAEAEEKEKRPSKRPDLKAITKMQEMNAVLYQEKTIGHLPGLDVGDQFYSRAEMVVLGIHSHWLNGIDYMGMKYQGKKEYANLTFPLATCIVMSGIYEDDLDKADEIIYTGQGGNDLLGNHRQIGSQQLKRGNLALKNSRKNGNPVRVIRGHLSKNSYTGKVYTYDGLYKVVDDWVQNGVQGHVVFKFKLKRLEGQPSLTTSEVRFTRAEAPTTISELPGLVCDDISGGQENIPIPATNLVDDPPVPPSGFTYLKSLKIPKDIKIPSSIIGCDCEGDCASNKNCSCAQRNGSDLPYVSYKNIGRLVEPKAVVFECGANCSCNHDCVNRTSQQGLQYHLEVFKTASKGWGVRTWDTILPGAPICEYTGVLRRTEDLDGSQNNYCFDIDCLQTMKGLDGREKRAGSEMHLPNLYPENDSDAPPAPEYCIDGSSIGNFARFINHSCQPNLFVQCVMSSHNDVKLAKVMLFAADTILPLQELSYDYGYRLDSVVGPDGKIVKLPCHCGAPDCRKRLY

SEQ ID NO: 9000 - protein, 152 aa, Zea mays
  unsure (1)..(152): unsure at all Xaa locations
  Clone ID: TF_jC-zmXLIB3526P036bd01b1.pep
LTFGKSKIHGFGVFAKVAHKAGNLMVEYLGEIVKPPFSNTKKRQIYNSLVGAGTYLFRINNKRVLNAIRVESLARLINNXCKPNCFXRAITIFGNKHIIIFAKRDINPWEKLTYNYRFFSSDKQLPCFWGFPKCRGVFNDFKAKKHPVKIQV

SEQ ID NO: 9001 - protein, 576 aa, Zea mays
  unsure (1)..(576): unsure at all Xaa locations
  Clone ID: TF_ZmC7397_2.pep
PLASSFRLPPARSLPSGTSSVQSSELGSVYSSSSLVDPECLKFWPSCYCLLFHSRRITRVLMEEECVEAPSYIHIDSNAFSYRKXEHLTEEDIAVCECPPDFLGPESPCGDRRLDLNPPNPTQSTXGLRANRTRPKKKSRFQKCQYARTRLVRTGGRGWGLVADENIMAGQFVIEYCGEVISWKEAKRRAQAYETPSASDAYIIYLNADESIDATRKGNLARFINHSCQPNCETRKWNVLGEVRVGIFAKQNIPFGTELSYDYNFEWYGGVMVRCLCGAASCSGFLGAKSRGFQEATYLWEDDDDRFSVENIPLYDSADDEPTSINKEILVSSDGMVTQYSNISRVQSTENPGNTGTNEFAPIIVDELTTSSNGLAPMNVEPLTVSSNEFTPSNAMPMVARLVENGSTGYSAQDTHDASQNSAPKAANHANQTGPQNNSNHSTLVPVKPAPKRRGRKPKRVVHKQLDIPDICDRLTSSVACEEILYCEEVKNHAVSEIDALYDEIRPAVEEHERDSQDSVSTSLAEKWIEASCRKYKAEFDLYAAVLKNVASTPLRSKDDVGPREQNGLKYLENGS

SEQ ID NO: 9002 - protein, 910 aa, Zea mays
  unsure (1)..(910): unsure at all Xaa locations
  Clone ID: TF_ZmC13490_1.pep
ASVPPLPPRAAWVFCDDCQKWRCIPAELADVIGETNCRWTCKDNGDKTFADCSIPQEKSNAEINAELDLSDASADEADNGGSNSKACKPPSWTLVRSNLFLHRNRRTQSIDESMVCNCKPPQDGRMGCRDGCLNRMLNIECVKRTCPCGEQCSNQKFQRRSYAKLRWFHSGKKGYGLQLQEDVTEGRFLIEYVGEVLDITSYESRQRYYACKGQKHFYFMALNGGEVIDACTKGNLGRFINHSCSPNCCTEKWMVNGEVCIGIFALRSIKKGEELTFDYNYVRVSGAAPQKCFCGTAKCRGYLGGDISIVDTIITQDDTEADHFEQMVVDKDSKELLGPNESDSDGSHPNISEPEFSIQGEDLHDCSAAKVELDLLEGTRGTSLETSEPEHPLEAWSPPEDEDVIRTPVHVSRTFESSLQKFSVHDTQSSDLLRKTANSMEGSKAPNITNGSTLGSDFRGNXCLLSDLLREKNLKQHKNQKRQPSSPIDNEHILGVEGTLNSLLDVDGGISKRKDATKGYLKLLVVTAAEDGSAGGTSKSLRDLSLILEALLKTKSHSVLLDIINKNGLQMLHNILKQSRGIFHRRPIIRKLLKVLEFLAQKGILTSEHINGGPRFAGVESFRDLMLSLTRHSDIQVQQIARSFRDRWIPPNNARSEPTEYPHTSTFVHDIQGTNTVWSSARRKRKSRWDYQPDEHYKMPGLKIQKVCSGHGEFDVQFGFMKNKLKRNQGANNYHNDVLGMGSSTEGEDDEAPPPGFESQLDRRPAQLSIGSEVAPGLCMERYQSSLSISYGVPVTLVQHFGTPESEGGQCHKKWKVAPGVPFSPFPPLPPYPRGNPCPSTSSSQMFQHDGTPQVKHNNSGQRGRIMGRDGRVHRSWRNESRTKWQYHHQGRRFSSTHHRFERSEPARPQ

SEQ ID NO: 9003 - protein, 148 aa, Zea mays
  Clone ID: TF_LIB3075-013-Q1-K1-F1.pep
CCSGCFGDCLAEPLPCACARETGGDFAYTRDGLLKEGFLDACVSMLREPLKQPHFYCKGVCPIEQIMKGVSSAKPDACKGHLIKKFIKECWIKCGCTRNCGNRVVQRGITRKLQVFLASRKKGWGLRSAENLPRGAFVCEYVGEILTN

SEQ ID NO: 9004 - protein, 358 aa, Zea mays
  unsure (1)..(358): unsure at all Xaa locations
  Clone ID: TF_ZmC3752_1.pep
LWKLHENGPPNSTTHQQAHLVLPPNGCTHDLSDISKGXERLSISAVNEFGSENCLPSFYYIPRNLVSQDSYVNSVETIGDKDCCSDCSGNCLYASEPCACARKTGGEFAYTRDGLVRTKFLDECISMTPRPEKHNMFFCKSCPLESIRNEPSPELCRGHIIRNFIKECGSKCGCNAQCGNRVVQRGITCNLQVFSTREGKGWGLRTLDELPKGAFVCEYVGELLTNTKLHEMTTQNMHNARYSVLLDAGWGPDGVLKDEEALFLDATFCGNVGRFINHRCYDANLVEIPVEKETPDHHYYHFAFFTTKKVEAFEELTWDYGIDFDGDKHPVKSFECLCGSRYCRGRKHSRTRGKAASK

SEQ ID NO: 9005 - protein, 513 aa, Zea mays
  Clone ID: TF_ZmC7397_1.pep
MLMEEECVEAPSYIHIDSNAFSYRKHKSQTEEDIAVCECQYDILDPESPCGDRCLNLLTNTECTPGYCRCGVYCKNQRFQKCQYARTRLVRTGGRGWGLVADENIMAGQFVIEYCGEVISWKEAKRRAQAYETQCLKDAYIIYLNADESIDATRKGNLARFINHSCQPNCETRKWNVLGEVRVGIFAKQNIPFGTELSYDYNFEWYGGVMVRCLCGAASCSGFLGAKSRGFQEATYLWEDDDDRFSVENIPLYDSADDEPTSINKEILVSSDGMVTQYSNISRVQSTENPGNTGTNEFAPIIVDELTSSNGLAPMNVEPLTVSSNEFTPSNAMPMVARLVENGSTGYSAQDTHDASQNSAPKAANHANQTGPQNNSNHSALVPVKPAPKRRGRKPKRVVHKQLDIPDICDRLTSSVACEEILYCEEVKNHAVSEIDALYDEIRPAVEEHERDSQDSVSTSLAEKWIEASCRKYKAEFDLYAAVLKNVASTPLRSKDDVGPREQNGLKYLENGS

SEQ ID NO: 9006 - protein, 117 aa, Zea mays
  Clone ID: TF_ZmC113_2.pep
VIEYRGEQVRQRVADLREARYHREKKDCYLFKISEDVVIDATGKGNIARLINHSCMPSCYARIVTVSGDRSQIILIAKRDVSAGEELTYNYLFDPDESEDCKVPCLCKAPNCRGYMN

SEQ ID NO: 9007 - protein, 302 aa, Zea mays
  unsure (1)..(302): unsure at all Xaa locations
  Clone ID: TF_ZmC2742_1.pep
THAXEDEDPCIRLLSYCKKHRQPSAAERPSLESDPPEPIQVVQTDMASSSGCARTEPYNLHRRRGQKQPQVVATASLKRLYVENRPHIVSGYCQNRVGNTCGESIQPFGLSDAVQQEAIGNVSSMVEKYTIVKATFRKRLTFGKSKIHGYGVFAKVAHKAGDMMVEYIGEIVRPPISDTRERRIYNSLVGAGTYMFRIDDERVIDATRVGSIARLINHSCEPNCYSRAITILGDEHIIIFAKRDIDPWEELTYDYRFFSSDQRLPCFCGFPKCRGVVNDVEAEEQSAKIRVKRSELFEKSEK

SEQ ID NO: 9008 - protein, 767 aa, Zea mays
  Clone ID: TF_ZmC12356_1.pep
MNGPSNFMPTPEQDVLDVKPLRTLAPMFPASLGVNTFNHSTTPPLIFVTPSGQFQGGFGDWNNSAAKSFFAFSSKDARGGKADTFSDQNTGTGKAATFGDQDAFGSQNVFASDHSTGTGKAATFGDQDAFGSQNVATGVQDAAKGQTATDWTDVSANANPNGPIDAIAISAYRSTQPNVISLDDDDDDDDEPYAANKTSASGRKIKRPSHLSGYNVSDALVSDSSNSMKVKRPKSSHGKAAADNEHALLPPSEDPREIVEAVLMTFEALRRRHLQLDEAQETNKRADLKASAILMSSNIRANPGKRIGVVPGVEIGDIFYFRMELCIIGLHAPSMAGIDYMTAKFGDEDDSVAICIVAAGGYDNNDDDTDVLVYSGSGGNSKNSEEKHDQKLERGNLALERSLSRKNVIRVVRGYKDPGCLTGKVYIYDGLYRIHESWKEKTKSGIFCFKYKLLREPGQPDGVAIWKMSQKWVQNPLTRGSVLNPDLSSGAENLPVCLVNDIDSDEVPHHFTYTTQVEHLKPLSSVKPLQGCRCLSVCLPGDANCCCAQRNGGSLPYSSSGLLVCRKTMVYECGESCRCSFNCRNRVTQKGVRIHFEVFKTGNRGWGLRSWDAIRAGSFICEYVGEVIDDANINLNDIEDDYIFQMSCPGERTLKWNFGPELIGEQSTNVSADSFETLPIKISAKRIGNISRFMNHSCAPNVFWQPVQFDHEDDHRPHIMFFALKHIPPMTELTYDYGDVGADPSGVRSPRAKNCLCESSNCRGFFI

SEQ ID NO: 9009 - protein, 163 aa, Zea mays
  Clone ID: TF_ZmC2742_3.pep
LTFGKSKIHGYGVFAKVAHKAGDMMVEYIGEIVRPPISDTRERRIYNSLVGAGTYMFRIDDERVIDATRVGSIARLINHSCEPNCYSRAITILGDEHIIIFAKRDIDPWEELTYDYRFFSSDQRLPCFCGFPKCRGVVNDVEAEEQSAKIRVKRSELFEKSEK

SEQ ID NO: 9010 - protein, 610 aa, Zea mays
  Clone ID: TF_ZmC3477_1.pep
GGNFPASSNGVLYSGKRIIGECDATRISAYKTRSSISLKDGDDDPYSGNQSLASERKPRRGRPPGSGRDGSNGKLKRPKPTYKNFVAGKELVFLSSTSDPRDIVESVHMTFEALRRRHLQMDETQDASRRADLKAGAIMMASNIRANSGKRVGTVPGVEIGDIFYFRMELCVIGLHAPSMGGIDYMTTKFGKDEDSVAICIVSAGGYENEDDDTDVLVYSGQGGNNRNTEERHDQKLERGNLALERSLHRKNEIRVVRGFKDPFCLTGKIYIYDGLKIHESWKERTKYGVNVLLQVLLREPGQRDGAALWKMVTRRWDNPATRGRVLLADLSSKAEILPVCLVNEVDHEKGPVHFTYTNQVKYLRPLSSMKKLQGCGCQSVCLPGDASCACGQHNGGDLPFSSSGLLSCRKPIVYECGESCNCSTNCRNRVTQKGSRLHFEVFRTTNRGWGLRCWEPIRAGSFICEYAGEVIDELKFNLNDSEDDYIFQTVCPGEKTLKWNYGPELIGEVSTYVSPDEFEPLPVKISAKNMGNVSRFMNHSCSPNVFWQPVQYDHGDDGHPHIMFFALKHIPPMTELTYDYGVAGAESSGSGSRRTKNCVCGSQNCRGLF

SEQ ID NO: 9011 - protein, 343 aa, Zea mays
  Clone ID: TF_ZmC12905_1.pep
NGHSKGKQTSIFIYDGLYEVLECWQEGPKGERVFKYKLQRIAGQPELALHAVKATRKSKVREGLCLPDISQGRERIPICVINTIDDMKPAPFKYITEVIYPDWYEKEPPKGCNCTNGCSDSITCACAVKNGGEIMFNFNGAIVEARPLIYECGPSCRCPPTCHNRVSQHGVKIPLEIFKTGKTGWGVRSLSSISSGSFICEYTGELLEDEEAEKRENDEYLFDIGHNYHDKELWEGLKSVVGLGSATSSSETMEGFTIDASECGNVGRFINHSCSPNLYAQNVLWDHDDMRMPHVMFFAVENIPPLQELTYHYNYKIGEVYINGEEKVKHCYCGASDCCGRLY

SEQ ID NO: 9012 - protein, 60 aa, Zea mays
  Clone ID: TF_uC-zmromo17102d10a1.pep
NCYPRIMSVEHDESRIVLIAKKNVCAGDELTYDYLFDPDEGDEREVPCLCQTANCRKFMN

SEQ ID NO: 9013 - protein, 253 aa, Zea mays
  Clone ID: TF_ZmC3531_1.pep
PRPVKKKKGRNISSETSQKVKPVISCPESDGCARASINGWEWRNWARNATPSERARVRGYHVRTILSASNDNVWKNSQAKVSSARTNRVKLRNLLAAAEGSELLKITQMKARKKRLRFQRSKIHDWGLVALESIEAEDFVIEYVGQLIHRRVSDIRESQYEKSGIGSSYLFRLDDDFVVDATKRGGLARFINHSCEPNCYTKVITVDGQKKIFIYAKRRIYAGEEITYNYKFPLEEKKIPCHCGSRRCRGSMN

SEQ ID NO: 9014 - protein, 742 aa, Zea mays
  unsure (1)..(742): unsure at all Xaa locations
  Clone ID: TF_ZmC204_1.pep
EPGESVTDDRILGARMTKASCVSSVPRKYEVVEEELSVXDLGELQRQLIVALPEVYSEKFVSKKNGTENLELPEVKDYQPRKVAGDEILEQEVYGIDPYTHNLLSDIMPADLELSPTDKHIFIEELLLNTLNKQVRHFTGSGNTPMTYNLRPVIEEIQRSAEDNGDRRTSKMCLGMLKTMRNRSEQNFVAYRKGLGVVCNKKGGFGVDDFVVEFFGEVYPSWRWYEKQDGIKHIQNNSEDQAPEFYNIMLERPKGDGDGYDLVFVDAMHKANYASRICHSCNPNCEAKVTAVNGKYQIGVYTLRPIAEGEEITFDYNSVTESKEEHEASVCLCGSQVCRGSYLNFSGEGAFEKVLMEFHGVLDRHSLLLQACETDSVSQQDLIDLGRAGLGTCLLAGLPGWLVAYTAHLVRFIYLERQKLPDEILRHNVDEKRQFLIEINMDSEKNDAEVQAEGVLNSRLQQIVHTLDKVRYVMRCIFGDPKNAPPPLVRLSGKSLVSAIWKGDSSIVAELIQSMEPHVEEEVLSDLKAKIRAHDPSESEDIEGGIRNSLLWLRDELRTLSCTYKCRHDAAADLIHLYAYTKCFFRVRDYKTVKSPPVHISPLDLGPKYADKLGPGFQEYCKTYPENYCLAQLIYWYSQNSEPESRLTRARKGCMSLPDVSSFYVKSAKPSQERAYGNRTVRFMLSRMEKQAQRPWPKDRIWVFKSDPRFFGSPMMDTVLNNSPLDKEMVHWLKTRPNVFLG

SEQ ID NO: 9015 - protein, 543 aa, Zea mays
  Clone ID: TF_ZmC1758_2.pep
SVVKKRRPRSSELVRVSSLGVQDQIYFRDLVRRARITFECPRGLLLRDDERAESLGLAGAAGFGVARDRRRARADMRAAALMADHDLWLNRDRRIVGPMPGISVGDAFFFRMELCVLGLHGQVQAGIDYVSAGRSASGEPIATSIIVSGGYEDDDDHGDVHSARGHGGRDPNLHKHCVDQKLEGGNLALERSMAYGIEIRVIRAVKSRRSPVGKVYFYDGLYKVVDYWLDRGKSGFGVYKYRLLRIEGQEPMGSVNYRVAEQLKVDVFAIRPTGYLSFDISMGRDTLPVALYNDVDDDQDPLLFEYLTRPIFPTSAVQGKFAEGGGGGGCDCAEICSIGCNCAGRNGGEFAYNKTGTLLRGKPLVYECGPYCRCPPSCPNRVSQKGLQHRLEVFRSRETGWGVRSLDLIKAGTFICEFSGIVLTHQQSEVMAANGDCLVRPNRFPPRWLDWGDISDVYPDYVAPDHPVIPELNFAIDVSRARNVACYFSHSCSPNVFIQFVLFDHYNVSYPHLMIFAMENIPPLRELSIDYGMVDEWTGQLTM

SEQ ID NO: 9016 - protein, 585 aa, Zea mays
  Clone ID: TF_ZmC487_1.pep
MPDLSTSYLPPFPELSLDAGALAVDHAGNAAAAASADAASAYASSSASVGSGVDDLVIPAECRWKGHVRTFDMAGAGAVTTCPAARRGGGKKLSLIPSLEPARTQASASAPTLEERVSEWAAKKAAAGVPTHHCVLPFLTGAPMAVECRLCSKIIYVGEEIKCSVKKCPQMFHLKCVAEDTSNFTVESFRCPQHGCMVCKQKMFFWRCGRCTVAAHTKCAPWPVVHLKNDQGSAICWRHPSDWLLQNKNADFTNSVEEVFCRLPLPYVNEDLNIDSIIRDYAEAVYKPPPYTSIRRNVYLIKKKRTGVRVDIGCTNCRADSTCKEDCECRGLSMSCSKNCRCSDLCTNRPFRKDKKIKIVKTKRCGWGAVALEPLERGDFVIEYVGEVIDDATCEQRLWDIRRRGDKNFYMCEISKDFTIDATFKGNVSRFLNHSCEPNCKLEKWQVDGETRVGVFASRSIEVGEPLTYDYRFVHFGEKVKCHCEAVNCQGYLGSQIKNPIQSILATVAPQVQLREYSPMHHEAPRLKPINHLLPWTNCIEVSFNLRSKRKIDRLCWARKKKRTSLVPSSTSMPASPSEVPAADF

SEQ ID NO: 9017 - protein, 132 aa, Zea mays
  Clone ID: TF_ZmC3614_1.pep
APPGEFLTTEEARRRHKVYDELASGGKLCPALIVIREHLPSGKACLRVNIDATRVGNVARFINHSCDGGNLHPVLVRSSGLLLPRLCFFAARDIVEGEELTFSYGDARVRPKGLPCFCGSSGCSGVLPSEET

SEQ ID NO: 9018 - protein, 276 aa, Zea mays
  Clone ID: TF_LIB3245-301-B3_FLI.pep
ASACRALRAAVTAVTARRAGDAARGLEPLPIPFRNYVDSKPYAYFLYTPFSLTRLAPGASAPSAQPWGAAWTRPPRPTWPRPNLDGLPSAVYGCACAAAECGGTQCACADVEADAAGSGLEAGMGSLTECGDVCACAPSCGNRRTQRGVAVRLCVVRHLHKGWGLHAAEALSCGQFVCEYAGEFLTTEEARRRHKVYDELASGGKLCPALIVIREHLPSGKACLRVNIDATRVGNVARFINHSCDGGNLHPVLVRSSGLLLPRLCFFAARDIVEGE

SEQ ID NO: 9019 - protein, 253 aa, Zea mays
  Clone ID: TF_ZmC1285417_1.pep
ICVINTVDDVQPGPFQYTTRIRYPFGLTEKHNQGCDCTNGCSDSESCACAVKNGGEIPFDLSGAILNEKSVIFECGSSCKCPPSCRNRVSQHDTKIPLEVFRTTKTGWGVRSLWSIPAGSFICEYIGELQHQKAADKRRNNNYLFDVGLNYDDENVSSVLLSNVSGLNSSSSCSQAMEDVRFTIDASVYGNIGRFISHSCSPNLQAQNILWDHGDKRMPHIMFFAAETIPPLQELTYDYNNSEIDRVQGVNCE

SEQ ID NO: 9020 - protein, 643 aa, Zea mays
  Clone ID: TF_ZmC499_1.pep
RPSAAASGPACVLSVTATNGLGGLGLGLPGAHYLQSALVIRCMSCNSNFLNTDLLYPHIVSDHSQQFRLLDVPQRPSGQSAQQTEGMSGLPLYDSHNVEDENGSQKFVCRLCGLKFDLLPDLGRHHKVAHMVSGAVGHIPLGRGKYQLNRGRHYYSAFKKSLRPTSTLKKSSSSGIDKNLKFQISGLTSQIVESETSSLGKLQDFQCSDVAQTLFSKIQKTRPHPSNFDVLSVARSVCCKTSLLAALEVKYGPLPENIFVKAAKLCSDNGVQIDWHQEGFICPKGCKSRYNSNALLPMQLTAVDFLEAPVDSRNDDEMWGMEEYHYVLDSKHFGWKPKNESVVLCEDISFGREKVPIVCVIDVDAKDSLGMKPEELLPHGSSLPWEGFHYITNRVMDSSLIDSENSMPGCACSHPECSPENCGHVSLFDGVYNSLVDINGTPMHGRFAYDEDSKIILQEGYPIYECNSSCICDSSCQNKVLQKGLLVKLELFRSENKGWAIRAAEPILQGTFVCEYIGEVVKADKAMKNAESVSSKGGCSYLFSIASQIDRERVRTVGAIEYFIDATRSGNVSRYISHSCSPNLSTRLVLVESKDCQLAHIGLFANQDIAVGEELAYDYRQKLVAGDGCPCHCGTTNCRGRVY

SEQ ID NO: 9021 - protein, 121 aa, Zea mays
  Clone ID: TF_ZmC181406_1.pep
EFVMFDRSKLSRVDWKYIIIDEAQRMKDRDSVLARDLDRYRCQRRLLLTGTPLQNDLKELWSLLNLLLPEVFDSSKAFSDWFSKPFQRDGPTHNEEEDDWLETEKKVIIIHRLHQILEPFM

SEQ ID NO: 9022 - protein, 217 aa, Zea mays
  unsure (1)..(217): unsure at all Xaa locations
  Clone ID: TF_LIB4172-030-R1-L1-E12.pep
PVSVELLDFKLLVQIKDYNTKHRALLTGTSFHTNLNELLMLIHFLEGERCGSITDLQEEVKDINQDNQIEKLHGMLNPHLLGRFKNDVMKELPAKKEWILQRELTRXHKEYYKAILTKNYEQLARRNGGHTCLINVGMEVHTLCCHGFMIDEPDLEPANPQXGLKTLLYSSGKMQLLHKMMEKLXXQXHRSLIYSQFHHMLDLLEDYLNYRKWTYER

SEQ ID NO: 9023 - protein, 963 aa, Zea mays
  unsure (1)..(963): unsure at all Xaa locations
  Clone ID: TF_ZmC170_1.pep
IYDWIKSTGTIRVDPEDEKRRAQRNPMYQVKTYKNLNNKCMELRKVCNHPLLSYPFLNHGKDFMIRSCGKLWNLDRILIKLHKSGHRVLLFSTMTKLLDIMEDYLQWRRLVYRRIDGTTSLEDRESAIVDFNRPGSDCFIFLLSIRAAGRGLNLQSADTVVIYDPDPNPQNEEQAVARAHRIGQTREVKVIYMEAVVDNISSYQKEDELRNGGSGDLEDDLAGKDRYMGSIESLIRNNIQQYKIDMADEVINAGRFDQRTTHEERRMTLETLLHDEERYQDSVHDVPSLQEVNRMIARTESEVELFDQMDEDFDWTGDMTKHHQVPKWLRVNSNEVDAVVASLSKKPSRNMSSGGIALDTNETLEXKRGRPRGTGKYSIYREIDDEDLEESDEDSEERNTASLPGEGEVGEFEDEEDNDDSVPDNKDESEEEEPMNDDVYEFTEGLRGRKANRMEEAGSTGSSSGSRRLPPPVPSSSSKKIXSLSALDARPGTLSKRTPDDLEEGEIAMSGDSHMDLQQSGSWNHERDDGEDEQVLQPKIKRKRSIRLRPKPNAEKQEDRSGEGAFPQRAARQQDAVHPIVKQKRNMSSRKVSPASRSGKLSHLSGSGEGSAELSKENWSSKAIDSTAPEFGGTKMSDSMQRKCKNVISKLWRRIDKEGHQMIPNISSWWRRNENSSFRGPAGSTLDLQKIEQRVDGLEYGAVTEFIADMQQMLKSVVQHFSYRHEVRIEAETLHNLFFNIMKIAFPDSDFMEAKNAMSFSNPGSGAAAAPSSSKHAAPSLKRSRASASASASEAEQQHGSGHSSRHNQPSEAVPPSRSHSSRSERDPRHGGSRDQHLQDGAAGLLHPSDMFIVKKKRQERARSGIGSPSSSGRGAGPLSPANPGRPGPAPSPRGARTPFQRDPPPHPSQQSMHSAGSGWGSGGAHSDHQAGASSSAPGIGDIQWAKPAKRLRTDRAGRGGRA

SEQ ID NO: 9024 - protein, 307 aa, Zea mays
  Clone ID: TF_ZM4624.C5.o1.fg.pep
MGGPLTAAGGRGDGGAKAVEPLRPPPPPDPKTMARWYQLEALERAVRGNTLAFLETGSGKTLIAVMLLRAYAHRVRRPDSRRFAVFLVPTVVLVGQQARVVEQHTDLVVKQFCGEMGVDFWDAATWRSQLEDGEVLVMTPQILLDNLRHSFFRLQDIALLIFDECHHARGNTPYACIFKEFYHPQLNSSASDPLPRIFGMSASLIYSKDLNPHNYSKQISEIENLMNSKVYTVDSESALSEYIPFASTKIVDFDDSNISSELHANILSCLNRLNKKLSGKTRHGGQFGVRYKGEVGTFGMPTEGNRD

SEQ ID NO: 9025 - protein, 226 aa, Zea mays
  unsure (1)..(226): unsure at all Xaa locations
  Clone ID: TF_ZmC504615_1.pep
GYPPGRPGLKDNVTMINSETXKALLWLAKLSPKNXLEMEFVGLTRPVLDTRATTGKGAHPYYKIFQAFGLVRKIEKXQRHVSSDTLNVFVWGDHKKPSAHNLAWDYDIVITTFSRLSAEWGPQKRSPLKQIHWFRVILDEGHTLGSSLALTNKLQMAVALVASNRWILTGTPTPNTPTSQVAHLHLMLKFLHDETYGQNYQSWDSGIHRPFEAQMEEGRAHPVPLL

SEQ ID NO: 9026 - protein, 520 aa, Zea mays
  Clone ID: TF_ZmC9159_1.pep
FGTRVLLTGTPLQNNIGEMYNLLNFLQPTSFPSLSSFEEKFNDLTTAEKVEELKKLVAPHMLRRLKKDAMQNIPPKIERMVPVELTSIQAEYYRAMLTKNYQVLRNIGKGGAHQSLLNIVMQLRKVCNHPYLIPGTEPESGSPEFLHEMRIKASAKLTLLHSMLKILHKEGHRVLIFSQMTKLLDILEDYLTLEFGPKTFERVDGSVSVAERQAAIARFNQDKTRFVFLLSTRSCGLGINLATADTVIIYDSDFNPHADIQAMNRAHRIGQSNRLLVYRLVVRASVEERILQLAKKKLMLDQLFVNKSESQKEVEDIIRWGTEELFGSSDSVDGKDSSEAPGSVADVEFKHRRKTGGLGDVYEDKCIGGSTKLVWDENAILKLLDRSNLPSSVAESTDGDLDNDMLGTVKSIDWNDELNDHPGTNEDIAPIDNDGSELASESKQGATNRLEENEWDKLLRVRWEQYQIEEEASLGRGKRLRKAVSYRETFATLPNEALSEGSDEGDEPKREYTAAGLVLK

SEQ ID NO: 9027 - protein, 217 aa, Zea mays
  unsure (1)..(217): unsure at all Xaa locations
  Clone ID: TF_LIB4172-009-Q1-L1-B9.pep
MFKEMIVHRXNVLLTTYEYLMNKHDRPKLSKIQWHYIIIDEGHRIKNASCKLNADLKLYRSSHRILLTGTPLQNNLEELWALLNFLLPNIFNSSEDFSQWFNKPFESNGDNSPDEALLSEEENLLIINRLHQVLRPFVLRRLKHKVENELPEKIERLVRCEASAYQKLLMTRVEENLGGIGAVKVRFVHNSVMELXNIXHHPYLSQLHXERDEGYLP

SEQ ID NO: 9028 - protein, 193 aa, Zea mays
  Clone ID: TF_20337019.pep
TVQAMAFLSHLAEDKNIWGPFLVVAPASVVNNWAEELIRFCPDLKILPYWGPERMILRKNINPKRLYRRDASFHILITNYQILVNEEKLLRRVKWQYMVLDEAQAIKSSSSQRWKTLLSFSCRNRLLLTGTPIQNNMAELWALLHFIMPTLFDSHEQFNEWFSKGIEGHAEHGGALNEHQLSRLHAILKPFML

SEQ ID NO: 9029 - protein, 119 aa, Zea mays
  unsure (1)..(119): unsure at all Xaa locations
  Clone ID: TF_LIB4978-050-A1-K1-E11.pep
PSTQKXKQIGRRYSIRRRLLLXGTPIQNRLQELRXLLNSLLPKXXHSSHXXEERXNAPFACDASLNDERXLLIIHXSHQAXRXPXLLRRNTDDLQNYLPAKTQAILTRDPSAWQKAHYQ

SEQ ID NO: 9030 - protein, 132 aa, Zea mays
  Clone ID: TF_ZmC137038_1.pep
RTRVDEGHRLLNKDSKLFGQRKDYNTKHRVLLTGTPVQNNLDELFMLMHFLEGESFGSITDLQEEFKDINQDKQIEKLHGMLKPHLLRRFKKDVMKELPPKKELILRVELTRKQKEYYKPSHENYDVPASRD

SEQ ID NO: 9031 - protein, 656 aa, Zea mays
  unsure (1)..(656): unsure at all Xaa locations
  Clone ID: TF_ZmC38421_1.pep
HSAPRHSTLVDVPGRELSRLRPILKPFMLRRVKIDVIAEMTKKKEEIVPCKLSSRQQVFYQAIKNKISLNELLAGSRGSLNDKKLLSLMNIVMQLRKVCNHPELFERNEGSSYFNFAEIPNSLLSPPFGELQDVHYAGKRNPIIFEIPKLVYEGIISNMENSGNICGFQNGYLNRLFNIFLPSNIYRSAIPEVSSSKESLLSSGAFGFTRLSNLCPVEASFLATASLFERLVFSVMQWNRNYTAEILDEFLDSEDTGIQSSQNDSTKVRAVARLLLSSTKAKPSLLRTKIGTGPIDGPYEALVLSHRDRLASNIRLLRSAYAFIPPARAPPINVWCADRNFAYKFTDEMYDPWAKKLFLGFARTSEFNGPRQPIAPHXLIQELNTDLPIIEPMLQLPYRIFGSSPPMSNFDPAKMLTDSGKLHTLDMLLRRLRAEGHRVLLFAQMTKMLDILEDYMNFRKFKYFRLDGSSAISDRRDMVRDFQNRNDIFVFLLSTRAGGLGINLTAADTVIFYEIDWNPTQDQQAMDRTHRLGQTKEVTVYRLICKDTIEEKILQRAKQKNAVQELVMKGKHVQDDHLMRQEDVVSLLIDDTQIAHKLKEISMQAKDRQKRRRAKGIKVDKEGDLTLEDLDDATAEAVDQDKTTSKKKHRAQKDQN

SEQ ID NO: 9032 - protein, 380 aa, Zea mays
  unsure (1)..(380): unsure at all Xaa locations
  Clone ID: TF_ZmC1082_1.pep
PRVRQNDLHELWSLLEFMMPDIFATGDVDLKKLLNAEDRELISQIKSILGPFILRRLKSDVMQQLVPKIQHVKFVVMGTEQSEAYKNAINEYRAACQARSAKSSDGISNNVAGLIPKRQISNYFTQFRKIANHPLLIRCIYGDKDVDRIXRLRYPKGAFGFQCSLERAIQELKNYSDFNIHQLLLSYGDVGTKGALKDEHVFASAKCQALGELLPSLANDGHRVLIFSQWTTMLDILEWALEIIGVTYRRLDGGTAVTERQTIVDTFNNDLSIFACLLSTRAGGQGLNLVGADTVIIHDMDFNPQMDRQAEDRCHRIGQQKPVTIYRLVTKDSVDENIYEIARRKLVLDAAILHSGAELDNSTDVPEKTMGEILASLLLV

SEQ ID NO: 9033 - protein, 645 aa, Zea mays
  unsure (1)..(645): unsure at all Xaa locations
  Clone ID: TF_ZmC38173_1.pep
DAWVKGGVLLIGYSSFRNLSLGKHVKDKNSANEITYALQCGPDILVCDEAHMIKNRRADITQALKQVRTQRRIALTGSPLQNNLMEYYCMVDFVREGFLGSTHEFRNRFQNPIENGQHTNSTSDDVKIMNQRSHILFEQLKGFVQRKSMNVVKNDLPPKKVFVITVKLSQLQRKLYKRFLDVHGFSSSGYSEKSHRSFFAKYQTLSQVWNHPGLLQMAKEQRGNLRREDAVENFMMDESSSDDNVENYLPNGEKQKDKADQQSKKSNIIMNEESNWWEELLDENTYMKADYSGKMTLLLDILSKSSELGDKVLVFSQSLTTLDLVEFYLAKLQINGKEGKHWKRGKDWYRLDGSTPSSDRQNLVEMFNDLENTRVKCTLISTRAGSLGINLHAANRVVLLDGSWNPTHDLQAIYRVWRYGQTKPVYAYPLMAHQTXNQFIYKRQVTKEGLAARVVDRQQVSRTISKEEMLHLFEFGEEELMEQNENGSTMIEKPSTSNTIKTSVPVPVDSLMLSLLSEQTRWISGYHEHEALLQENEEEKLTKEEQDLALSEWESLRKAASDPERKSSMSAVPTYPNPVRPLKPASRSRQLQQPKANSNNQKKCTNLTHLLTLRSHGTKAGCTTTCNECGQEISWETLNRDGRSR

SEQ ID NO: 9034 - protein, 953 aa, Zea mays
  Clone ID: TF_ZmC262_6.pep
MSQSPGGREGIYYSRQRKPERNGSVFTPIAAMYSSGHALPVANRSHGLVFGSLSKDWDDIRQRKDQLVNFLASLERASGDSAAAGKIEDSKLASPSVEPTEQKEKAAIIVLDSDDEDGNGSGNSKLASETNKELGTSGLINNIAERMAFNGSQAFGTVHTYGDKNTQIVPYGQCSALVNQFPLQTSWQPSIQFERVVLQKRPEEQRMQDLVAASIAEKRAETQVFLSLPTEKKRRRSDPSLHASDDTATVPKQRKSKGATVVAAANLSLVSQQTATSPEPDMVIEEEEKHKNESDGLDDYWKDFALAVESTKLDEVDEAAIEKEDNGKMEDIDCNHDIRIHEDLGHVCRVCGMIVRRADSIIDYQWKKASRRRTNGYGGHSKDADEIDCGTVKLSEDFIVADIAIHPRHARIMKPHQLEGFNFLVKNLIGDKPGGCILAHAPGTGKTFMLISFIQSFMARYPSARPLVVLPKGILGIWKTEIKRWQVQDIPVYDFYSVKAEKRVEQLQILKSWEDKMSILFLGYKQFSTIVTDDGGSNVTAACRDRLLKVPNLLILDEGHTPRNRETNVLESLNRVETPRKVVLSGTLFQNHVEEVFNILNLVRPKFLRMESSRPTARRIMSQVEIVGRSSKGLADGAFTKAVEETLLNDENFKRKAHVIRGLRELTKDVLHYYKGDILDELPGLVDFSVFLKLTPKQKDIIYKLEAHDRFKRNAVGSALYIHPCLSELSEVNAEHRANTFRDDLVDSLVDSITVRDGVKANFFMNILSLANSAGEKVLAFSQYISPMIFFERLLVKKKGWHVGKEIFMISGDTSQEDRELATDHFNNSADAKIMFGSIKACGEGISLVGASRVVILDVHLNPSVTRQAIGRAFRPGQQKKVFVYRLVAADSDEVKVHETAFKKEVIPKLWFEWSEHCTTEDFKLGQIDIDDSGDELLDTKAIRKDIKALYRR

SEQ ID NO: 9035 - protein, 837 aa, Zea mays
  Clone ID: TF_ZmC2934_1.pep
VLAWHVRARQRISRQEKNRINLLKTGDQEAYMRMVEESKNERLKMLLDKTNELLEGIGKAVQRQKDAEHVSKPEGGSEVPKGSESEDCSQISGIKSESAEESTSDDDGDLPGPADESKFNAGRRLDVTVHSIEEKVTEQPSALEGGELRPYQLEGLQWMLSLFNNNLNGILADEMGLGKTIQTIALIAYLLEKKEVAGPHLIIAPKAVLPNWSNEFKTWAPSIGTILYDGRPEERRLLRDKNFDGEQFNVLLTHYDLILKDKKFLKKVHWHYLIVDEGHRLKNHECALARTLVSGYKIRRRLLLTGTPIQNSLQELWSLLNFILPNIFNSSQNFEEWFNAPFACDVSLNDEEQLLIIHRLHQVLRPFLLRRKKDEVEKYLPVKTQVILKCDMSAWQKAYYEQVTSREKVALGYGLRKKALQNLSMQLRKCCNHPYLFVEHYNMYQREEIVRASGKFELLDRLLPKLQRAGHRVLLFSQMTKLLDVLEIYLQMYNFKYMRLDGSTKTEERGRLLADFNKKDSEYFMFLLSTRAGGLGLNLQTADTVIIFDSDWNPQMDQQAEDRAHRIGQKNEVRVFVLVSVGSIEEEILDRAKQKMGIDAKVIQAGLFNTTSTAQDRRALLQEILRRGTSSLGTDIPSEREINRLAARNDEEFRLFEKMDEERRLRENYKSRLMDGNEVPNWVFANDNETLRKKTVADEFRNIIVGSKRRRKEVVYSDSFGDQWMKSDEGFEEIAKMTPRVKRTAYSPDIQVEYNERRKRPKSVENSADGASNPTRTPDKGRAGVSSYSKDETEDDGEDEVITSGLQKGNSFTWKTLGRKRSSHLSSSSDSKGRPPF

SEQ ID NO: 9036 - protein, 170 aa, Zea mays
  Clone ID: TF_19436653.pep
MDGICPEISIGSKRKKQRKPKKKNKPSNSEGGPLARVRWFRVVLDEAQTIKNYRTQVSRACCGLRAQRRWCLSGTPIQNKIDDLYSYFCFLKYEPYSKFSNFKYMIKHQITRDSVRGYKKLQAILRIILLRRTKETLIDGEPILKLPPKTIQLNKIDFTQEERAFYLTLE

SEQ ID NO: 9037 - protein, 579 aa, Zea mays
  Clone ID: TF_ZmC3777_1.pep
ELTKYDVVLTTYSIVSMEVPKQSNPDSDGEEKGKPDPYGAPVSSSGSKKRKASSSKKTKNKSVAESCLPEKPLAKVAWFRVILDEAQSIKNYRTQVARACWGLRAKRRWCLSGTPIQNAVEDLYSYFRFLRYNPYAVYKQFCTLIKIPISRNPNNGYKKLQAVLKPVMLRRTKATMLDGEPIISLPPKTVSLKTVDFTSEERGFYNTLEVESREQFKEYAAAGTVKQNYVNILLMLLRLRQACDHPHLVRGYDSCSSWMSSLEMVKKLPMERQHKLLICLQSCSAFCALCNDAPEDPVVTLCGHVFCNQCILEQLTGDDSVCPVSNCRVRLNTSSLFSRGTLECSLSKLASDFKSDDTCMEMIHAEKRPGMDSSYASSKLRAALDILLSLPKIDPTIDSKCSIGIESEKFDGKGISEQTDTKLTEKAIVFSQWTRMLDLLEVHLKASHVTYRRLDGTMSVAARDKAVNDFNMVPEVTVMIMSLKAASLGLNMVAACHVLMLDLWWNPTTEDQAVDRAHRIGQKRPVTVSRLTIKDTVEDRILALQEKKREMVASAFGEDKSGSRQTRLTVEDLNYLFMV

SEQ ID NO: 9038 - protein, 112 aa, Zea mays
  unsure (1)..(112): unsure at all Xaa locations
  Clone ID: TF_LIB3245-229-P1-N1-A10.pep
GVSEQQEGGQGLHXVFRPFLLTRLTSDVXKGLPPKTETLLKVGMPQMQKQHYRALLQKDSEVINAGGERTRLLNIAMHLLKCXNHSYLFQGAEPGPPYTTGEHLIENAGQMV

SEQ ID NO: 9039 - protein, 645 aa, Zea mays
  Clone ID: TF_ZmC10254_1.pep
DAWADAWADAWAKTLNPCWSAYNIADRRAPPVYVNLFTGQATTQFPSMTETVRGGILADAMGLGKTVMTIALILSNPRGEFSNCIKGDTRYLGDRATRGYTSTSSVRGGTLVVCPMSLLGQWKDELEAHSAQGALSVFVHYAGDKTSSLMLMAQHDVVLTTYGVLSAACKTECNSIFHRMDWYRIVLDEAHTIKSPKTKSAQAAYRLKSECRWCLTGTPLQNNLEDLYSLLCFLHVEPWCNAKWWQRLIQKPYENGDDRGLKLVRAILRPLMLRRTKETKDKIGNPILVLPPARIEVVECEQTDHERDFYEALFRRSKVQFDKFVAQGSVLNNYANILELLLRLRQCCDHPFLVISRADPKKYADLNQLAQQFLEGVQQSSSGRQNVVPSLAYVEGVVEEIRQGATMECPICLESASDDPVHEACAHRMCGECLVSSWRTPEGGPCPLCRRHISKSDLIILPAQSRFQVDAKNNWKDSCKVKTLVTMLESLQRKQEKSIVFSQFTSFFDLLEIRFTQKGIKFLRFDGKLSQKHKEKVLKEFSESQDKLVLMMSLKAGGVGLNLTAASNVFMMDPWWNPAVEEQAIMRIHRIGQKREVRVRRFIVKGTVEERMQQVQMRKQRMVSGALTDEEIRGARIEHLKMLFK

SEQ ID NO: 9040 - protein, 742 aa, Zea mays
  Clone ID: TF_ZmC13100_1.pep
DCKKMALAWMVSKENSSHCAGGILADDQGLGKTVSTIALIQKQRMEQSKFMFVDSDRLKSEALNLDEDDEGEQTVSNEPKKDQGACSLSTSAGTSAELFVNQPNNVVNKMVETKAERKKKAKVSTSSASTSRSMTRPAAGTLVVCPASVLKQWSNELTDKVSESAKLSVLVYHGGARTKDPRELAKYDVVVTTYTIVANEVPKQMADDDADQKNSEEPSASNKRKPSANMQTKAKKKKKKLKDSNFDLDSGPIARVRWFGVVLDEAQSIKNFRTVVARACCGLRAKRRWCLSGTPIQNAIDDLFSYFRFLKYDPYCTYNSFCTMIKHPIARDAINGYKKLQAVLKVVLLRRTKETVINGKPIINLPPKTINLNKVDFTQEERSFYLMLEERSRQQFKAFAAAGTLKQNYANILLMLLRLRQACDHPILVKGNQSEYGGDGSIEMAKKLPKEVVIDLLAKLEVGSTLCGLCNDTPEDAIVTICGHVFCYQCIHERITTDENMCPAPNCSRTLGLELLFSSGALKICISGKSSSAVASSSSDNESSSISQSSFVSSKIQAAIDILNSIIVMDPLTESYTMESSRSGLGPVKAIVFSQWTGMLDLLELSLNINCIQYRRLDGTMSLNLREKNVKDFNTDPEVRVMIMSLKAGNLGLNMVSACHVILLDLWWNPYAEDQAVDRAHRIGQTRPVTVSRLTVKDTVEDRILALQEEKRTMVNSAFGDDKAGGHATRLTVEDLRYLFRI

SEQ ID NO: 9041 - protein, 269 aa, Zea mays
  Clone ID: TF_ZmC31890_1.pep
LPKLWDCLTEFLRPVKTEDGIPEDDASIAQLGRSYEDKDPQSLINNIQVVRSISPHLAEPLRPQLLNLLPSILGCVRHPHVAVRLAAARCITSMAKSLTDDVMVLVIENVIPMLSDLSSVCARQGAGILLSLLVQGLAVELVPYAPFLVVPLLKCMSDPDGSVRQTVTHSFAALVPLLPLSRGASLPCGLSERLSSSAEDVQFLEQLLDNTQIDDFKLNIDLNVELRRYQQEGINWLAFLRRFKLHGILCDDMGLGKTLQASAIVASDI

SEQ ID NO: 9042 - protein, 1106 aa, Zea mays
  Clone ID: TF_ZmC14226_1.pep
MAKPVKYDDEEEISSSSAEEEDDQSAAAASGSGEEGDDDEEDAAALPTEEEEAEGEGQQEEEVDEEEIEAVTTGAGAEDGEDASAATAAEGEEESQSTEDDESVAKDKAIGAETDAVVGKREKTRLKEIQKLTQHKIREKLDTQKAAIDADMNYKGNGRLKYLLQHKEELAHFASASRTNYVYPPSWIKGKTHDSEEEEDEEYLKEEEDALAGAGGTRLVSQPSCIKGKMRDYQLAGLNWLIRLYENGINGILADEMGLGKTLQTISLLGYLHEFRGIAGPHMVVAPKSTLGNWMKEIQRFCPILRAVKFLGNPEERNHIRDNLLQPGKFDVCVTSFEMAIKEKSALRRFSWRYIIIDEAHRIKNENSLLSKTMRIYNTNYRLLITGTPLQNNLHELWALLNFLLPEIFSSAETFDEWFQISGENDQQEVVQQLHKVLRPFLLRRLKSDVEKGLPPKKETILKVGMSQMQKQYYRALLQKDLEVINAGGERKRLLNIAMQLRKCCNHPYLFQGAEPGPPYTTGEHLIENAGKMVLLDKLLPKLKERDSRVLIFSQMTRLLDILEDYLMYRGYQYCRIDGNTGGEDRDASIEAFNSPGSEKFVFLLSTRAGGLGINLATADVVVLYDSDWNPQADLQAQDRAHRIGQKKEVQVFRFCTEYTIEEKVIERAYKKLALDALVIQQGRLAEQKTVNKDDLLQMVRFGAEMVFSSKDSTITDEDIDRIIAKGEETTAELDAKMKKFTEDAIKFKMDDNAELYDFDDEKDENKVDFKKLVSDNWIEPPRRERKRNYSESDYFKQALRQGAPAKPREPRIPRMPHLHDFQFFNNQRLNELYEKEVRYLMQANQKKDTIDGEDEDQLEPLTAEEQEEKEQLLEEGFASWTRRDFNTFIRACEKYGRNDIKSISSEMEGKTEEEVQRYARVFKERYKELSDYDRIIKNIERGEARISRKDEIMKAIGKKLDRYKNPWLELKIQYGQNKGKFYNEECDRFMLCMVHKLGYGNWDELKAAFRMSPLFRFDWFVKSRTTQELARRCDTLIRLVEKENQEYDEQERQARKEKRLAKNMTPTKRAALKNSEGENTPPSSFKRRRQSLMDDYVGSGKRKRG

SEQ ID NO: 9043 - protein, 110 aa, Zea mays
  unsure (1)..(110): unsure at all Xaa locations
  Clone ID: TF_ZmC980466_1.pep
HASEEVPRSVPGLTVEVHKLDPLVQRALAAALRSKDLRGLYDRIPPHLESKLMPFQREGIRFVLQHGGRALIADEMGLGKTLQAIAVASCLRDAWPVPXISPSSLRLHWA

SEQ ID NO: 9044 - protein, 777 aa, Zea mays
  unsure (1)..(777): unsure at all Xaa locations
  Clone ID: TF_ZmC30001_1.pep
MGTLSMSDASPIPAKNWDASPVKLEAQGGDTILGMKEEERLLELVKDEQADGILDSLPIDLEAKNGDASLITEAMKKEEEQLEDTRIKVQEEEEARKREEAARLAFDPETQYNKLDELLTKTQLFSEFLLENMDRIADESVETQAEQPQVEEKKKGRGRKRKAKPQYNDKKAKTAVAAMLTRSREERLAEDSTLSEEERWEKEQANLVPLLTGGKLKSYQIKGVKWLISLWQNGLNGILADQMGLGKTIQTIGFLAHLKGKGMHGPYLIIAPLSTLSNWVNEISRFTPSLVSIIYHGGKAARAEIRRKFMPTNVGPDFPIVVTSYEMAMFDAKFLAAYKWKYVVVDEGHRLKNAKCLLLKQLKRIPMDNKLLLTGTPLQNNLAELWSLLNFILPDIFSSHQEFESWFDFSGGNEETDEKKRLHVVSKLHAILRPFLLRRMKEDVEQMLPRKKEIIIYANMTEQQKQIQHHLIEKTFDNYLHEESDIILKRPGIRARLHNLMIQLRKNCNHPDLLESPVDSTGLYPPVEKLLEQCGKFQLFDRLLNFLMAQKHKVLVFSQWTKVLDIIEYYLDSKGHAVCRIDGNVKLEERRRQIAEFNDVNSSMRIFLLSTRAGGLGINLTAADTCILYDSDWNPQMDLQAMDRCHRIGQTRPVHVYRLATSHSVEGRMIKRAFGKLKLEHVVIGKGQFEQDRAKPSALDEGELLALLKDEQTEEDRIVQTDISDEDLQRLMDRSDLMGPPPGDAQXASPLVPLKGPGWEVVVPAKSGGGMLSSLTS

SEQ ID NO: 9045 - protein, 337 aa, Zea mays
  unsure (1)..(337): unsure at all Xaa locations
  Clone ID: TF_ZmC12070_2.pep
VTLRRDSFDKSEMEFYEALYTQSVTXFDAYVDAGTLMNNYAHIFDLLTRLRQAVDHPYLVAYSKTAGHPEGMKNEGNESMESQCGICHNLAEDVVVTSCDHAFCKTCLIDYSAALGNVSCPSCSIPLTVDLTAQNSVGKVTRSVKGRKCSGILSRLPSLVDFKTSTKIDALREEIRNMIEHDGSAKGIVFSQFTSFLDLIQFSLERSGIKCVQLNGAMNITEKGRAIDTFTHDADCRVFLMSLKAGGVAKNLTVASHVFLMDPWWNPAVENQAQDRIHRIGQFKPIKSTRFVIKDTVEERILQLQQKKELVFEGTVGDSSYAMSKLTEADLKFLFQI

SEQ ID NO: 9046 - protein, 607 aa, Zea mays
  Clone ID: TF_ZmC5477_1.pep
LITTYDIVRNNYKLIRGNSYNNSNDDDDEEGTLWNYVILDEGHLIKNNKTQRAQSLYEIPCAHRIVISGTPIQNNLKEMWTLFNFCCPDVLGDKQQFKIRYETAILRGNDKNATAREKHVGSNVAKELRERIKPYFLRRLKSEVVFDTGASEEKTLAKKNELIVWLKLTPCQRKLYEAFLNSELVHLALQPKASPLAAITILKKICDHPLLLTKKGAEGVLEGMGEMLNDQDIGMVEKMAMNLADMAHDDNALEVGQDVSCKLSFIMSLLRNLVGEGHHVLIFSQTRKMLNLIQEAIILEGYAFLRIDGTTKVSDRERIVKDFQEGCGAPVFLLTTQVGGLGLTLTKATRVIVVDPAWNPSTDNQSVDRAYRIGQTKNVIVYRLMTSATIEEKIYKLQVLKGALFRTATEQKEQTRYFSKSEIQELFSLPQQGFDVSLTHKQLQEEHGQQVVLDESLRKHIQFLEQQGIAGVSHHSLLFSKTATLPTLSENDALDSKPRGMPMMPQQYYKGSSSDYVANGASFALKPKDESFTVRNYIPSNRSAESPEEIKARINRLSQTLSNAVLLSKLPDGGEKIRRQINELDEKLTSAEKGLKEGGTEVISLDD

SEQ ID NO: 9047 - protein, 558 aa, Zea mays
  Clone ID: TF_ZmC2934_3.pep
GHRLKNHECALARTLVSGYQIRRRLLLTGTPIQNSLQELWSLLNFILPNIFNSSQNFEEWFNAPFACDVSLNDEEQLLIIHRLHQVLRPFLLRRKKDEVEKYLPVKTQVILKCDMSAWQKAYYEQVTSREKVALGFGLRSKALQNLSMQLRKCCNHPYLFVEHYNMYQREEIVRASGKFELLDRLLPKLQRAGHRVLLFSQMTKLLDVLEIYLQMYNFKYMRLDGSTKTEERGRLLADFNKKDSEYFMFLLSTRAGGLGLNLQTADTVIIFDSDWNPQMDQQAEDRAHRIGQKNEVRVFVLVSVGSIEEEILDRAKQKMGIDAKVIQAGLFNTTSTAQDRRALLQEILRRGTSSLGTDIPSEREINRLAARTDEEFWLFEKMDEERRLRENYKSRLMDGNEVPDWVFANNDLPKRTVADEFQNIMVGAKRRRKEVVYSDSFGDQWMKSDEGFEDIPKATQRSKKTAYSSDIQVEFSERRKRPRSVENSADGVSNPTWTPDKGRAGVSSYSKDETEDDGEDEVITSGLQKGNSFTWNTLGRRRSSHFSSSSDSRGRPTF

SEQ ID NO: 9048 - protein, 552 aa, Zea mays
  Clone ID: TF_ZmC26704_1.pep
GLGKTLQASAIVASDIAEARARNDEKILTSLIICPSTLVAHWEYEIEKYIDSSILKPLQYVGSSQDRVTLRSQFDKVNVIITSYDIIRKDIDFLGNITWNYCVLDEGHIIKNSRSKITFAVKQLKAQHRLILSGTPIQNNVLELWSLFDFLMPGFLGTEKQFQAAYGKPLLAAKDSKCSAKDAEAGILAMEALHKQVMPFLLRRTKDEVLSDLPEKIIQDRYCDLSLLQLKLYDKFSSSNAKDEISTIVKANELEESAPQPKATRHVFQALQYLLKLCSHPLLVTGENPPNHLVDLLNEIGLGSGSELHELHHSPKLVALQEILQECGIGSEISSPDASTAVGQHRVLIFAQHKAFLDIIEKDLFQSHMRSVTYLRLDGSVDPEKRFEIVKAFNSDPTIDVLLLTTHVGGLGLNLTSADTLVFVEHDWNPMKDLQAMDRAHRLGQRKVVNVHRLIMRGTLEEKVMSLQRFKVSVANAVINAENSSLKTMNTDQLLDLFTSTPASRKASDEQSKRKSGGKGLKSILNGLDELWDQSQYADEYDLNQFLAKLNG

SEQ ID NO: 9049 - protein, 542 aa, Zea mays
  Clone ID: TF_ZmC2934_2.pep
YMIRRSLLLTGTPIQNSLQELWSLLNFILPNIFNSSQNFEEWFNAPFACDVSLNDEEQLLIIHRLHQVLRPFLLRRKKDEVEKYLPVKTQVILKCDMSAWQKAYYEQVTSREKVALGYGIRKKALQNLSMQLRKCCNHPYLFVEHYNMYQREEIVRASGKFELLDRLLPKLQRAGHRVLLFSQMTKLLDILEVYLQMYNFKYMRLDGSTKTEERGRLLADFNKKNSEYFMFLLSTRAGGLGLNLQTADTVIIFDSDWNPQMDQQAEDRAHRIGQKNEVRVFVLVSVGSIEEEILDRAKQKMGIDAKVIQAGLFNTTSTAQDRRALLQEILRRGTSSLGTDIPSEREINRLAARNDEEFRLFEKMDEERRLRENYKSRLMDGNEVPNWVFANDNETLRKKTVADEFRNIIVGSKRRRKEVVYSDSFGDQWMKSDEGFEEIAKMTPRVKRTAYSPDIQVEYNERRKRPKSVENSADGASNPTRTPDKGRAGVSSYSKDETEDDGEDEVITSGLQKGNSFTWKTLGRKRSSHLSSSSDSKGRPPF

SEQ ID NO: 9050 - protein, 825 aa, Zea mays
  Clone ID: TF_ZmC12070_1.pep
DTSDTDFVADSGDAVENDDSDEEFAPDKDTPPAPAVPEAALPPPVPIRIKNQARNRREKRRRGKKARRDAPPLPWEEWQVANDSWLDERNAADGGVEATDATVAAVPTADPAPEVVLRLLRFQKEWLAWALAQEASVTRGGILADEMGMGKTIQAISLVLTARRLRPPDHHSAASSSNSSVGRTKPQVGCTLVVCPVVAVIQWTEEIERHTASGSVRVLIYHGAKRVTQSFDFNSYDFVITTYSTIEADYRKHIMPPKTRCQYCNKLFYPNKMKVHLMYHCGPNAKRTEAQAKQQSKRKWDSSKEKVKEKRRVHKKGDEVNKDFQELADELGRQLRGQSPLHSVRWERVILDEAHFIKDRRCNTARAVFALESECKWALSGTPLQNRVGELYSLIRFLQIFPYSYYFCKDCSCEILDTSMKKQCDCGHSSVRHFCWWNKYISTPIQYGSTSFEGKRAMTLLKEKVLKGIVLRRTKKGRAADLALPPKIVTLRRDSFDKNEMEFYEALYTQSVTQFDAYVDAGTLMNNYAHIFDLLTRLRQAVDHPYLVAYSKTAGHPEGMKNEGNESMESQCGICHNLAEDVVVTSCDHAFCKTCLIDYSAALGNVSCPSCSIPLTVDLTAQNSVGKVTRSVKGRKCSGILSRLPSLVDFKTSTKIDALREEIRNMIEHDGSAKGIVFSQFTSFLDLIQFSLERSGIKCVQLNGAMNITEKGRAIDTFTHDADCRVFLMSLKAGGVALNLTVASHVFLMDPWWNPAVENQAQDRIHRIGQFKPIKSTRFVIKDTVEERILQLQQKKQLVFEGTVGDSPDAMSKLTEADLKFLFQI

SEQ ID NO: 9051 - protein, 331 aa, Zea mays
  Clone ID: TF_ZmC35142_1.pep
EQMLPRKKEKSIYANMTEVQKRIQDHLVEKTFDVYLNDESDIVLRRPGIKTKLNSLFIQLRKNCAHPDLLEAAFGTTSLYPPVNKLLEQCGKFQLLDRLLTSLLARKHKVLIFSQWTKVLDILEYYLDSKGLGVCRIDGSVNLEERRRQIAEFNDLNSSLNVFILSTRAGGLGINLTSADTCILYDSDWNPQMDQQAMDRCHRIGQTRPVHVYRLATSYSVEERIIKKAFGKLKLEHVVIGKGQFEQERAKPNALEEGELLALLRDEQDEEDRMIQTDISDEDLLKLMDRSDLSGPPGAADAAPLIPLKGPGWEVVVPTKSGGGMLSSLTS

SEQ ID NO: 9052 - protein, 554 aa, Zea mays
  Clone ID: TF_ZmC3853_1.pep
NYSFSKHKKPKAPLIGGSNLIICPMTLISQWKAEIEAHTKPGTANIYVHYGQNRPKDASIIGQSDIVLTTYGVVSSEFSIDGSTENGALYSVHWFRVVLDEAHMIKSSKSLISLAAAALTADRRWCLTGTPIQNNLEDLYSLFRFLKVEPWRNWALWNKLVQKPYEEGDERGLKLLQSILKPIMLRRTKNCTDKEGRPILNLPPANIEVKYCVLSEAEKDFYEALFRRSKVKFDQFVEQGRVLHNYASILELLLRLRQCCDHPFLVMSRGDTKEYADLNKLAKRFLRGGNGAVNGDSCIPSRAYIEQVVQELQKDEGECPICLEAFEDAVLTPCAHRLCRECLLSSWRSATAGLCPVCRMSMSKQDLITAPTDNRFQIDVEKNWVESSKISALLQELEALRSSGAKSIVFSQWTAFLDLLQIPLSRNNFSFARLDGTLNLQQREKVIKEFSEDKGILVLLMSLKAGGVGINLTAASNAFVMDPWWNPAVEEQAVMRIHRIGQTKTVSIRRFIVKGTVEERMEAVQARKQRMISGALTDQEVRTARIEELKMLFS

SEQ ID NO: 9053 - protein, 157 aa, Zea mays
  Clone ID: TF_cC-zmpo148030a10a1.pep
MFLLQNNLHELWAFLNFLLPEVFSSAETFDEWFQISGENDQQEVVQQLHKVLRPFLLRRLKSDVEKGLPPKKETILKVGMSQMQKQYYKALLQKDLEVVNGGGERKRLLNIAMQLRKCCNHPYLFQGAEPGPPYTTGDHKVTNAGKIYITSRSFRKV

SEQ ID NO: 9054 - protein, 108 aa, Zea mays
  Clone ID: TF_LIB3159-002-Q1-K1-E3.pep
LGKTLQAIAIACCFKDEGSILIVCPAVLRYSWAEELERWHPSFMPKDIHIVFGRQDSLEHLNATPRAVIISYQMLSRLRESMVNRTWALMIVDESHNIRCTKKLEEKI

SEQ ID NO: 9055 - protein, 324 aa, Zea mays
  Clone ID: TF_ZmC41243_1.pep
NSARGVDEAHRLKNCEASLYTTLLEFSTKNKLLITGTPLQNSVEELWALLHFLDPVKFNSKDSFVERYKNLSSFNETELANLHKELRPHILRRVIKDVEKSLPPKIERILRVEMSPLQKQYYKWILERNFQNLNKGVRGNQVSLLNIVVELKKCCNHPFLFESADHGYGGDSIGDRNKVERIVMSSGKLVLLDKLLVRLRETNHRVLIFSQMVKMLDILAEYLSLRGFQFQRLDGSTRADLRHQAMEHFNAPGSDDFCFLLSTRAGGLGINLATADTVIIFDSDWNPQNDLQAMSRAHRIGQQETVNIYRFVTCKSVEEDIWNA

SEQ ID NO: 9056 - protein, 521 aa, Zea mays
  Clone ID: TF_ZmC506_1.pep
PTRPSWVTQLEEHLKAGSLKVYMYHGERTRDKKELLKYDLVLTTYSILGTEFEQEDSPVKDIEWFRVILDEAHVIKNSAARQTKAVIALNAERRWVVTGTPIQNSSFDLYPLMAFLRFQPFSIKSYWQSLIQRPLEKGSKAGLSRLQNLLGAISLRRIKEMDDGNKSMVELPSKTVLACYIDLSAEEREYYDQMEQEGRNKMQEFGDRDSILSNYSTVLYFILRLRQLCDDVALCPLDMKAWFPASSIEDVSKHPELLKKLALLVDDGDDFDCPICLSPPTKTVITSCTHIYCQTCILKILKSSSSRCPICRRTLSKEDLFLAPEVKHPDEDGSGNLESDRPLSSKVQALLKLLTASQNEDPSSKSVVFSQFRKMLILLEAPLRRAGFKTLRLDGSMSAKKRLQVIQEFSHGGSDSPTVLLASLKAAGAGVNLTAASTVYLFDPWWNPGVEEQAMDRVHRIGQKKEVKVIRLIVKGSIEERILALQERKKRLISGAFGKKGGKNEKEMRVEELRMMLGLGK

SEQ ID NO: 9057 - protein, 123 aa, Zea mays
  unsure (1)..(123): unsure at all Xaa locations
  Clone ID: TF_LIB3079-023-Q1-K1-H5.pep
THREATFYKRRDCLFKKGGELSGLCDVNLLLVLSSTCGKLYHYLSATVPYVEDLVERYEGTTHTKGCTDIRQERRAQLAKAELTCELMEKELRVMTGDDGXQYTVPTVELLEHKLDAAVHKVR

SEQ ID NO: 9058 - protein, 120 aa, Zea mays
  Clone ID: TF_LIB3206-120-P1-K1-F1.pep
AGRAQRRAFASPGRLHGEGPHRDKAGREPDAAGVHLLQAQGRALQEGGEQYTVPSLELLEHSLEAAVHRVRSEKDRKIGGEIDCLQNIIRGRHEERYGLCDKVSTRFCELQTLRTPRDCT

SEQ ID NO: 9059 - protein, 94 aa, Zea mays
  Clone ID: TF_uC-zmflb73275a12b1.pep
SQVFSSCLVRVQSWYSSQRLQQTLCAARSSQSRQCSCSFFSRSLGRLGSVVLRLLLFSIRCSSVVPPVVSLSFSIQRRLQIPSSRTLTIRVAPS

SEQ ID NO: 9060 - protein, 55 aa, Zea mays
  Clone ID: TF_LIB3245-361-P1-N1-B8.pep
RLTLAALRICLGVDNSVWGARRTKIKIIENSTNPQVTFSKLHTGLVNKARKISFL

SEQ ID NO: 9061 - protein, 58 aa, Zea mays
  Clone ID: TF_LIB3279-011-P1-K1-D3.pep
EKGHLAVGEVLDPLDIDLPGSHLCAHYKQPATSQGRLPSSNLLEQEPGDARLVVVKVW

SEQ ID NO: 9062 - protein, 80 aa, Zea mays
  unsure (1)..(80): unsure at all Xaa locations
  Clone ID: TF_LIB4764-056-R1-K1-E5.pep
MGRARMEIKWIXNPTKWQATFYKSRXGLFMKDSDFSVLWDVDLVLFLFSTSGKIYHYLSTTVPSDLDLINRNHVTTPTKG

SEQ ID NO: 9063 - protein, 108 aa, Zea mays
  unsure (1)..(108): unsure at all Xaa locations
  Clone ID: TF_LIB189-006-Q1-E1-G12.pep
AATMQVTFTIRRCGIFMKVXELSVLCYTDVALILVSSTGNRSXLSNCNMDEIIDNYFTHCXFSCGTTEQTSLDFNLXHSIYVNLNDQLAVPSLRLMQIKGVELDGFNV

SEQ ID NO: 9064 - protein, 124 aa, Zea mays
  unsure (1)..(124): unsure at all Xaa locations
  Clone ID: TF_LIB4862-001-Q1-K1-E1.pep
ASERGTAAAAQAEGAGAGKAPNKGRGRXEXKRXENKXNRQXTGAKRRNGPHKKAXEXXGXXDAEGAPXXXXNRGKXNEXXSTQSXPKTXEKDQKXXXAGPETAXQNREXEQXKSSRKEDXKXKA

SEQ ID NO: 9065 - protein, 135 aa, Zea mays
  unsure (1)..(135): unsure at all Xaa locations
  Clone ID: TF_LIB4756-102-R1-K1-E10.pep
MSRKTLKTTRRETATAAWSPFSNVLRLLLLKDQEISVLCVDDVWLIVFSSCTNLSQXSRSLTNDVIDEDHTHSRNLGKTQHXLPLELHLEHSQYACVNVPVAEACLLLCXMTREXLEGLNVQELHRLETNLASGL

SEQ ID NO: 9066 - protein, 170 aa, Zea mays
  Clone ID: TF_LIB4764-131-Q1-K1-B12.pep
PRGRPGWYFPLCLQAPETDKEGTSLRSPAWRGERLKSRGSRKHDPPGHLLQTPKRAPLEGLRALRPMIRQGGDRHLLPMCFTSTSTPATECQGTSGEELEGSRRMFLPLNHRSVEYSGHDLLADESRTSVHPHSDVVQRYSGLVCSTLCRNIVAQRMCPDVRAACDRGGL

SEQ ID NO: 9067 - protein, 107 aa, Zea mays
  Clone ID: TF_ZmC733474_1.pep
LEKMMRATSASQSTDSSYAFLSSPFRRLANVTCRLILFSIRFSSTLPRPILLVLLPFSSIPSFSFPATSAPPPGLFTASSLLELDQDLSPPFSLSLSSPSTRLRAKE

SEQ ID NO: 9068 - protein, 145 aa, Zea mays
  Clone ID: TF_ZmC32383_1.pep
MAARIGADGKAMARRGRVELRRIEDRVSRQVRFSKRRSGLFKKAFELSLLCDAEVALIVFSPAGKLYPRGAAADRGPGEPAGALLQAPLGALQEGLRALPALRRRGRPHRLLPRRQALRVRLHQAKGVVRHLSIQTQEFVAITGL

SEQ ID NO: 9069 - protein, 71 aa, Zea mays
  unsure (1)..(71): unsure at all Xaa locations
  Clone ID: TF_jC-zmX700335674a1.pep
MVQGMEQLQLHVNQVHRLATLXKHQAGHVKKALELSVLCDAIVXIIVFYGHGMIYDLATTVTIEELIEMYK

SEQ ID NO: 9070 - protein, 70 aa, Zea mays
  Clone ID: TF_LIB4766-025-R1-K1-H7.pep
MGRGKIEIKRIENSTNRQVTFSKRRGGLLKKANELAVLCDARVGVVIFSSTGKMFEYCSPACRLVTLARR

SEQ ID NO: 9071 - protein, 248 aa, Zea mays
  Clone ID: TF_ZmC21289_1.pep
MAPPRRPSMGRQKIEIRRIESDEARQVCFSKRRAGLFKKASELSILCGADVAAVVFSPAGKAFSFGHPSVESVVERFLASSSPSPAGAGAGHSASGGEDRAVSELNRQHGELRAQLDAVKARQERADEAIRKEREAGSPAMAWIDAELSGGAMGHDDLVAFWAALAGVQAAVAASADRLLRDALLVGRRGRQQQQPAQLAGGGGVAFDVGAFGGVGVQVQPPPGFAGVVDLQGFGGQAAAILGAGGPS

SEQ ID NO: 9072 - protein, 212 aa, Zea mays
  Clone ID: TF_ZmC786_156.pep
RSYRTSASSPTRSIAPSSPIFRNWNFLQSLRWFCSLAFNSFLLFLQTDLSCGPSSKAKGGQPAATSSGGDRQGRGKIEIKHIENTTNRQVTFCKRRNSLLKKAYELSVLCDAEVALVVFSSRGRLYDLAGYTEDAFGLLVLLLVREKEPVVPPLSSSLRTSRSVASAAPAQSLADFCKDSSSSAAHGSTCPVPTITLDLKKSLKILQVLCYS

SEQ ID NO: 9073 - protein, 90 aa, Zea mays
  unsure (1)..(90): unsure at all Xaa locations
  Clone ID: TF_LIB3245-589-P1-K1-B2.pep
MARERREIKRIESAASLQVPFSTRRRFFFTYAAELSLLCNTSFTLIGLSYTGXLSYSARSIMYNITLKPDLHSKNPPMDKHPSLDLNLDH

SEQ ID NO: 9074 - protein, 46 aa, Zea mays
  Clone ID: TF_LIB3116-001-Q1-K1-G1.pep
FSILFISIFPLPILHFYSNPSRYINNYLYINYKYTKNLSIYTLLNT

SEQ ID NO: 9075 - protein, 59 aa, Zea mays
  Clone ID: TF_uC-zmflmo17001d12b1.pep
SGTISPFCTPCTKRRNVLLKKACELFVLCDAQALLIVYSNRGKLYEFCHGPILTRTLVR

SEQ ID NO: 9076 - protein, 288 aa, Zea mays
  unsure (1)..(288): unsure at all Xaa locations
  Clone ID: TF_ZmC1408_5.pep
ELVEAAGVGEEDERDLGVAEDGELVRLLEQAVPTLGEGHLPADLVLDPLQHHLPAPHGALPDLSAFLPLRIDDPSAILLLSLSPPAGAISDLFKRRICPVRTAIIDEGGPCPSPSSADTHTHTGARARCRVARARCSRSGFFWRCHSIGSTPSEREGPWACGGAGLYDCCWLRERKREREREEKREREEGRSETSTDERATPAGKNLFVRGVQIGSRSGLLKKAVPALGEGDLAADLVLDPLQHHLPAPHGRRDLRAFRSPDRRRSVALSRHQQTIWICLQLLTMEVX

SEQ ID NO: 9077 - protein, 227 aa, Zea mays
  Clone ID: TF_ZmC1460_1.pep
MARCKVRVRRVQSPVHRQVTSAARRCGLLPKARELSVLCDASVGIIVFSAHGKLYNLATTGTMEELIERYKAASAGEATTDGCGRHNRMDPKHETTVLQQEINLLQKGLRYHYGSWTNVHMNDDVMNAHELYLLIGLYNSRSAKMQITAQEYQQPKRKEGMLKAANEILQEKIVEQSSLLDVGMVVADQQNGRFSTVPLVEEVISSNPLTILSGYSSCRGSEMGYSF

SEQ ID NO: 9078 - protein, 187 aa, Zea mays
  Clone ID: TF_ZmC497_1.pep
MDAEAARRKQVAPPQEKRKRGRLELRRIQDRTSRQVRFSKRRSGLFKKAHELSVLCDAEVAMVVFSPAGRLYHYASLGTSIEKTFCRYWDLANTDIDLNIEARDSRDNYNTQFPENGQPAEGSLSDLLIMMDQWSMEENLNGLSMAGIAGLEEALTVALAVIRNKLAMKVTGCGGPKPEAHTLFQRR

SEQ ID NO: 9079 - protein, 118 aa, Zea mays
  Clone ID: TF_ZmC497_2.pep
MDAEAARRKQVAPPQEKRKRGRLELRRIQDRTSRQVRFSKRRSGLFKKAHELSVLCDAEVAMVVFSPAGRLYHYASLGTSIEKTFCRYWDLANTDIDLNIEARDSRDNYNTQVKHINS

SEQ ID NO: 9080 - protein, 142 aa, Zea mays
  Clone ID: TF_ZmC497_3.pep
TSIASLFSLFSLLTGFVPILLWLRPACRPLPHSSGVSDYAIGRARREALPLLVGGAVSRPGKKDAEAARRKQVAPPQEKRKRGRLELRRIQDRTSRQVRFSKRRSGLFKKAHELSVLCDAEVAMVVFSPAGRLYHYASLGTR

SEQ ID NO: 9081 - protein, 189 aa, Zea mays
  Clone ID: TF_ZmC3515_2.pep
MGKPSRGRQRIEIRRIEEGGRLQVTFSKRKSGLQKKAAELSMLCGSPVAVVIFSPGRKVFALGTPSVDHVLRRHAPPIPGEGEEDGLLPVLQDGNVVMSSSAIADRAEVENIVRRTEETKARSVAEKARMDAVGKAVWQAAAKAGRRFWCEADSGELGDAELAGFAKALHRFRVNLQRHLDSLSASANK

SEQ ID NO: 9082 - protein, 111 aa, Zea mays
  Clone ID: TF_LIB3076-018-Q1-K1-A4.pep
KRTSRGRQKVEIRRIDNKESRQVTQCKRKGGLLKKASELHLLCGAQVAIIVFKRRDPERKEVPVPPRGQRDDGGLAFAMGTLSVDHVLHRCGLLHADEGLTAIQDVGAIVA

SEQ ID NO: 9083 - protein, 56 aa, Zea mays
  Clone ID: TF_ZmC3479_1.pep
ELSILCDAEVGLIIFSSTGRLYDFSNTNMKAVIDRYGKAKDEQLGKNDATSELMVR

SEQ ID NO: 9084 - protein, 67 aa, Zea mays
  Clone ID: TF_ZmC1211241_1.pep
MGRGKIVIRRIDNSTSRQVTFSKRRSGLLKKAKELSILCDAEVGLIIFSSTGRLYDFSNTKYDSSTS

SEQ ID NO: 9085 - protein, 171 aa, Zea mays
  Clone ID: TF_ZmC1089_5.pep
MRKKKKKKKKKKKKKKTHLLSPACARLSSFLPRPLAFAWLHRAGRAGEEKLASSYQLSAGGGSLPAAGVSCKGWELAMGRGRVELKRIENKINRQVTFAKRRNGLLKKAYELSVLCDAEVALIIFSNRGKLYEFCSGQSITKTLERYEKNSYGGPDTAVQNKENCAAVIAV

SEQ ID NO: 9086 - protein, 207 aa, Zea mays
  Clone ID: TF_ZmC3819_1.pep
MGRGRSEIKRIENPTQRQSTFYKRRDGLFKKARELAVLCDVDLLLLLFSGSGKLYHYLSPTVPTVKDLVERYEAATHSKVWADVRQERRAELEKAERMCELMEKELRFMTVDDGEQYTVPSLEQLEHSLEAAVHRVRSEKDRKIGGEIDCLQNIIRGRHEERYGLCDKNFLQIWPQLAHSQAWNNGGEGGGSTPPSGGGLELKLGFN

SEQ ID NO: 9087 - protein, 58 aa, Zea mays
  unsure (1)..(58): unsure at all Xaa locations
  Clone ID: TF_LIB4073-012-Q6-K1-E4.pep
MGRGKIEXKRIENSXTNREVTFSKRRAGLVKKARVIXVLCDGGVXXVILFSGGWLHDY

SEQ ID NO: 9088 - protein, 191 aa, Zea mays
  Clone ID: TF_ZmC3515_1.pep
MGRPSRGRQRIEIRRIEEGGRLQVTFSKRKSGLQKKAAELSLLCGSPVAVIVFSPGRKVFALGSPSVDHVLRRHAPPIPSEGEEDGLLPALQDGDVMSSSAIADRAEVENIVRRTEETKARSVAEKARMDAVGKAVRQAAAKAGRRFWWEADSGVLGDAELPGFAKALRRLRVNLQRHLDSLSASANKQLQ

SEQ ID NO: 9089 - protein, 127 aa, Zea mays
  Clone ID: TF_LIB5116-070-A1-PF1-G2.pep
MGRGRTEMKKIQNDVSRRATFGKRRRGLLKKAHELAVLCGVDLGLLVFDDDGAGKLFDYCAPNTSWSELIERYESITKHQFQFQGQGIHHDDHQQQPSADIIAGLRREGDHLEASVTRQTGENLSST

SEQ ID NO: 9090 - protein, 137 aa, Zea mays
  unsure (1)..(137): unsure at all Xaa locations
  Clone ID: TF_LIB4740-041-R1-K1-E12.pep
MDAEAARRKQVAPPQEKRKRGRLELRRIQDRTSRQVRFSKRRSGLFKKAHELSVLCSXEVAXVVFSPAGRLYHYASLGTSIEKTILSLLGPCQHRLISISRRETRGTTIDTVSYEQGAPTLLAHKIRSHNYNTQVKH

SEQ ID NO: 9091 - protein, 173 aa, Zea mays
  Clone ID: TF_ZmC672_2.pep
GLFFFTLAGGSPHPFTPSMTKRQASPSPPPPVHLLVLLRSRTQLAYPPRHYKNPPPPHRASTVPHTRARAGKHQKGKAEAARRAPAAAKSPLVVVVASSPPPACLLYFAIFASVSWIGDASVSGSREGIGHDDGAGEDGAEADRERDEPAGDLLEAPQRAAQEGLRALRALRC

SEQ ID NO: 9092 - protein, 154 aa, Zea mays
  Clone ID: TF_ZmC672_4.pep
LVHHRLLASFTLPYLLAFPGLGTLPFREAVKGSATTMVRGKTELKRIENATSRQVTFSKRRNGLLKKAFELSVLCDAEVGLVVFSPRGKLYEFASAASLQKTIDRYRTYTRDNAIVHNSFLVFHIVIFFYFFIHIELSCHFLFLVSYNQGRGIN

SEQ ID NO: 9093 - protein, 246 aa, Zea mays
  Clone ID: TF_ZmC1460_6.pep
MDLGIDDRPSMARGKVQLRRIENPVHRQVTFCKRRAGLLKKARELSVLCDAHVGIIVFSAHGKLYDLATSGTMEELIERYRTASSIEAADGCGDNNRMDAKQETMVLQQEINLLHEGLRYIYMNRTNEHMNVEALNALCKDADNGSRHVKTPVHINSTKTRGFQHPFTSLKVSACTQEGMLKAANEILQEKIVEQSSLLDVGMVVADQQNGRFSTVPLVEEVISSNPLTVLSGYSSCRGSEMGYSF

SEQ ID NO: 9094 - protein, 129 aa, Zea mays
  Clone ID: TF_LIB3077-002-Q1-K1-D11.pep
MRFCYVGLLTKVCFPLKVKRQNIHISFFQLILIENNIIIQVTFSNTRSFLLNKSNDISDLCDAHVALIVFSNKGKLYEFSSDPIMDRILERYQRQIYAPTGSESHANLSLESSKLMSTIEVFQKNFKNF

SEQ ID NO: 9095 - protein, 124 aa, Zea mays
  Clone ID: TF_LIB4744-023-R1-K1-A12.pep
MGRGKIEIKRIENSTNRQVTFSKRRGGLLKKANELAVLCYARVGVVIFSSTGKMFEYSTPACSLRELIEQYQHATNSHFEEINHDQQILLEMTRMIFLRLKKKKKKKKKKKKKKKKGKKKKKKR

SEQ ID NO: 9096 - protein, 111 aa, Zea mays
  Clone ID: TF_LIB4762-104-Q1-K1-C2.pep
MAPRGRVELRRIEDKASRQVRFSKRRAGLFKKAFELALLCDAEVALLVFSPGGKLYEYSSSRCWQKKTMVVPVQVQAARCCFTRQSVQPTNETGRASVANGAVPVPHTIVV

SEQ ID NO: 9097 - protein, 166 aa, Zea mays
  Clone ID: TF_ZmC7457_1.pep
MAPRGRVELRRIEDKASRQVRFSKRRAGLFKKAFELALLCDAEVALLVFSPGGKLYEYSSSSIEDTYDRYHQFAGAGRKVNGHNNDNRDVAASDLQSRLKEIATWSKQNNAEESDANELEKLEELLTNALRNTKAKKMLAKENNGGAGASTSSQMLLYSAERATDK

SEQ ID NO: 9098 - protein, 91 aa, Zea mays
  Clone ID: TF_LIB4827-070-R1-N1-A7.pep
MGRGKIVIRRIDNSTSRQVTFSKRRNGIFKKAKELAILCDAEVGLVIFSSTGRLYEYSSTSMKSVIDRYGKAKEEQQVVANPNSELKVCSR

SEQ ID NO: 9099 - protein, 70 aa, Zea mays
  unsure (1)..(70): unsure at all Xaa locations
  Clone ID: TF_LIB3136-040-P1-K1-B6-R2A.pep
TRYIRGIESAAAYWVTFSKRLRVLCKKAXDLAVLCDADVSLVEFSDTGKLXAIREPPVLNDIVDRYRPHF

SEQ ID NO: 9100 - protein, 86 aa, Zea mays
  Clone ID: TF_ZmC1145_12.pep
MGRGKVQLKRIENKINRQVTFSKRRSGLLKKAHEISVLCDAEVALIIFSTKGKLYEYSTDSWYALGPLRCLRFDTARCVLPHFQAV

SEQ ID NO: 9101 - protein, 122 aa, Zea mays
  unsure (1)..(122): unsure at all Xaa locations
  Clone ID: TF_ZmC1145_16.pep
MGRGKVQLKRIENKINRQVTFSKRRSGLLKKAHEISVLCDAEVALIIFSTKGKLYEYSTDSXTSIYVGNFHIPELIERARYNIMQSESMDKILERYERYSYAEKVLISAEYETQEKRFGSEV

SEQ ID NO: 9102 - protein, 208 aa, Zea mays
  unsure (1)..(208): unsure at all Xaa locations
  Clone ID: TF_ZmC3065_1.pep
MGRVKLQIKRIENNTNRQVTFSKRRNGLIKKAYELSVLCDIDIALIMFSPSNRLSHFSGRRRIEDVITRYINLPEHDRGGVVRNREYLMKMLGKLKCEGNIAEQLTPNKEPINSNVEELQQEIKTYQHQMEVLKEQLRSDNIDXMNDFETCEKFLMDTLTCVEERKKYLLCNHVAPFDPSASNMQQHVDVRRCLVSLIIMVGTHNYFR

SEQ ID NO: 9103 - protein, 74 aa, Zea mays
  unsure (1)..(74): unsure at all Xaa locations
  Clone ID: TF_LIB3068-061-Q1-K1-E2.pep
MWRDPLELKQIENKINRQSTLVKRLNGLLKNAYEHFELCNTXVSLNILFNRRKLYKFCIRQNITKTLDRTKKTL

SEQ ID NO: 9104 - protein, 160 aa, Zea mays
  Clone ID: TF_LIB4666-029-R1-K1-C10.pep
RGKSGLQKKASELFLLCGSPVAIVIFSPGKKVFALGTPSVDHVLRRYAPIPGEEEEDGLLPVLQDTDDVSAITDRVEVEGIVRRTEETKARSVMEKARMDAIGKTVRQTAAKAGRKFWWEADSGKLGEAELPEFAKVLRRLRVNLQRHLDSLSASTRQLQ

SEQ ID NO: 9105 - protein, 56 aa, Zea mays
  Clone ID: TF_LIB3245-215-P1-N1-E10.pep
MACGKEQLRRVENPVHWQVTFCMRRAGLLKKALELSVLCDASVGIIVFSAHGMLFY

SEQ ID NO: 9106 - protein, 92 aa, Zea mays
  Clone ID: TF_LIB4185-025-R1-L1-C4.pep
MAARIGADGKAMARRGRVELRRIEDRVSRQVRFSKRRSGLFKKAFELSLLCDAEVALIVFSPAGKLYEYASTRLGGFRSHSDLRPSLHHHLV

SEQ ID NO: 9107 - protein, 155 aa, Zea mays
  Clone ID: TF_ZmC32383_4.pep
MAARIGADGKAMARRGRVELRRIEDRVSRQVRFSKRRSGLFKKAFELSLLCDAEVALIVFSPAGKLYEYASTSIEDTYNRYQQFSGEGRNINDDRNRNDNKDEASSDLQLMLSKIATWSPQSNADESDVDELEKLENLLRNALKDTRSTKIQMLA

SEQ ID NO: 9108 - protein, 167 aa, Zea mays
  Clone ID: TF_793905.pep
ASSPTRSIAPSSPIFRNWNFLQSLRWFCSLAFNSFLLFLQTDLSCGPSSKAKGGQPAATSSGGDRQGRGKIEIKHIENTTNRQVTFCKRRNSLLKKAYELSVLCDAEVALVVFSSRGRLYEYANVYLVPRSYTLRASAVCVVQIRSKFAPIFLEAKPRGWRVNWGAS

SEQ ID NO: 9109 - protein, 173 aa, Zea mays
  Clone ID: TF_ZmC786_177.pep
RSYRTSASSPTRSIAPSSPIFRNWNFLQSLRWFCSLAFNSFLLFLQTDLSCGPSSKAKGGQPAATSSGGDRQGRGKIEIKHIENTTNRQVTFCKRRNSLLKKAYELSVLCDAEVALVVFSSRGRLYEYANVYLVPRSYTLRASAVCVVQIRSKFAPIFLEAKPRGWRVNWGAS

SEQ ID NO: 9110 - protein, 63 aa, Zea mays
  Clone ID: TF_ZmC119_1122.pep
YCSVLFLCIFATEMLRSFVCSASKMFGVVTDIMSTINLDGKLDLKAIALQACNAEYDPKEKME

SEQ ID NO: 9111 - protein, 116 aa, Zea mays
  unsure (1)..(116): unsure at all Xaa locations
  Clone ID: TF_LIB4758-033-R1-K1-D3.pep
GTSRPAGIPSVRRHHIAAHELHVRSKRELYTQPPNSKIAAGATLNPVRSQESEDHPGAWNLESQYEAKLLPGLIYRMKQPKIVLLIFVSGKIVLTRAKVRDETXAFEIIYPVLVKS

SEQ ID NO: 9112 - protein, 200 aa, Zea mays
  Clone ID: TF_ZmC21769_1.pep
MAEPGLEGSQPVDLSKHPSGIVPTLQNIVSTVNLDCKLDLKAIALQARNAEYNPKRFAAVIMRIREPKTTALIFASGKMVCTGAKSEQQSKLAARKYARIIQKLGFPAKFKDFKIQNIVGSCDVKFPIRLEGLAYSHGAFSSYEPELFPGLIYRMKQPKIVLLIFVSGKIVLTGAKVREETYTAFENIYPVLSEFRKIQQ

SEQ ID NO: 9113 - protein, 200 aa, Zea mays
  Clone ID: TF_ZmC21769_2.pep
MAEPGLEDSQPVDLSKHPSGIVPTLQNIVSTVNLDCKLDLKAIALQARNAEYNPKRFAAVIMRIREPKTTALIFASGKMVCTGAKSEQQSKLAARKYARIIQKLGFPAKFKDFKIQNIVGSCDVKFPIRLEGLAYSHGAFSSYEPELFPGLIYRMKQPKIVLLIFVSGKIVLTGAKVREETYTAFENIYPVLAEFRKVQQ

SEQ ID NO: 9114 - protein, 148 aa, Zea mays
  unsure (1)..(148): unsure at all Xaa locations
  Clone ID: TF_LIB4727-003-R1-K1-F7.pep
VFSLLLYFYLDPFICKQRFAAVIMRIREPKTTALIFASGKMVCTGAKSEQQSKLAARKYARIIQKLGFPAKFKGFKIQNIVGSCDVKFPIRLEGLAYSHGAFSSYEPELFPGLIYRMKQPKIGLLIFGSGKIVLTGAXVREETYTGFE

SEQ ID NO: 9115 - protein, 114 aa, Zea mays
  Clone ID: TF_ZmC418581_1.pep
LFHCLHAVCSHHQKLGFPAKFKDFKIQNINIVRSCDVKSPIRLEGLAYSHGAFSSYETELFSGLIYRMKRQKIMLLIFVSGKIVLTRAKVRDETYTAFENIYPVLTKFRKVRQC

SEQ ID NO: 9116 - protein, 73 aa, Zea mays
  Clone ID: TF_LIB4719-004-R1-K1-B12.pep
MAAARGVQVTRELGHRTDGETMEGVMRKVEPNITAASPEPADRPRTDARGAPAATASRSVRVALRRRWTTPHT

SEQ ID NO: 9117 - protein, 205 aa, Zea mays
  Clone ID: TF_LIB4969-021-Q1-XP1-A8.pep
MTTRPDGSAATPADKQLVAASNGNGNPLAVRKAPSKDRHSKVDGRGRRIRMPIICAARVFQLTRELGHKSDGQTIEWLLRQAEPSIIAATGTGTTPASFSTSSPSSLRSSSSSTAGVHPHAAPAQGFWALPARADFGQLWSFAAAPEMMVAAAAAAAPGMAGEASAARVGNYLPVAQGNLNLLASFSGGPAPTAAAGRAEEETAR

SEQ ID NO: 9118 - protein, 116 aa, Zea mays
  unsure (1)..(116): unsure at all Xaa locations
  Clone ID: TF_LIB4171-030-R1-L1-H3.pep
MEAAAVGDGAPAGRSHQGAKRARGGAVKGSETEVAAWGQPPPLPPPPGPGAGSRISRVGASGGKDRHSKVYTTKGIRDGRVRLSAPTAIQFYDLXDRLGFDQPSKAIEWVINAGAF

SEQ ID NO: 9119 - protein, 104 aa, Zea mays
  Clone ID: TF_LIB4827-005-R1-N1-C8.pep
GRVRIPAMVAARVFQLTRELGHRTDGETIEWLLRQAEPSIIAATGTGVTTEEAPPSLVPVAPIASSVSLTPVPYYTALLMQPPPTANESPVASASVSGTVADNN

SEQ ID NO: 9120 - protein, 80 aa, Zea mays
  unsure (1)..(80): unsure at all Xaa locations
  Clone ID: TF_LIB4699-001-R1-K1-A9.pep
MWWGRSGDWMQQALAPKRSYNKDRHTKDDGRGRRIRMPALCAERILQLTRELGHKSDGETVQWLLQQAEPAIVAXTGTGT

SEQ ID NO: 9121 - protein, 298 aa, Zea mays
  Clone ID: TF_ZmC819_1.pep
MISGNLNNEELGGGGCTKAEGPGAAGGAGAVVAKSPVLSSSRHWPPSTESRIVRVSRVFGGKDRHSKVRTVKGLRDRRVRLSVPTAIQLYDLQDRLGLSQPSKVVDWLLDAAQDEIDKLPPLQFPPQGQDLVAHLPPSMVAPFANVAADRAAAAAAAANASAAMAEGGKRHCHGGIKGLMGMGLNNSIGLANATMPLAHGLYYTPGESWTNGGNAAVHDHQVSHGGTSPQTVAHHSPFSSLLSLAAPGPQLVFYSPEGGGFAMKEATDHQFAVDSLDHSQGQLSLSSARSFLHPGNQG

SEQ ID NO: 9122 - protein, 217 aa, Zea mays
  unsure (1)..(217): unsure at all Xaa locations
  Clone ID: TF_LIB5117-027-A1-PF1-F8.pep
MEEADKDRNSCKRLRAVGGGGDSADAWRTFRVARAAAGGKDRHSKVVTSRGLRDRRIRLSVQTAIQFYDIQDRLGVDQPSKAIEWLIQAAATAIDGLPSLDCSFALPVASPAAEDAAEVSTSETSKGSVLSLANGPADNDNATHQANAYNGGSANGTFAELLHCSNAADKPMQHQHQQPTLAYYARSXSHIAPMSFEMIPRSPSPRTTKRHTHTTCL

SEQ ID NO: 9123 - protein, 402 aa, Zea mays
  Clone ID: TF_ZmC1215_2.pep
MDVTGDAGGGRRPNFPLQLLEKKEEQPCSTSPAVAVGAGANGSGEMQMKKVAAPKRTSSKDRHTKVDGRGRRIRMPAICAARVFQLTRELGHKTDGETIEWLLQQAKPAVVAATGTGTIPANFTSLNISLRSSGSSFSIPAHLRAAGPRFGGARGDPWERVVGVGLGFGAAAEDPPSATSSASSPLLLSFHSGSVGLDVSPSPSSAAAGSDLSKKRRWEQEMQQQHQQQYHQQQQMAGYTTQSQMPGAVWMVPSASSNAQAAAAAGGGGSNANESIWTFPQPASGGGGGAATVYRGVPSGLHFMNFPAAPMALVPGGGQQLGLGGPVPVGGAGNDSSGSASGGGGGEGHMGILAALNAYRAHSAVSDAAPEQNGAEGGSRQHQQHGGGGERQESVSPPSDGS

SEQ ID NO: 9124 - protein, 257 aa, Zea mays
  Clone ID: TF_ZmC456_1.pep
QDGGGGGKEQQQLQVVAQPGERRQQALAPKRSSNKDRHTKVDGRGRRIRMPALCAARIFQLTRELGHKSDGETVQWLLQQAEPAIVAATGTGTIPASALASVAPSLPSPTSGLARPHHHMWAPSAGFSSPSFLNSAAAGTGDAAGIMQRMGIPAGFELPGASAAGATLGAGGHIGFAPMFAGHAAAMPGLELGLSQDGHIGVLAAQSISQFYHQVGAAAGGGGQMHHAHGHHHHHHQQQEDGEDDREDGESDDESGQ

SEQ ID NO: 9125 - protein, 324 aa, Zea mays
  Clone ID: TF_ZmC456_3.pep
MDPKFPTPLALNKTEPTTATTTTTSTAQHHQLDPKDYQQQTAQHQEQQQHHHHPHLQIQIHQPPPPPQDGGGGVKEQQQLLQVVAQPGDRRQQALAPKRSSNKDRHTKVDGRGRRIRMPALCAARIFQLTRELGHKSDGETVQWLLQQAEPAIVAATGTGTIPASALASVAPSLPSPTSGLARPHHHHPHHMWAPSAGFSSPSFLNSAGAGDGTGIGGIMQRMGVPAGLELPGGGAAGGHIGFAPMFAGHAAAMPGLELGLSQDGHIGVLAAQSISQFYHQVGAAAGGSGQMQHPHGHQHHHHQQQEDGEDDREDGESDDESGQ

SEQ ID NO: 9126 - protein, 198 aa, Zea mays
  Clone ID: TF_LIB5026-027-Q1-XP1-H8.pep
MATTRDVSAASAAAMFHVYQPMPMPSTAAAPAKAGKKEGGKDRHSKVNGRGRRVRMPIVCAARVFQLTRELGLKSDGQTIEWLLRQAEPSIVAATGSGTTPAVFVSSSAPSTSSSSHSHSHYQHQQQQQATVVVLGKRPREEGGEAAASVPAFWAAAPRTTAAADASWGFSPLEQQAAAGYVPMAQAQQQQQQHHHLN

SEQ ID NO: 9127 - protein, 137 aa, Zea mays
  Clone ID: TF_5268663.pep
AARVFQLTRELGHKSDGETIEWLLQQAEPAILAATGTGTIPANYSSLNISIRSGAAAPAARAAPFPALALHPHHHHQAAPAHDMSMMAGYHHHLLPPQPEPQEDPSAGDAYMRKRYREDLFKEDDERQDPSAPKARE

SEQ ID NO: 9128 - protein, 380 aa, Zea mays
  Clone ID: TF_ZmC1215_1.pep
MDATGDAGGGRRPNFPLQLLEKKEEQPCSTSPAAAVGAGAAGSGEMQMKKVAPPKRTSSKDRHTKVDGRGRRIRMPAICAARVFQLTRELGHRTDGETIEWLLQQAEPAVIAATGTGTIPANFTSLNISLRSSGSSFSIPAHLRAAGSPGPRFSGARGDPWERVVGLGFGGAEGPPSATSSPLLLSFHSGSVGLDVSSPSSSSAAANSDLSKKRRWEQEMQQQQQQQYQQQMAGYTQSQMPGTVWMVPSSNAQAAAAAGGGGSSSNESIWTFPPQPGSGDGGAAPVYRGVPSGLHFMNFPAPMALIPGGQQLGLGHENGGSSSGGEGHMGVLAALNAYRAHAVTVAAPAAQNGAEGGSSQQQQRGGGERQDSMSPSDDDS

SEQ ID NO: 9129 - protein, 194 aa, Zea mays
  Clone ID: TF_LIB5046-008-R1-K1-G3.pep
EITTLLLVPGPREGSVERASGGLGVPSVKHMFPFCDSSSPMDLPLYQQLQLSPSSPKTDQSSSFYCYPCSPPFAAADASFPLSYQIGSAAAADATPPQAVINSPATELGACASGAEGSGASLDRAAAAARKDRHSKICTAGGMRDRRMRLSLDVARKFFALQDMLGFDKASKTVQWLLNTSKSAIQEIMADDAS

SEQ ID NO: 9130 - protein, 164 aa, Zea mays
  Clone ID: TF_ZmC445848_1.pep
MEVEAVGCVGAGGKRARAKGAGAEPEPKRRAVAMAVPAPAAAPWAQQHPASRIYRISRGSGGKDRHSKVYTDKGIRDRRVRLSVATVIQFYDLQDRLGYDQPSKAIEWLIRGAGDAIDKLPSLDTAGSLPAHPAFAKDHAPPAGDNDDHQQQQQLTRSGCNSTS

SEQ ID NO: 9131 - protein, 174 aa, Zea mays
  Clone ID: TF_ZmC8497_1.pep
MEAQAQDNRAEDGDGARQHVAGGVAATGMAMGAIPMHGFMVPKPEPVEFFGGMAVVRSKPPPRNRDRHTKVEGRGRRIRMPAACAARIFQLTRELGHKSDGETIRWLLQQSEPAIIAATGTGTVPAIATTVDGVLRIPTQSSSSSSPSSLTTVVDGDEASAKRRRKLQPTRAAL

SEQ ID NO: 9132 - protein, 141 aa, Zea mays
  Clone ID: TF_ZmC212532_2.pep
MIRGGNHQQAADVEEELARNSRHAAAVATSRQWSAQTESRIVRVSRVFGGKDRHSKVKTVKGLRDRRVRLSVPTAIQLYDLQDRLGLNQPSKVVDWLLNAARHEIDKLPPLQFPPQDLMVGHLTPHNMPLMVHDEKFGHLA

SEQ ID NO: 9133 - protein, 235 aa, Zea mays
  Clone ID: TF_ZmC819_2.pep
MISGNLTNEDLGAGRTRTKAEGPTTAAVAGAVVAKSPVLPSSRQWPPSTESRIVRVSRVFGGKDRHSKVRTVKGLRDRRVRLSVPTAIQLYELQDRLGLSQPSKVVDWLLDAAQHEIDKLPPLQFPPQAAQDLVAHLPPPSMVAPFAADRAEADGDKRHCHAGVKGLMGLNNSIRLVNATMPLAHGLYYTPGESWTVMPMMPPPSSRLTTRLISAVSLLRSARYVLLCWLCGREC

SEQ ID NO: 9134 - protein, 632 aa, Zea mays
  Clone ID: TF_ZmC1447_2.pep
MAAAGVSPAFLLRLLSRCSDLSGFCVGRLKFQPRCRVPRQGRSDRSHFALSLTDLIGKQRRSRCSDCCATHRGKTDNSRVQPRGQQEAAPRPTLGLGLGRRSPPRPTPGSSASPDLRPRPRKEVSASPDPKARTQLRPREESRPRPTPASASGEVSASPDLGLGPTAPQGIHHYPTLANSGYEGTRSASHLARPGVAAPARVLRCPVVRSHSTPAQLRAAPVLRHRQADKPSRQACRRLGEEESSAAALHARSPPLAGQIDRSPSGSRLRSLLYFRFARFPFQKEPIGLLLDRCARLDFFWEFNRRMGRDGGRVRMSRVLATGDERGMGEVAGVERAACKRPRGALDGGGSASAAAWPACRVARAAAGGKDRHSKVVTARGLRDRRVRLSVPTAIQFYDIQDRLGVDQPSKAIEWLIRAAAAAIDGLPSLDCSFVFPHAAASPPGGAADDAELSTSETSKSSVLSLANAPVDNTAATAAHSQQANHAYNNNAAAGGGAFAELILHCSANNSSKPMQQHPTLAYYATQPPNAHSASAMSFETMLPHFSFLQEQSHHAIAFDRGTLQSNAAVAAPLWPTSQHACLLQRFAASPADATGLPSFFLGSGAAGASPVVPANAEPRLQLWDFKQERKT

SEQ ID NO: 9135 - protein, 220 aa, Zea mays
  Clone ID: TF_ZM4320.C3.o16.fg.pep
MATTREVSSSAAAMFHVYQTIPMPTPSTAAAGGGGAMVSVSAPAKPGKKEGGGKDRHSKVNGRGRRVRMPIVCAARVFQLTRELGLKSDGQTIEWLLRQAEPSIVAATGSGTTPAVFVSSSAPSTFSSSSHYHHQQQATVVLGKRPREEGDAAGSVFWAALPAAPRATEAWGFSPLEAQAAAAAAAAAYVPMAQAQAQHHHLNLLAALSGAARRAEEETR

SEQ ID NO: 9136 - protein, 256 aa, Zea mays
  Clone ID: TF_ZmC12025_1.pep
MAPHRRGQGLARPYPYPAIPIGFLPTSRVHHQQTRGVGATRQCVAMASRDGATFQVYRAMPAPTPMSLASAAPAAAAADAAAPKKAGAGAGKDRHSKVNGRGRRVRMPIVCAARVFQLTRELGLKSDGQTIEWLLRQAEPSILAATGSGTTPAVFSCSSAPSTSAASAGAGAGAGVSLPLLGKRPREEHEPAVAVAVAPAPFWATLQARPVAAAWGLSPAQEAAAQAYASVAAQGHHLNLLSVLSGAARQSEEESR

SEQ ID NO: 9137 - protein, 178 aa, Zea mays
  Clone ID: TF_ZmC386130_1.pep
IVRSAAGRKDRHSKVCTARGLRDRRVRLAAHTAIRFYDVQDRLGYDRPSKAVDWLIRNAKAAIDELSADREEGQPAAEAADATTTEPAEQVTSTSYGFAIGGVAGSFMPHSVGADDVSGSGSGSGSGNVKSLFPSSSTTSTTPTQDEYRGSPPDLLSRTTSSNQPQELCLTLQSTNNH

SEQ ID NO: 9138 - protein, 173 aa, Zea mays
  Clone ID: TF_LIB3354-089-Q6-N6-C3.pep
MVVEAMGGAGGKRGRAKGAGAGAEPEPKLRAMAVAVPSPAASPWAQQHPASRICRVSRASCGKDRHSKVYTDKGIRDRLVTISTVATAIQFYDLHDRLGYDQPIKAIEWLIRAAAEAIDKLSSLDASPVGDDDDHHHQQQHLTRSGCSSTSETSKGYVLSLSRSESRVKARER

SEQ ID NO: 9139 - protein, 382 aa, Zea mays
  Clone ID: TF_2051978.pep
LGVPSVKHMFPFCDSSSPMDLPLYQQLQLSPSSPKTDQSSSFYCYPCSPPFAAADASFPLSYQIGSAAAADATPPQAVINSPDLPVQALMDHAPAPATELGACASGAEGSGASLDRAAAAARKDRHSKICTAGGMRDRRMRLSLDVARKFFALQDMLGFDKASKTVQWLLNTSKSAIQEIMADDASSECVEDGSSSLSVDGKHNPAEQLGGGGDQKPKGNCRGEGKKPAKASKAAATPKPPRKSANNAHQVPDKETRAKARERARERTKEKHRMRWVKLASAIDVEAAAASVPSDRPSSNNLSHHSSLSMNMPCAAAELEERERCSSALSNRSAGRMQEITGASDVVLGFGNGGYGDGGGNYYCQEQWELGGVVFQQNSRFY

SEQ ID NO: 9140 - protein, 114 aa, Zea mays
  Clone ID: TF_ZmC585932_1.pep
MSAMKFCRECNNILYPKEDRDQKVLLFACRNCDHQEVADNNCVYRNVVHHSAGEFTQVLQDVAGDPTLPRTKEVRCAVCGHGEAVFFQATARGEDGMTLFFVCCNPSCGHRWRE

SEQ ID NO: 9141 - protein, 152 aa, Zea mays
  Clone ID: TF_LIB5116-028-A1-PF1-D6.pep
LQEIRDLLDQVNACDPYRVAVTVESALFERIGRSTGTHKVKYRSILFNLKADNNPDFRRRVLLGEVRPGSLVDMPADEMASDARKLENQQIKEKALFDCERASAPKASTDQFKCGRCGQRKTTYYQLQTRSADEPMTTFVTCVNCNNHWKFC

SEQ ID NO: 9142 - protein, 98 aa, Zea mays
  Clone ID: TF_ZmC176903_1.pep
RDLGKRVMTGDISPDRFVNMSDEELKSEDQRKMEIELEKENMKKAQVPMAEKSISDSLECGKCKKKRVSYTQAQTRSADEPMTTFCECMNCGNRWKFS

SEQ ID NO: 9143 - protein, 114 aa, Zea mays
  Clone ID: TF_ZmC28241_1.pep
MSTMKFCRECNNILYPKEDREQKVLLYACRNCDHQEVADNNCVYRNVVHHSAGEFTQVLQDVAGDPTLPRTKSVRCSSCGHGEAVFFQATARGEEGMTLFFVCCNPSCGNRWRE

SEQ ID NO: 9144 - protein, 114 aa, Zea mays
  Clone ID: TF_ZmC2003_1.pep
MSTMKFCRECNNILYPKEDRDRRTLFFACRNCEHQEVSDNNCVYRNEVHHTAGERTQVLQDVASDPTLPRTKTVRCNLCGHGEAVFFQAAARGEEGMTLFFVCCSPDCGHRWRE

SEQ ID NO: 9145 - protein, 110 aa, Zea mays
  Clone ID: TF_LIB4828-016-R1-N1-F12.pep
MEFCPVCGILLQIDPGTGSHRLRLFCPVCPYVCPILNKIVKKARLVKKEVEPISSTADEMKSAPKTAVTCQRCNHGEAYFKQMQIRSADEPMTTIYRCCKEECQHEWRED

SEQ ID NO: 9146 - protein, 115 aa, Zea mays
  Clone ID: TF_ZmC10090_1.pep
MAFWQTRDFLFCGICGTLLTFDSVRSASCPLCGFKRDAKEIEGKEIQYTMTAEDIRRGLKTQTEDVVGQRPVTNKACPKCDHPKAEFYNIQMRSADEGETTFYMCKGCGCNFKDE

SEQ ID NO: 9147 - protein, 110 aa, Zea mays; identical to SEQ ID NO: 9145
  Clone ID: TF_ZmC206_1.pep

SEQ ID NO: 9148 - protein, 110 aa, Zea mays
  Clone ID: TF_ZmC206_2.pep
MEFCPVCGMLLQIDPGTASHRLRLFCSVCPYVCPIQNKIVKKARLVKKEVEPIFSTADEMKSAPKTAVTCQRCNHGEAYFKQMQIRSADEPMTTIYRCCKEECQHEWRED

SEQ ID NO: 9149 - protein, 312 aa, Zea mays
  Clone ID: TF_ZmC11532_1.pep
MSDSYCPDCKKHTEVAFDHSAGDTVCTECGLVLEAHSVDETSEWRTFANESNDNDPVRVGGPSNPLLTDGGLSTVIAKPNGAQGDFLSSSLGRWQNRGSNPDRSLILAFRTIANMADRLGLVATIKDRANEIFKKIEDLKSIRGRNQDAILAACLYIACRQEDRPRTVKEICSVANGATKKEIGRAKEFIVKQLEVEMGQSMEMGTIHAGDFLRRFCSTLGMTNQAVNAAKEAVQRSEELDIRRSPISIAAAVIYMITQLSEDKKPLKDISLATGVAEGTIRNSYKDLYPYASRLIPNTYAKEEDLKNLCTP

SEQ ID NO: 9150 - protein, 229 aa, Zea mays
  unsure (1)..(229): unsure at all Xaa locations
  Clone ID: TF_ZmC11532_3.pep
MSDSFCPDCKKHTEVAFDHSAGDMVCTECGLVLEAHSVDETSEWRTFANESNDNDPVRVGGPTNPLLTDGGLSTVIAKPNGAQGDFLSSSLGRWQNRGSNPDRSLILAFRTIANMADRLGLVATIKDRANEIYKKVEDLKSIRGRNQDAILAACLYIACRQEDRPRTVKEICSVANGATKKEIGRAKEFIVKQLXEVEMGQSMEMGTIHAXXFLRSFWSTLGMNNQAGR

SEQ ID NO: 9151 - protein, 172 aa, Zea mays
  Clone ID: TF_ZmC11532_5.pep
EILDFLDTRIHNHATLSSSIFLDLCSIVAEICSVANGATKKEIGRAKEFIVKQLEVEMGQSMEMGTIHASDFLRRFCSTLGMNNQAVSAAKDAVQRSEELDIRRSPISIAAAVIYMITQLSEDKKPLKDISLATGVAEGTIRNSYKDLYPYASRLIPNTYAKEEDLKNLCTP

SEQ ID NO: 9152 - protein, 204 aa, Zea mays
  Clone ID: TF_ZmC11532_4.pep
LPLLNGGSNYLFLSLLFKDRANEIYKKVEDLKSIRGRNQDAILAACLYIACRQEDRPRTVKEICSVANGATKKEIGRAKEFIVKQLEVEMGQSMEMGTIHAGNFLRRFCSTLGMNNQAVRAAQDAVKHSEELDIRRSPISIAAAVIYMITQLSEDKKPLKDISLATGVAEGTIRNSYKDLYPYASRLIPNTYAKEEDLKNLCTP

SEQ ID NO: 9153 - protein, 194 aa, Zea mays
  Clone ID: TF_ZmC246942_1.pep
MVYCTHCADYCPSIKDPDKGYICCGTCGKVLDQEVYTDEPTFVKDNTGQSRLAGSILASIESGYSISHQRTLDKGRDEIRQIVNNLHVSGGETVVSKAYRFYELAVDRNFTRGRRTSHVAAACLYIACRQSKKAYLLIDFSDYLQISVYVLGAVFLQLCQVLLLADHPVVQKLVDPSLFIHRFTKCLLEKRDNA

SEQ ID NO: 9154 - protein, 469 aa, Zea mays
  Clone ID: TF_ZmC9889_2.pep
DLATAIDPAPSPSPGDEDDEDPFLPAGFVSAFSAFSLERHPVLARSASTFSGHLAELERALAVDSATAASNPDPAGPMVSVDSLRAYLQIVDVASILRLDRDIADHAFELFKDCSSATCLRNRSVEALATAALVQAIREAQQPRTLQEISTASNLPQKEIGKYIKILGESLKLSQPLNSNSIAVHMPRFCSLLQLNKSAQELAAHIGEVVANKCFCTRRNPISISAAAIYLACQLEDKRKTQAEICKVTGLTEVTLRKVYKELLENWDDLLPPDYTPATPPEKAFPMTNIYSGRSASGKDMYQDKIFESIKQKCPEPAEPDHMVVVKEEGDKKTAALGRPPTKLDHPELGKVFRPPNAPFSTSPKSDRDKTETSLRGFNLNEVSCAMDSDRTDITVKPTFGDRLSNDPNANPSPNRQPLPWQLKQGAPATAPSYSRLREQQSGLDLVAALKGVGKRSPGDSDVRDKEGK

SEQ ID NO: 9155 - protein, 314 aa, Zea mays
  Clone ID: TF_ZmC11532_2.pep
MSDSFCPDCKKHTEVAFDHSAGDMVCTECGLVLEAHSVDETSEWRTFANESNDNDPVRVGGPTNPLLTDGGLSTVIAKPNGAQGDFLSSSLGRWQNRGSNPDRSLILAFRTIANMADRLGLVATIKFCDRANEIYKKVEDLKSIRGRNQDAILAACLYIACRQEDRPRTVKEICSVANGATKKEIGRAKEFIVKQLEVEMGQSMEMGTIHAGNFLRRFCSTLGMNNQAVRAAQDAVKHSEELDIRRSPISIAAAVIYMITQLSEDKKPLKDISLATGVAEGTIRNSYKDLYPYASRLIPNTYAKEEDLKNLCTP

SEQ ID NO: 9156 - protein, 531 aa, Zea mays
  Clone ID: TF_ZmC9889_1.pep
MSSQCPYCRASGPARCATTQPPLSRAVSECSACARIVLERHLHTHPFFPLLPSLHPLPLVTPDLATAIDPAPSPSPGDEDDEDPFLPAGFVSAFSAFSLERHPVLARSASTFSGHLAELERALAVDSATAASNPDPAGPMVSVDSLRAYLQIVDVASILRLDRDIADHAFELFKDCSSATCLRNRSVEALATAALVQAIREAQQPRTLQEISTASNLPQKEIGKYIKILGESLKLSQPLNSNSIAVHMPRFCSLLQLNKSAQELAAHIGEVVVNKCFCTRRNPISISAAAIYLACQLEDKRKTQAEICKVTGLTEVTLRKVYKELLENWDDLLPPDYTPATPPEKAFPMTNIYSGRSASGKDMYQDKIFESIKQKCPEPAEPDHMVVVKEEEDKKTAALGRPPTKLDHPELGKVFRPPNAPFSTSPKSDRDKTETSLRGFNLNEVSCAMDSDRTDITVKPTFGDRLSNDPNANPSPNRQPLPWQLKQGAPATAPSYSRLREQQSGLDLVAALKGVGKRSPGDSDVRDKEGK

SEQ ID NO: 9157 - protein, 150 aa, Zea mays
  Clone ID: TF_LIB3689-252-Q1-K6-A10.pep
VSHPVVPAVTSTSTHAATQQGGYTNPSLPLPSFRGPPRRAGVRAPAMQQQHQGGGGGGGGGSQFGAPPPDMGPFSPTPAATGPMPLSSRPPSAQPQQQPRTSYEELAPMVPGAAAASGFDDETMGSGRRRRRVVGRVQQPVAAGGDAGAH

SEQ ID NO: 9158 - protein, 144 aa, Zea mays
  Clone ID: TF_ZmC150952_1.pep
KKRPEDSKTCPYYHQLDALYRSKALASSSSGPGAAPALPPPPPPPQRPDQQAAAAAPPVTVVLAPVPLSQTGPHGNGNGNGNGCAGRGSSDNGGGGSGGMQKQQASNGGVAAARFSAVDGAGGNGVATNKREEGIVRKEEAVAA

SEQ ID NO: 9159 - protein, 115 aa, Zea mays
  Clone ID: TF_ZmC434646_1.pep
RPRRAAKNGRRTPKRAPTLTSWTASTPAWARQSRRARNFWTRWSSTPTCATAPRGLGWTRNRPPAAGAIIITLIIKVDRPAALRIFPERRTALARGGPAMVRTPRWKTMAPRMSS

SEQ ID NO: 9160 - protein, 101 aa, Zea mays
  Clone ID: TF_16923001.pep
MPPPPPQVPSVSAASSASLERERLPQWSHAETAAFLAVRADLDHSFLTTKRNKALWEAVSARLHAQGFARTPDQTTHARPTPTRSSSVVHKLKKASYLHHA

SEQ ID NO: 9161 - protein, 244 aa, Zea mays
  unsure (1)..(244): unsure at all Xaa locations
  Clone ID: TF_ZmC228430_1.pep
WSSLQAGLSPTRQQCRNKMRRGQVLQAHQGRPSRAPGREVLQLLIAPRGAARLGAAFATPALGHDHGASWPSSADGNGMDGGPYGAGPCRRRRPAGPQLLVDVRVRLRVRLGRRRRPLWCGGGGPQRGRVRQGDDGHLREDDEAVHGEARRHAARVPGDAGAVRGRAHGARGGVAAPGGRPHEPRARAARQGARRRGLPRRRADRVPPACRRGAGRARAAPSARRRRRAPAAYAGLRPSVAXAP

SEQ ID NO: 9162 - protein, 398 aa, Zea mays
  Clone ID: TF_ZmC22174_1.pep
MEGNLPPQTMVPGGGPFDLGQPFHFAVQPQALQVYQDVFAAPAASQMPELGNVVKASLSDEEEGGDGHLDRGKAAAASQWHRVKWTSGMVKLLVSAVSYIDEDVDADHGTSSGRRKHAVLKRMGKWKLVSSAMTERGFAVSPQQCEDKFNDLNKRYKRLTEILGRGRACQIVEKPELLEQLSLSGKLREEAKKHLNSKHLHYEEMCSYHNRNRYCLLDDPVLQRSLRMALRAPAEQGKQCLFGYDDEDDQMLLSDDDDDYDDDELNDDLEAGAEDHGPHRVHATEKLKHDHEGHCGSHLSEVAAIDMNRMNFEGSGGPSSEKNLSYMRVQIERQRLKIKSQMLRIEQRHFKWLKFSKEKDRELQKMKLENERMALENERLELELKLKEIEIGIKPKRI

SEQ ID NO: 9163 - protein, 131 aa, Zea mays
  Clone ID: TF_LIB3068-006-Q1-K1-A4.pep
EIVVRAPPPSESQDTAGFGGGAPSPSRWPKAEVHALIQLRTELETRYQDSGPKCPLWEDISSGMRRLGYNRSAKRCKEKWENINKYFKKVKESNKKRPEDSKTCPYYHQLDALYRSKALASSSSGPGAAPA

SEQ ID NO: 9164 - protein, 246 aa, Zea mays
  unsure (1)..(246): unsure at all Xaa locations
  Clone ID: TF_ZmC226195_1.pep
LWEQVSRKLAEKGYNRSAKKCKEKFENVHKYYKRTKESRAGRNDGKTYRFFTQLEALHGTGAAPASVAASQVPPAISGGVSGAAGPLAVRLPAEPPPAVSGGVGMPMTTVGYPSFSTSNTEDYTDEDDSDDEGTEELVGGGGNERGKRKRVSEGGASVAGGGSGKMMRFFEGLMKQVMERQEAMQQRFLEAIEKREQDRMIREEAWRRQEMTRLARXQEILAQEPAMAASRDACVLSFIQKITGQT

SEQ ID NO: 9165 - protein, 379 aa, Zea mays
  Clone ID: TF_ZmC1297_1.pep
MLLSGPPPVPTPPLLLPESSGEDGGHDSSSRAAAAVGSAPKRRAETWVREETLCLIALRREMDAHFNTSKSNKHLWEAISARMRDQGFDRSPTMCTDKWRNLLKEFKKARSHSRNSGGGSGSGGNGNAKMAYYKEIDDLLKRRGKATGSGTAGCVGSSAGKSPKSNCKIDSYLQFTTDNGFEDANIPFGPVEANGRTILSIDDRLEDDRHQLPLTAADAVATNGVNPWNWRDTSTDGGDNRGNFGGRVILVKWGDYTKRIGIDGTPEAIKEAIKSAFGLRTRRAFWLEDEDEVVRTLDRDMPVGTYTLNLDDGMTIKLCDASRMQTPEDKTFYTEEDFRDFLSRRGWTFLREYGGYRNVDSLDDLRPGVMYQGLRSLGD

SEQ ID NO: 9166 - protein, 583 aa, Zea mays
  unsure (1)..(583): unsure at all Xaa locations
  Clone ID: TF_ZmC100578_1.pep
LAGSRTAPQLHALAAPVSPTPQQQLPASCAAPPLHAFPAPVSAPPPLSSIPLLTGPMQPAPISSAAPAPAPVDLTRAHAATQQEGFSFSSMSDSESDDEPGDDDMTAETGGNQDRLGKRKRGDGGGSGSNKMXLSSRGSCSRSSTGRRKCSGRSWRPWRSGRRSARXREEAWRRQEVARLNREQEQLAQERAAAASRDAAIIAFLQRISGQSVQPPATAVVVPMPAPVSVHTTPPKQPSRQQQQPPPPSPQATPQSKPISAAPLQQQPPQQQPKDTSQQDAGTPRSLPPASSQSLELVPFAATEHHVDSGLGGGDGGAASSSRWPKTEVHALIQLRMDLDMRYQETGPKGPLWEDISSGMRRLGYNRSSKRCKEKWENINKYYKKVKESNKKRPEDSKTCPYFHQLEAIYNRKHLSSLTTAATSSTAAAAAAPRPAYPDQLNPSRQEIEGKNINDDKRNNGGSGGGTQVPTSNGETATTTTTTPVAFDADTGMKKPEDIVRELNEHPRREFTTEDETDSDDMGDEYTDDGEEGEDDGKMQYRIQFQRPNPGGTNTAPAPAAATTAAPAVPTSAPTSTFLAMVQ

SEQ ID NO: 9167 - protein, 280 aa, Zea mays
  Clone ID: TF_ZmC1297_2.pep
LSQVTGSQHTATPKPQAPPGPGSLLRPISSKSNKHLWEAISARMRDQGFDRSPTMCTDKWRNLLKEFKKARSHSRNSGGGSGSGGNGNAKMAYYKEIDDLLKRRGKATGSGTAGCVGSSAGKSPKSNCKIDSYLQFTTDNGFEDANIPFGPVEANGRTILSIDDRLEDDRHQLPLTAADAVATNGVNPWNWRDTSTDGGDNRGNFGGRVILVKWGDYTKRIGIDGTPEAIKEAIKSAFGLRTRRAFWLEDEDEVVRTLDRDMPVGTYTLNLDDGTCELSS

SEQ ID NO: 9168 - protein, 61 aa, Zea mays
  unsure (1)..(61): unsure at all Xaa locations
  Clone ID: TF_LIB4738-050-Q1-K1-A4.pep
MEAGGPEAGGRDKRVPQWGVQETRELIVARREMERKAVXARRNAKTMWEAVAARLRERGYR

SEQ ID NO: 9169 - protein, 89 aa, Zea mays
  Clone ID: TF_uC-zmflteosinte110f02b1.pep
LIRVRTGLEGRFQEPGLKGPLWEEVSARMAVAVYGRSAERCKEKWENINKYLRKAKESGKKRPAHARTCPYFNELDRLYSRLGQAKQAS

SEQ ID NO: 9170 - protein, 210 aa, Zea mays
  Clone ID: TF_LIB4767-039-A1-K1-G7.pep
HWVPRGRPGRLSEGEGEQQEAARGLQDLPILPPARGHLQQKAPPQSHNRGGSSGASSNRWPREETQALIRIRSEMDATFRDATLKGPLWEDVSRKLADLGYKRSAKKCKEKFENVHKYYKRTKEGRAGRQDGKSYRFFEELEALHAAAPQPPPQHLPAASTAPQLHALAAPVSPPPQQQLPASSAAPPLHAFPAPVSAPPPLLVPPTQIS

SEQ ID NO: 9171 - protein, 166 aa, Zea mays
  Clone ID: TF_LIB3689-215-Q6-K6-F4.pep
MPPPFSPAGGAGQRISLAEAPSPISSRPPASTPAKQYDELGASGAGAVGFDAEGLAAAAAGEEGASGGSAGNRWPRQETLELLKIRSDMDAAFRDATLKGPLWEQVSSPTTTLPRTEAPGTGTAAAHQSTAPEACKRRRATAALEPAGSSAKAAARPRRRRSQRTL

SEQ ID NO: 9172 - protein, 176 aa, Zea mays
  Clone ID: TF_ZmC3461_1.pep
PPQQKPPMPQQQSMDIVMVPAETTPHADIPVHEGSSGGAASSRWPKAEVHALIQLRSNLDTRYQEVGPKGPLWEEISAGIRRMGYNRNAKRCKEKWENINKYFKKVKESNNSRIVFPGHGPVIDPSARTQALSPGDSHPPPLLHGFFSFSRSHVTFVSTHLSPPCMLVHISSSLHL

SEQ ID NO: 9173 - protein, 141 aa, Zea mays
  Clone ID: TF_ZmC87468_1.pep
FGKLADLGYKRSAKKCKEKFENVHKYYKRTKEGRTGRQDGKSYRFFDELEALHAAAPQPQPPLQKQQQQLPPASTTAPPLHAFAAPVSAPPPISSMPPSTGPMQPAPISSAAPAVQVQTLVELAGAHQPLNLLQGFSFSSM

SEQ ID NO: 9174 - protein, 197 aa, Zea mays
  unsure (1)..(197): unsure at all Xaa locations
  Clone ID: TF_LIB4172-051-R1-L1-B3.pep
HTWRRARVRVCGSSSCTVSMQQQQHGGGGGASGGGPAQQFCAQQVEMPLPFSPVGGAGQRISLAEAPSPISSAGRXRPAPAQQYDELGPSGAGAVGFDAEGLAAAAAGEDGASGGSAGNRWPRQETLELLKIRSDMDTAFRDATLKAPLWEQVSRKLAEKGYXRSAKKCKEKFENVHKYYKRTKESRAGRNDGKTYR

SEQ ID NO: 9175 - protein, 637 aa, Zea mays
  unsure (1)..(637): unsure at all Xaa locations
  Clone ID: TF_ZmC1882_3.pep
HTGDWKIDESPVDGKKFDRQALEELSKEGVTLMMSDSTNVLSPGRSISESVVAGSLLRHISEAKGRVITTQFASNIHRIGSIKAAADLTGRKMVFVGMSLRTYLEAAFKDGKAPLDPSXLAIKVEDMDAYAPKDLLVVTTGSQGEPRAALNLASYGGSHALKLSKEDVLLYSAKVIPGNETRVMKMMNRLTDLGPKIIMGKDSGLHTSGHAYREELEEVLRIVKPQHFLPVHGELLFLKEHELLGRSTGIRHTTVIKNGEMLGVSHLRNRRVLSNGFVSLGKEDLQLMYSDGDKAFGTSTDLCVDERLRIASDGIIFVSMEIFRPQKEHGLAQSGLKGKFKITTRCLWLDNGRLLDALYKAAHAALSSCPVNCPHSHMERMVAEILRKMVRKYSGKRPDVIAVATENTTAGFSEHLDTKASGNFGPSSATSHLSRSPATSLEGSYKTHPDNPEVDAEEILPETVRTTPDDATTSSNGEALFSSDLHQPKTLEHFWESFKSPTAVKIARIVNGGNKQNFGKIGIMGQDSLIQSAPAPVKSSKKNKWKPEEIKSLIQMRGEMNERFQSVKGRMVLWEEISDNMLKQGISRTPAQCKSLWTSLVQKYEESKKDAESMKTWPYFSAMDRILSQQGEMATKG

SEQ ID NO: 9176 - protein, 576 aa, Zea mays
  unsure (1)..(576): unsure at all Xaa locations
  Clone ID: TF_21214403.pep
TRPKGRVITTQFASNIHRIGSIKAAADLTGXXXVFVGMSLRTYLEAAFKDGKAPLDPSTLIKVEDMDAYAPKDLLVVTTGSQGEPRAALNLASYXXSHAXXXXXXXXXXXXXXXIPGNETRVMKMMNRLTDLGXXXIMGKDSGLHTSGHAYREELEEVLRIVKPQHFLPVHGELLFLKEHESLGRSTGIRHTTVXXXGEMLGVSHLRNRRVLSNGFVSLGKEDLQLMYSDGDKAFGXXXXXXXXXXXXXXXXXXXXXXXXXXXXXXXXXLAQSGLKGKFKITTRCLWLDNGRLLDALYKAAHAALSSCPVNCPLSHMERMVAEILRKMVRKYSGKRPDVIAVAMENTTASISEHLDAKSSGNFGPSSATSHLSRSPAMTLEGSXXXXXXXXXXDAEETLPEAARTAPDDATTSSNGEAFFSSDLHQPKTLEHFWESFKSPTAVKIARIVNXXKKQNLGKIGIMGKDSSIQSAPAPAKSXXXNKWKPEEIKSLIQMRGEMNERFQSVKGRMVLWEEISDNMLKQGISRTPAQCKSLWTSLVQKYEESKKDAESMKTWPYFSAIDRILSQQGEMATKG

SEQ ID NO: 9177 - protein, 116 aa, Zea mays
  Clone ID: TF_ZmC151302_1.pep
ENINKYFRKAKESGKKRPAHAKTCPYFDELDRLYSRSADGGGGEARQLGSSELLDAVIKYPDVRYGPPVFGGGNANNEGGEDDDSDGEEEEEEEEDGIGKGRAGDDQDDEVDNDDE

SEQ ID NO: 9178 - protein, 113 aa, Zea mays
  Clone ID: TF_ZmC170123_1.pep
GGSTPSRWPKEEVEALIQMRNEKGEKYHDAGAKGPLWEDIAAAMRGIGYSRSAKRCKEKWENINKYYKKVKESNKRRPEDSKTCPYFHQLDAMYRNKHRSGTGGRTAPRTNMA

SEQ ID NO: 9179 - protein, 274 aa, Zea mays
  Clone ID: TF_ZmC36384_1.pep
WVHLCLVVGAGAGGRDERVPQWGVQETRELIMARGEMERETVAARRSAKTMWEAVAARLRERGYRRTAEQCKCKWKNLVNRYKGKETSDPENGRQCPFFDELHGVFTERARNMQQQLLESESGVSVKTKLKRPGGDRSSGESDDKDDDGEESDDEKPMHNRKRKADDKKQQHQRMSEKSRTGISSIHELLQDFLVQQQHIDVRWREMIERRAQERVVFEQQWRLTMQRLEQERLLLEHSWMEREERRRMREEARAEKRDALLTTLLNKLLQEDL

SEQ ID NO: 9180 - protein, 45 aa, Zea mays
  Clone ID: TF_700082065H1.pep
AHCFKCTHPSCLVKKKVERSRDGHVTEIIYKGTRNHPMPTQSRRP

SEQ ID NO: 9181 - protein, 284 aa, Zea mays
  unsure (1)..(284): unsure at all Xaa locations
  Clone ID: TF_700572485_FLI.pep
AFAPVSAHSDASLLESQEALDVSSTLSNEEDERATHGTVSIECDGDEAETVSKRRKLELDALEATLTATTSTTSTIDMGPAASRAVREPRVVVQTTSEVDILDDGYRWRKYGQKVVKGNPNPXRKHVERASHDLKSVITTYEGKHNHEVPAARNSGQGSSSAPSASQAGGSHRRQEPAQASFAHFGTASFSSFGLPPSGQLGPTTGNFGFGMVPPGMTIPVPSLGSLAPVKMVGNSSAMQGYPGLMVPGEPKVEPVSQPLIQMANASPPAYQQILSRPPFGHQM

SEQ ID NO: 9182 - protein, 95 aa, Zea mays
  Clone ID: TF_ZmC1372_1.pep
VLDDDDLCVANVSSHNCSDACRVSGGEERNQRREEDDDEETAAAEAEAGNGSQLMVVPEDGYEWKKYGQKFIKNIQKIRYFLPSIHFHVVSATLT

SEQ ID NO: 9183 - protein, 211 aa, Zea mays
  Clone ID: TF_ZmC746_7.pep
TRPARTTGLEQRRQRVSSAGGENPVDDGRSWRKYGQKEILGAKHPRGYYRCSHRYSQGCQATKQVQRTDEDPTLYDVIYHGEHTCAPHRPAAAEHNPDARGHLQTLSAGLTVKTEGLPDPPRGRGAATPLYLSASSTPPSTSENWGVSPATSGSTHVASFRPFEAAEWRGQAEHQEVVSALVAAIAPPPAVDSLDDLLIDIDLDDIASFFA

SEQ ID NO: 9184 - protein, 85 aa, Zea mays
  Clone ID: TF_18383748.pep
QAHHPHPAERCHCSSKKKRARQGMLSRRTVRVPAAAAGSQPPHPHAPASSDIPADDYSWRKYGQKPIKGSPYPRGYYRCSSARAA

SEQ ID NO: 9185 - protein, 175 aa, Zea mays
  Clone ID: TF_ZmC746_4.pep
MASTEMEMGVVGGGVNSSGGGSCGGLVVTELSHIKELVRQLEVHLGGSPDLCKHLASQIFSLTERSIGLITSSNLDGARRRKRPAGDAGLASPLSATPTSDVTDGPFQTTKKKRKVMEQRRQRVSSAGGENPVEDGHSWRKYGQKEILGAKHPRCYYPCASRSSQGCPATKQVQR

SEQ ID NO: 9186 - protein, 229 aa, Zea mays
  unsure (1)..(229): unsure at all Xaa locations
  Clone ID: TF_LIB4746-103-R1-K1-B6.pep
LGTSRPARTCSRHPRARGGVESCAADSLTSPVTCPPSCRSYFRCTHRHTQSCQASKHVQRTDGDPLLFDVVYHGSHTCAQAQGAAARPVNQPAQQQTDTEQTTSPGFQAGPAVLPFSLRPASNKPPGADDAGDGATSSRFIATGCTVTASPFVSPATSECRIVSGGGGGYAVERWAGGXXRXPWAGVRNVSDVELAATTNSLMAMGEMDFMFPLDAANFLELENPASYC

SEQ ID NO: 9187 - protein, 64 aa, Zea mays
  Clone ID: TF_ZmC12542_1.pep
ITLGQGPEKSEDEGARVGGGRRRAAVRRAIESTAAVLADGSGCGACVVVDAVVGGDDVAGVVAV

SEQ ID NO: 9188 - protein, 108 aa, Zea mays
  unsure (1)..(108): unsure at all Xaa locations
  Clone ID: TF_jC-zmshLIB3569P036h02b1.pep
ATRACFRGENFYEPLNNTRKSLGREHLEQTASTADGENPDDDRRRWRKYXQKEILGANHLRGYYRCSHRYSQGCHATNQVPRTDKDQTLYYIIYHCEHTRAPHRPAGG

SEQ ID NO: 9189 - protein, 101 aa, Zea mays
  Clone ID: TF_ZmC7978_155.pep
WKKFGEKNIFGYIFPRSYCTCIWRKSTGCSATKILQPNNNDPNTLFVMYISKHNHGFSNEPHLEPSSPEPHLEPSSPPGTGRKREEYDVSIVENTFFFDTL

SEQ ID NO: 9190 - protein, 99 aa, Zea mays
  Clone ID: TF_ZmC735051_1.pep
ARRTGGWPPRWTPYSPTAPPRERCPRRRRPGALRWPPRSRRGPRSGRMCARAEPYDADTNHLRDCYQWRKYGQKVTRDNPHPRSYFRWAYAPSCPVKKK

SEQ ID NO: 9191 - protein, 80 aa, Zea mays
  unsure (1)..(80): unsure at all Xaa locations
  Clone ID: TF_LIB3245-169-P1-N1-B3.pep
ITLEATTPGLTPGCGAVKEQKIIAHAGKMSDGYRWRTYGQXIPNGXPNPMSYYLCTHGGCPVLKQFNKAPDDDNNIFVTY

SEQ ID NO: 9192 - protein, 147 aa, Zea mays
  unsure (1)..(147): unsure at all Xaa locations
  Clone ID: TF_LIB4705-005-R1-M1-A11.pep
MSWLQMQTEDXVPTPAQRIIVQTNSEVDLLDDGYRWRKYGQKVVKGNXPHPRSYYKCTYQGCDVKKHIERSSXQDPNAIITTYEGKHSHDVPAARNSSHAAANANGSCSTSVPHRVQSSASSSRRMADLRNTSSASSMHLKEEDEIT

SEQ ID NO: 9193 - protein, 162 aa, Zea mays
  Clone ID: TF_ZmC1093_1.pep
LACINRCLKLHKPSTSSSKVQLLYIVYSEIHFREHQMNILESSTRSGCQVVLNEIEHQRALMKGLYDLIVPTLDPCSRQEKLVQQIFQDISSSSGKVLSFLEPGDNSKKQANLIKYRRKRGKNSGVESHMLGEEAKEIGNKRRCVAKEVYIYMFTCVSFTWA

SEQ ID NO: 9194 - protein, 189 aa, Zea mays
  Clone ID: TF_ZmC35722_1.pep
IQTKLGHYSQLDPSTCPGSTPPYLPSPTLLQHTAGRPVVVRPSVLSSIHAAGDGAEHNVFQIERVVVPQVRHAREAAAAEPVLLLLLQLEARRHVALVRAGRGGPHRLGRGSGAPRRGEAAKHLLQLQLLLPLAAAAAALQLPRGLRRQHGALVSGLPVAGVGRREAAGPRVEVVVAAVAGSRQVCAPM

SEQ ID NO: 9195 - protein, 207 aa, Zea mays
  Clone ID: TF_ZmC45695_1.pep
MEEERCFNNWDLDAVVRLGCRRRLSPPRQPDPFASLLPPTLPSPSPSPPQKEKPVVPALAKGPEPEPYAGWRFPNLGAGGGQDGDELMRAMLAVQPSLPQPLPTTTPTPTPTLPPAAGEHRQSTVTAVDVPLPQVRPAPAARAQPSGRQVPGSVPRSKRRKNQVKKVVCHVPADGSSSDMWAWRKYGQKPIKGSPYPRGYYRCSSSQ

SEQ ID NO: 9196 - protein, 200 aa, Zea mays
  unsure (1)..(200): unsure at all Xaa locations
  Clone ID: TF_ZmC883338_1.pep
MEGSSSQLLETCLPASLYAVTPPPCAHPHPLLAPLPNQQHMLLQMPFVKEQAANNHGLMLSSDHHHHSGLLYPLLLPGIPFCPSVAAACEKTTTTGSGALDAGEAGTSSAAAKATGEIASTAATACNSPSSCNWWKGPAAAAAGEKGGRMKVRRKMREPRXCFQTRSDVDVLDDGYKWRKYGQKGVKNSLHPRSYYRCTH

SEQ ID NO: 9197 - protein, 69 aa, Zea mays
  Clone ID: TF_15499682.pep
TGVRSRAGGAAQKRRTKKLILGSRLDMPVVAGGHRGRGRQGAGRGRGRGRRVAVLALVRHHQHGRVLVP

SEQ ID NO: 9198 - protein, 210 aa, Zea mays
  unsure (1)..(210): unsure at all Xaa locations
  Clone ID: TF_LIB4738-091-Q1-K1-G2.pep
RHRSPGGLPESCPAISEPAPTASQQHKQNRSVGRSIDGQRYRRQWRQPAGGDGAGPPQGAGDAAGGAPRRLLAGPLQAPRLADLLHHRPLHQPAHHRHLIKXPTAAPLTRRPSSRLLPRKGRGWTRRXHEVRVGSAGGGGGDHPADDGYSWRKYGQKEILGAKHPRCPLDTCCAIRTFFPPPSSFPHSTAQSHLHVFLSQFRKWNRNHFA

SEQ ID NO: 9199 - protein, 94 aa, Zea mays
  unsure (1)..(94): unsure at all Xaa locations
  Clone ID: TF_LIB3069-004-Q1-K1-F1.pep
LVIEPAGIGKRDREFIAVEQTVMAQDVQDQSDQERTHXTKVRAGRTIPRRIYMFTDPGSPGRKHVARASHEPKAEITTSEGKHIHEIPVSRNAS

SEQ ID NO: 9200 - protein, 182 aa, Zea mays
  unsure (1)..(182): unsure at all Xaa locations
  Clone ID: TF_LIB4172-007-Q1-L1-B12.pep
NSARGGIYRCSSSXGCAARKQVERSRADPNTFILTFTGEHNHAAPTHRNSLAGTTRHKFPSSAAPQPPPPSVVVGGDAQDRQPSPSPTSTSTAGLSPTTPLRTPSMEEEEEEEEEEEGAAGGHGDWRGRAPVPQHRRRRRGTDVLALRRRRRALPKPSLGDSRQQRRRASHRGSRRWELTSS

SEQ ID NO: 9201 - protein, 80 aa, Zea mays
  unsure (1)..(80): unsure at all Xaa locations
  Clone ID: TF_LIB3595-027-Q1-N6-D7.pep
RSESIFLYIPPGEYLSRKSGQKPIKGSPYPRGYYKCSPVXGCPARKHVEXAPPTDPAMLVVTYEGEHRHNAGRARARAQP

SEQ ID NO: 9202 - protein, 84 aa, Zea mays
  Clone ID: TF_LIB4758-139-A1-K1-E9.pep
GYLEAGQCKIRKTLPKWSSQVRVSAVQDVSPLDDGLSWRKYGQKDILGAKYPRSARRRHTIERTIFFRIQTGLRARTSGAVSLC

SEQ ID NO: 9203 - protein, 180 aa, Zea mays
  Clone ID: TF_LIB4746-019-R1-K1-E5.pep
VPSSGRGKHVERASNDLKSVITTYEGKHNHEVPAARNSGNGHPSSGSTPAPPQGSGGLHRRLEPPQVSIPRLSAAAAAAAAAAAYGSLSLRFPPQLSAAPGGFSFGMLRPTGMAPSLGGFLPAQMPGRGLPMQGCAGLVLPRGEAKVVSPEQQSGLPGGTGMPRQPTSSKSSSLWPGGLR

SEQ ID NO: 9204 - protein, 246 aa, Zea mays
  Clone ID: TF_ZmC746_6.pep
DWTGARYAAVRCGDGAEPHQGAGEAAGGAPRRSPDLCKHLASQIFSLTERSIGLITSSNLDGARRRKRPAGDAGLASPLSATPTSDVTDRPFQSTKKKRKVMEQRRQRVSSAGGENPVEDGHSWRKYGQKEILGAKHPRLAGTRISLRQPEQQRRGWEDAPTPFLFSSTPACLVPERSPFSAPSTSENWGVSPATSDSNHVVSFPPFEVAAAAAAQFEFEEVMSAIDRADGEFLEDLDIYVSSFLA

SEQ ID NO: 9205 - protein, 99 aa, Zea mays
  Clone ID: TF_17969955.pep
MHACMQEISINNACTVQVQRCAEDKAVLITTYEGTHSHQLPPQAAAMAKTTSAAAAMLLSGPAVSRDAGALFAGHHVRRRSSPSTPLRVGRHALRDSTE

SEQ ID NO: 9206 - protein, 74 aa, Zea mays
  Clone ID: TF_ZmC165426_2.pep
GSKEVLYMLISRKRDIIYGPRKRRLSDPLLAVLPPLVPVAVRRGRPPLPAPSKALRTRTRQAIISGRDNLFRTS

SEQ ID NO: 9207 - protein, 32 aa, Zea mays
  Clone ID: TF_ZmC1208722_1.pep
GNPCPRAYYRCTMATGCPVRKQVYIYIYMYLM

SEQ ID NO: 9208 - protein, 116 aa, Zea mays
  Clone ID: TF_LIB3245-375-P1-N1-D4.pep
EKVHDDIKFKCTLIPFTGAKLDLPLIRPPNETRGLLLVSIDLTTAATLTATAGSKRSSRRAGAGSASANAAVAVAVAVVAVVALVGDDEHGRVVGGALHELPRARHPWRCCTGSNR

SEQ ID NO: 9209 - protein, 70 aa, Zea mays
  Clone ID: TF_LIB3245-060-P1-KI-G10.pep
MIIRCILKLVTSSKGAMLHSSNYLILLDPVAAGEGGGGARPPCRSAGCLRRFLAELLQAASSDAAPLSKF

SEQ ID NO: 9210 - protein, 213 aa, Zea mays
  Clone ID: TF_ZmC300_51.pep
LSCLDYKWLKVAKIYLLKFISRDWNRALVCRSKISCLPPMNLQKMEEPDRPKSACIYHLLRHGAGREGVVALGGAGRQLLLHGAGAPRVSVRPPQVGRVTDIRRRASPRRRGAGRGRAAASIGGDRRHGRRRPGRGVEADGDGLPGRCPQLELGGGEREEGAVARVVAVVGDRVQWRVAVVLLLHLLRGRAAHVVLVRASVVIPAAGQEPVSE

SEQ ID NO: 9211 - protein, 238 aa, Zea mays
  Clone ID: TF_ZmC13091_1.pep
MRPKNSSSWATLTAVPYDDGYEWRKYGEKKINGTLFTRSYFRCTYKDDAGCLATKHVQQMDSDDNSSPPMFHVTYHNDHTCSSAKAAAKANTGGSSSNNNSHLAALLADCCDGSGCNKGLTTTTTNGHAAADAAAMNMNMKQEPSLLPPPPPLAEPPSACFPYDQMPQQCHQLLFPVSMEQQFPGNGEEIPSAAGSCISGETSWDGYYYSGDMAAAEDDRFHDLERFLLGDSFMDYQY

SEQ ID NO: 9212 - protein, 76 aa, Zea mays
  unsure (1)..(76): unsure at all Xaa locations
  Clone ID: TF_ZmC65166_2.pep
TKIADIPPDEYSWXKYGQKPIKGSPHPRGYYKCSSVRGCPARKHVERCVDDSAMLIVTYEGEHNHTRMPTTQSAQV

SEQ ID NO: 9213 - protein, 216 aa, Zea mays
  Clone ID: TF_LIB4758-016-R1-K1-D2.pep
MTCVCMSLQVSAMQEEMEKMKEENRMLRRVVDRTMRDYDELKKKVEACYQQQQADEPKEPEVFLSLGATAAGTGGGFAEPKRKERQTVRRPSAGSDDTDDDTKEDRLGLSLSLAASSYEEEKLGAGPAGHDLEEASVAGADRKAKGYALLESSKLEAPAPPAAAGDLAAAGITSQSVNPANRKTRVSVRVRCQGPTMNDGGQWRKYGQKVAKGNPC

SEQ ID NO: 9214 - protein, 236 aa, Zea mays
  Clone ID: TF_LIB4759-112-A1-K1-D5.pep
MACVADRQAAVREVAQVYELIKLQQPLLLLHSSTSQLAQSLLGKALRALNVALSVMNQQQPPPPPPPPPPAVAPVSVVVVKAEPHLSPPSPASADSEATAPPARRGAKRTRRSAAPMGEKKKNSSSWATLTAVPYDDGYEWRKYGEKKINGTLFTRSYFRCTYKDDAGCLATKHVQQMDSDDNNSPPMFHVTYHNDHTCSSAKAAAKANTGSRSSSNNNSHLAAAAAGAAAMNMNM

SEQ ID NO: 9215 - protein, 320 aa, Zea mays
  Clone ID: TF_ZmC1183_1.pep
MAEAVESGGRALLVSELGRVQDLVSQLELQLRAPADADSVDLCRCLVQQIVALTDRSIGMLHSSPDLAPSPLTATGSPISSDAASDHHPFRPAGASPKKRKATARWTSQQVRVSADDGHSWRKYGQKDILGARHPRAYYRCTHRNSQNCLATKQVQRADDHPALFDVVYHGEHTCRPAAAGGGSKRAQQHNPHAQAALQGLAARLTVATTTTDNAAGLPPMTPESCPVRGASSPWSLASPVGSDFNGCLHQGISPCPVPGYRDWTSDVDLQEVVSSAFAAVSSVAPLPVPDDEFMPLECVEYVFDQNFDIDTAMPSLYYP

SEQ ID NO: 9216 - protein, 367 aa, Zea mays
  Clone ID: TF_ZmC4944_1.pep
MEEVEVANMAAVESCHRVLALLSQQQDPALLKSVASETAEACAKFRKVAALLGSASGGGGCGHARGRFSRRVRPLGLVNQKSPLGIATGSGNPLEMMPSTAAAAGSPSPPQSTSYAQMRARLSSAPESSRGLDLACSSSRCSPHPFGAPKLVQPLSVQFQIGSVAHRYPFHQQQSRQKLQAEMFRRSNSGISLKFDSPSPSGGAAGTMSSARSFMSSLSIDRSMASLDGKRPFHLVGTPVASDPADAHRAPKRRCTGRGEDGRGKCATTGRCHCSKRRKLRIKRSIRVPAISNKIADIPPDEYSWRKYGQKPITARAHPRGYYKCSSVRGCPARKHVERCVDDPAMLIVTYEGEHSHTQLPAQPAQT

SEQ ID NO: 9217 - protein, 314 aa, Zea mays
  unsure (1)..(314): unsure at all Xaa locations
  Clone ID: TF_ZmC740_2.pep
MAVDLMGCYAPRRANDQLAIQEAAAAGLRSLELLVSSLSTQAAAPHRAAAHQLQKPPSQPPIGEIADQAVSRFRKVISILDRTGHARFRRGPVVEPATGAXPAVAAPAPAPALHVVAPVAVAQPQSLTLDFTKPNLAVSGGATSVTSTSFFSSVTAGEGSVSKGRSLVSSGKPPLSGHKRKPCAGAHSEATTNGSRCHCSKRRKNRVKRTIRVPAISAKIADIPPDEYSWRKYGQKPIKGSPYPRGYYKCSTVRGCPARKHVERATDDPAMLVVTYEGEHRHTPGAPAPAPSPLSDSLFCSKPTHCCRQLLSMA

SEQ ID NO: 9218 - protein, 99 aa, Zea mays
  unsure (1)..(99): unsure at all Xaa locations
  Clone ID: TF_LIB4315-021-R1-N1-F6.pep
SGRKRVGSARLGECGGRPRGASGEGQPQSXSRGWRKYGQKXIKGWXEXXGYXPAHPGGCPARKQVERSQADTAGVIVSDKGEDDQKGPKHKTRGGSCWY

SEQ ID NO: 9219 - protein, 228 aa, Zea mays
  unsure (1)..(228): unsure at all Xaa locations
  Clone ID: TF_ZmC581509_2.pep
MENYHMLFGRPSTQPSSAATSNSYNFMLPPAGSTSGAGGLRDHDRGGGQHSGHAGGVPSSSSFFAEPSNTSSKDSGAAASSPPPAAGIGRGEEPAAGTPPAAAEVDGRLQAGKRKGEKKERRPRFAFQTRSQVDILDDGYRWRKYGQKAVKNNKFPRSYYRCTHQGCNVKKQVQRLSRDEXVVVTTYEGTHTHPIEKSNDNFEHILTQMQIYSGMGSTFSSSSHNMFH

SEQ ID NO: 9220 - protein, 205 aa, Zea mays
  Clone ID: TF_ZmC1382_3.pep
MATSLGLNPEDLFTSYSSSYYSSPPFMSDYAASFTPAGGDSTAFSSELDNLHHFDYSPAPIVTAAGAGAGGGDRNEKMMWCQGGGDERRLRSNGRIGFRTRSEVEILDDGFKWRKYGKKAVKNSPNPRNYYRCSSEGCGVKKRVERDRDDPRYVITTYDGVHNHASPAAAAIIVPYGNGGGNSGFYSPPHSGSPSATSYSGSLVF

SEQ ID NO: 9221 - protein, 215 aa, Zea mays
  Clone ID: TF_ZmC300_25.pep
MSPAPSSHHSQTNSRKEKRMRKVDTFAPHNDGHQWRKYGEKKINNTNFPRYYYRCTYKDNMSCPATKQVQQKDHSDPPLYAVTYYSDHSCNSAFLPLSPSEFQLRTPSGKAVSICFDSSSGPAAQEPAAVASVATNASGGSPSSSAAAVRRGTPPDISYPPDLRRSDTYPWSAGAVEQKLASCATECHDAFSAGAVPEEVVDAGRFGSIRFFHFL

SEQ ID NO: 9222 - protein, 329 aa, Zea mays
  Clone ID: TF_ZmC11799_1.pep
MAGAAGDRSEEDVGTDWPFGGVDAFTEYSSFFAEPGWPGGLAGELIPVLDLPEAAAPLPAQLSTEEPSEEPAPARSGDAGASSSSSGDGAAPGNGDGDDDRKAAPAAEAAGRKPAAKKGQKRARQPRFAFMTKTELDHLDDGYRWRKYGQKAVKNSPFPRSYYRCTNSKCTVKKRVERSSDDPSVVITTYEGQHCHSIGPFQRGGGGGAAAARYHSAAAVALAEQMYSSSTTSSFIPAARQQLFSLPPLHPQSSPPSSETTPPVVSSVTTTSFQRANDGDELWRTGYGSGVPVAQSPSTPPSVPPPAISVQKAGLLDDMVPHGVRHGTP

SEQ ID NO: 9223 - protein, 314 aa, Zea mays
  Clone ID: TF_ZmC5807_25.pep
MADSPNPSSGDLPAGAGCSPEKPVLADRRVSALAGAGARYKAMSPARLPISREPCLTIPTGFSPGALLESPVLLNNFKVEPSPTTGTLSMAANMNKSTHPDILPSPRDNSADSGQEDGGSREFEFKPHLNSQSSATAVNNQNHHDIPMQNHGSNHASPSSNLMTENKPLCSRESSHTANVSSAPNQPVSIVCPSDNMPAEVGTSEMHLINSSENAAQETQTENVAEKSAEDGYNWRKYGQKHVKGSENPRSYYKCTHPNCEVKKLLERSLDGQITEVVYKGHHNHPKPQPNRRLAAGAVPSSQAEERSMVWHLL

SEQ ID NO: 9224 - protein, 566 aa, Zea mays
  Clone ID: TF_ZmC1508_1.pep
MADGDPEPAPAPAPALANEKLHVRAAAYVDETRPPPPLEPSGGPDEEKRPPEEVEAEVEMHPPREPTGEPPVDRPGVEVVADMKANEVEKERGDRAKEKREKDKGKGKEEKEKVDEEAKGKVTAVMKVDGTEKEVKPTRRPAGASAETPILAVPVVAVPCFIAPPGFAGQFAMTHQAALASVTAQAQMHLQSPTPSACSEVPSSPFYMTPRSLVPLQHSPSVTEGNICTPIADKSFSSDSKSHHVVNMVADGFNWRKYGQKQVKSSDNSRSYYRCTNSGCLAKKKVEHFPDGRVVEIIYRGAHNHEPPQKTRFAKERVTPISVPSGGETLRLVNTEIVESSTPTCELERSAISETSEQHLFCSSDCEGDAGNKSEDEHPSAEALPKRRTLEATAPNLTPVRRTVREQKIIVQAGKMSDGYRWRKYGQKIVKGNPNPRSYYRCTHGGCPVRKHVEKAPDDVNNIVVTYEGKHNHDEPFRSSSIPVSVISPSATATEQPNTSSTSDERPPTITQKDANSESDKETTLKFGGEKALESAQTLLSIKTNSDDMKNSVLKETSAAVPVQNN

SEQ ID NO: 9225 - protein, 325 aa, Zea mays
  Clone ID: TF_ZmC154114_1.pep
NLLGGAPTEAPARRSSPRKCAATELVAKGRESAAVLKAMLGQLPAAATPHDGLRDLAEQVLRCCDRALAALLRGAATEEAACSSSARKRRKQPAERQGGLAPPPPSPAATGSKRMRMSRGERGTRAEKKETMEDGFIWRKYGQKDIHGSNYPRLYFRCTYKDDRGCEARRQVQRSDTDPCAAYLITYFGEHTCCCRDDAVEAPAPFVIDFGLSAAACDDGLQLPQYGSPWPSCDDDGPGPVELQTPPPRTSADLCSSPPEEELRAGACDVAEFVAEQSTTVTAELMGRMTSPEWDGCLDWELGEGDSSLDVDGFDRYYFDYSDLL

SEQ ID NO: 9226 - protein, 327 aa, Zea mays
  unsure (1)..(327): unsure at all Xaa locations
  Clone ID: TF_ZmC96043_1.pep
RSYFKCTHPNCLVKKKVERSHEGHVTEIIYKGTHNHPKPTQSRRPGAGAHPLGGGAQADAADNLQGSQANAAEANQPWRAGVQDGVDATSPPSVPGELCDSAASMQVDCAARFGSPEGADVTSAVSDEVDGDDRVTLTHGGANAAEGDELESKRRKLESYAIDMSTASRAVREPRVVIQTTSEVDMLDDGYRWRKYGQKVVKGNPNPRSFYKCTQPXCMVRPLFSARFLRSYALLSFFPSLGLLFFFFSLASSPFFFFSSFPLFPPPLFPFFPPFFRPFSLPFPLFFPFPPSPFRLFSRFPPFSFLSSPFSPVFLPLFLPVPFRFFL

SEQ ID NO: 9227 - protein, 201 aa, Zea mays
  Clone ID: TF_ZmC208922_1.pep
MQPHEKVAVLKPVASRPFSSFWPFPKFLHDFNATCSPTITFPQESELIRPKATRLASLPANLPAQIAAAIDAGSDTMSEEVEEYAKHHTYRDHATAWQAARRNGERSRLSLDGYSWRKYGQKKVKGSEFPRSYYKCTHPSCPVKRKVETTPDGQVAEIVYSGEHNHLKPGKPCPPRKPLLSTSTDAVMCDTHGIDDMTPPE

SEQ ID NO: 9228 - protein, 103 aa, Zea mays
  unsure (1)..(103): unsure at all Xaa locations
  Clone ID: TF_LIB4980-002-R1-M1-H1.pep
MDGGDLCRXPREKRVVRVPAISDKNADIPADNYSWRKYGQKPIKGSPHPRGYYRCSSKKDCPARKHVERCRSDAAMLIVTYENDHNHAQPLDPSVLTAANAEA

SEQ ID NO: 9229 - protein, 89 aa, Zea mays
  Clone ID: TF_ZmC425883_1.pep
RFCFQTRSDVDVLDDGYKWRKYGQKVVKNSLHPRSYFRCTHSNCRVKKRVERLSTDCRMVMTTYEGRHTHSPCSDDASSGDHTDCFSSF

SEQ ID NO: 9230 - protein, 256 aa, Zea mays
  unsure (1)..(256): unsure at all Xaa locations
  Clone ID: TF_ZmC58440_3.pep
MSSGEDGYCSSDSPRAESPDQPQAAADAESPRAGAGPNKRDLHASSPAAKRSRRSVEKRVVSVPLAECGEGPPPSDSWAWRKYGQKPIKGSPYPRGYYRCSSSKGCPARKQVERSRADPAVLLVTYTFDHNHEAPRPKSSCCHQQGRPPAPKPDEPVAEQEDELGPEHEPEDEQEPEQKVVPGLAGPETAPATATLAPVAEEDESFXLGWVDQYPTWHRSALYAPLLPPEEWERELXGEDPLFAGLGELPECAVXF

SEQ ID NO: 9231 - protein, 119 aa, Zea mays
  Clone ID: TF_LIB3245-348-P1-K1-A1.pep
RTRGRTRGQGLKTSAPTFDKPADDGYNWRKYGQKAVKGGEYPRSYYKCTHTSCPVKKKVERSAEGHITQIIYRGQHNHQRPPKRRSKDGGGPLNEADVLHENEDISTRSEPGSQDTLKT

SEQ ID NO: 9232 - protein, 197 aa, Zea mays
  Clone ID: TF_LIB4738-064-Q1-K1-A4.pep
LLGSYWSHLDCASDIYYNRNRSKKKAEKRQPRVAFLTKSEVDHLEDGYRWRKYGQKAVKNSPYPRSYYRCTAPKCGVKKRVERSYQDPSTVVTTYEGQHTHHSPASFRAGGAHLFMPNAHALPPQHLMLPSSFRPADLMGMVHPVSMGANLSMFLPTMPPHMPSPASRAHPLQQQQHQFTDYALLQDLFPSTMPNNP

SEQ ID NO: 9233 - protein, 359 aa, Zea mays
  Clone ID: TF_ZmC11951_1.pep
MSSGVRSGGGGDHHGVHHQHGHGHLAGADDGAEYAFYSNDMESFFFNQPASADVNNGGSRTGADELTMPPYSSVTDYLQGFMDMDPSGLARHLDAPCLLAEDAPLKHELSVDVSYDSQGTSGAPGDGAAAMHTPNSSVSLSSSDREGEGQLRRCRKGRPKAEDDAEGDEKDQEDGENSTKANRSKKKAEKRQPRVAFLTKSEVDHLEDGYRWRKYGQKAVKNSPYPRSYYRCTAPKCGVKKRVERSYQDPSTVVTTYEGQHTHHSPASFRAGGAHLFMPNAHALPPQHLMLPSSFRPADLMGMVHPVSMGANLSMFLPTMPPHMPSPASRAHPLQQQQHQFTDYALLQDLFPSTMPNNP

SEQ ID NO: 9234 - protein, 222 aa, Zea mays
  Clone ID: TF_ZmC581509_1.pep
MENYHMLFGTTATHAQPSSAAGTPSSYNFIATSTSSASGLRRDHDRGQHSGHVHAAGGSSSPSSFFVAERLSHNDDSSKDGGGGPGPAAAGSGEKEAEADDRPAAARRKGEKKERRPRFAFQTRSQVDILDDGYRWRKYGQKAVKNNNFPRSYYRCTHQGCNVKKQVQRLSRDEGVVVTTYEGTHTHPIEKSNDNFEHILTQMQIYSGMGSTFSRSSHDMFH

SEQ ID NO: 9235 - protein, 227 aa, Zea mays
  Clone ID: TF_ZmC458678_1.pep
MENQQQLQGDDESPSHTFPSFPYFTVPSPQPSLLPPPSESDDQRNTLATALQQQPSSACNNNDLQLLPLQLGAATVDWSALLQQHASLMGPLLPGLLLQQPPAPLDDQSAENAGSSSSKEKGGAAAGRKKKPSRPRFAFQTARVNDILPDGYQSTKYNIHLVRNSEHPRSYYRCTHHTCNGTNQVQRLSKDTSIVVTTYEVVHTHPCEKLIKAHSPILKQLQFLSQF

SEQ ID NO: 9236 - protein, 446 aa, Zea mays
  Clone ID: TF_ZmC35521_1.pep
RDSPGPLTLAAALFPDAPSPAFHGSFTQLLVGAVGSPAVPSSPSPFAVPPRLSPATLLGSPGFFSPTASFEMSHQQALAQVTAQAVHSQYNMINHADYTIPFSSTTTPALVIAQHANFSGNLTSAQEKPALPSHTGNSNIESNEVSQGLKTSAPTFDKPADDGYNWRKYGQKAVKGGEYPRSYYKCTHTSCAVKKKVERSAEGHITQIIYRGQHNHQRPPKRRSKDGGGPLNEADDLHENEDISTRSEPGSQEHSGKHEGSNDGISGPSVSRRGGGDEQLSGSSDSDEEQDDEQRAGDEDPGYANANKRHVPTPAQRIIVQTNSEVDLLDDGYRWRKYGQKVVKGNPHPRSYYRCTYQGCDVKKHIERSSQDPKAVITTYEGKHSHDVPAARNSSHAAANANCSSSTSVPHRVQSSASSSRRVADLQSTFSASSMLRINKAEITDG

SEQ ID NO: 9237 - protein, 85 aa, Zea mays
  Clone ID: TF_LIB5116-018-A1-PF1-F9.pep
MRKVDTFAPHNDGHQWRKYGEKKINNCNFPRFVFFFLSCHRYYYRCTYKDNMNCPATKQIQQKDHSDPPLYQVTYYNEHSCNSAF

SEQ ID NO: 9238 - protein, 318 aa, Zea mays
  unsure (1)..(318): unsure at all Xaa locations
  Clone ID: TF_ZmC1136_3.pep
MPAQTTSFPSFKQQQVEATTKAAVPSSNRASGGGNGNTKLEDGYNWRKYGQKQVKGSENPRSYYKCTYHSCSMKKKVERALADGRITQIVYKGAHNHPKPLSTRRNSSGGGAAEELQAGNSSLSAVAAAGCTGPEHSGATAENSSVTFGDDEAENGSQRSDGDEPDAKRCRXDGENEGSSAGGGGKPVREPRLVVQTMSDIDILDDGFRWRKYGQKVVKGNPNPRSYYKCTTAGCPVRKHVERASHDTRAVITTYEGKHNHDVPVGRGAASRAAAAAAAGSGALMATGGGQLGYQQQQQQQPYTLEMLSSGSYGGGAA

SEQ ID NO: 9239 - protein, 175 aa, Zea mays
  Clone ID: TF_ZmC740_4.pep
GRRHVRHLHVLFSRVTAGEGSVSKGRSLVSSGKPPLSGHKRKPCAGAHSEATTNGSRCHCSKRRKNRVKRTIRVPAISAKIADIPPDEYSWRKYGQKPIKGSPYPRGYYKCSTVRGCPARKHVERATDDPAMLVVTYEGEHRHTPGAPAPAPSPLPAAPKDPTCSDACIALQYCH

SEQ ID NO: 9240 - protein, 221 aa, Zea mays
  Clone ID: TF_LIB5100-006-A1-PF1-G10.pep
LVDVRTGGADEIDADADAGSLACCRSAAGKGKGKGEKRQRQPRIAFMTKSEVDHLEDGYRWRKYGQKAVKNSPYPRSYYRCTTQRCPVKKRVERSHQDPAVVITTYEGKHTHPIPSTLRGSSTHLLAAQLHHHHHHNIVGGVIDMLGLCLPPRNHAAVPPAATGLAPSPCCMSGPVGTVAGATTTTPTTTTVTTTTTSSPPPPPSQKMQHFMAQDDFGLLQ

SEQ ID NO: 9241 - protein, 274 aa, Zea mays
  Clone ID: TF_21211742.pep
SGIPGSTHASGNHLRLDADIVLNSLVLFFRKLELDALGAIAIATTSTTSTIDMGPASSRAVREPRVVVQTTSEVDILDDGYRWRKYGQKVVKGNPNPRSYYKCTHPGCSVRKHVERASHDLKSVITTYEGKHNHEVPAARSSGQGSSGSGSGPSAPQAGGSHRRQEPAQASFAHFGTSPFSSFGLAPSGQLGPTTGNFRFGMVPPGATIPMPSLGSLAPTKMIGNPSAMQGYPGLMMPGEPKVEPFSRPHFPTSIAPPPAYQQILSRPPFGHQM

SEQ ID NO: 9242 - protein, 121 aa, Zea mays
  Clone ID: TF_ZmC35521_2.pep
PEFPGRPTRPRKYGQKVVKGNPYPRSYYRCTYQGCDVKKHIERSSQDPKAVITTYEGKHSHDVPAVRNGSHAAANANGSSSTSLPVPHRVHSSASSSRRAAELQSASSASSMLLKEENEIT

SEQ ID NO: 9243 - protein, 187 aa, Zea mays
  unsure (1)..(187): unsure at all Xaa locations
  Clone ID: TF_LIB4756-017-Q1-K1-G2.pep
MASFGSDDHVPAAMAVNDLVEARDGVARLRILLLQLDEQRAAWAQLEIDAVLAKLSSAISALDASEVGRSRAAGPDGARPQRQQSGRSGGNKRKQGSSRRSQRPSDKKITATLEDGHEWRKYGQKEIQDSSYPRSYYRCTHKADQGCNAKRQVQRCETDAXTYVVTYYGEHTCRDLSSIPLIHQARA

SEQ ID NO: 9244 - protein, 132 aa, Zea mays
  Clone ID: TF_ZmC65166_1.pep
MIYSSALLINNEPMIIFFFFFEHGKCALAGRCHCSKRSKKLRVKRSIKVPAVSNKIADIPPDEYSWRKYGQKPIKGSPHPRGYYKCSSVRGCPARKHVERCVDDSAMLIVTYEGEHNHTGMPAQSAAAAAQV

SEQ ID NO: 9245 - protein, 207 aa, Zea mays
  Clone ID: TF_ZmC30082_20.pep
LGTSRPAGNRSPPNPSARHSPWQPPPGSLHSFSLFSPPLALLWPTPLACAGRQALASAHPLLARSSPTQPLLSPRPLFLPIPDLPQSEQTGCRLLMASGWLLPQSERRINYLSTSWIIELLCRGSRRRKNAKHVVSSVVTQAPNFDGYQWRKYGQKWISKAKHSRLQLSTFILYQGHSLLVLSMVLAFVLLVDHLAPRPPLRQAHHS

SEQ ID NO: 9246 - protein, 172 aa, Zea mays
  unsure (1)..(172): unsure at all Xaa locations
  Clone ID: TF_ZmC58440_2.pep
MSSGEDGYCSSDSPRAESPDQPQAAAAADADADAESPRAGAGPNKRDLHASSPAAKRSRRSVEKRVVSVPLAECGEGPPPSDSWAWRKYGQKPIKGSPYPRGYYRCSSSKXCPARKQVERSRADPAVLLVTYTFDHNHAAAAAATSNRRPPWVRWVWYGRGSSAAAVAGKGV

SEQ ID NO: 9247 - protein, 395 aa, Zea mays
  unsure (1)..(395): unsure at all Xaa locations
  Clone ID: TF_ZmC332_1.pep
MEAMEEANRTAVESCHRVLALLSNPHGQLVPSRELVATTGEAVARFGSLAAKLSSSNGNGLQGHARVRKTKKPLPIFYSNLFLESSSAVAAAATLVPSPSPIPGLQLFPRYHQFEGSSSQDPXPIPTQLPKRLLLEKPTAGMEGSTSQSPPIVQMVQPVSVAPPGGTPSPALPPGRLHFNQQQQSYQRFQLMQQMKIQSEMMKRSNLGDQGGSLSGGGGGGRKGLNLKFDSSNCTASSSRSFLSSLSMEGSLASLDGSRASRPFQLVSGSQTASTPELGLVQRRRCAGKEDGTGQCATGSRCHCSKKRKLRIRRSIKVPAISNKVADIPADEFSWRKYGQKPIKGSPHPRGYYKCSSVRGCPARKHVERCVDDPSMLIVTYEGDHNHNRVLAQPA

SEQ ID NO: 9248 - protein, 145 aa, Zea mays
  Clone ID: TF_LIB3332-030-P1-K1-A2.pep
RRVRPRVRPRVREDETESKRRKLELDAEGAIAIATTSTTSTIDMGPASSRAVREPTVVVQTTSEADILDDGYRWRKYGQKVVKGNPNPRSYYKCTHPGCSVRKHVERASHDLKSVITTYEGKHNHEVPAARNSGQGSSGSGSGPS

SEQ ID NO: 9249 - protein, 365 aa, Zea mays
  unsure (1)..(365): unsure at all Xaa locations
  Clone ID: TF_ZmC1136_5.pep
MTTSSSGSIEAPANSRPGSFAFASTSTSTSTSFTDMLGGSTDAAGGASRYKAMTPPSLPLSPSSFFSNNPGGLNPADFLDSPALFSSSIFTSPTTNAFASQQFSWLATSGAEQSGKDERRPSSYPDFSFQTAPTTEEAVRTTTTFQPPIPAASLGEEAYRSQQQQPWAYQQQQPGMDAGSSQQAAPYGEPFQAASSDAATMAPHVPASGGYSHQAQQSQRQSSDDGYNWRKYGQKQMKGSENPRSYYKCTDAWAXGCPTKKKVEQSPDGQVTEIVYKGTHNHPKPQSTRRGASSAPASYVVQSASDAVMPEHSWGALSGTPVVTPENSSGSFGGDGDEVNGMSSRLGGSFGADDLDDDEPDFKRW

SEQ ID NO: 9250 - protein, 140 aa, Zea mays
  Clone ID: TF_ZmC1372_2.pep
FFASLWGGGYFFRGETNKREEEDDDEAAAAAVEAGNGRQLVMPEDGYEWKKYGQKFIKNIQKMRSYFRCRHRLCGAKKKVEWHPRDPGGDLRIVYDGAHQHGPPPLAAPPGGHGQMQGGGASDSNRYELCTQYFGGARSR

SEQ ID NO: 9251 - protein, 331 aa, Zea mays
  unsure (1)..(331): unsure at all Xaa locations
  Clone ID: TF_ZmC554_5.pep
MDPWVSSQPSLSLDLHVGLPPMGHPHSHHQAAPMVALAKPKILVEENFMQLKKDPEVAVLESELQRVSEENRRLGEMLREVASKYETLQGQFTDMVTAGAHAGGNNHYNNQPSSASEGGSVSPSRKRKSEESNGTPPPSHQQQQQHYAGGLAYAAAPDQAECTSGEPCKRIRXEERKPVISKRYVHADPSDLSLVVKDGYQWRKYGQKVTKDNPCPRAYFRCSLAPSCPVKKKVQRSADDSAVLVATYEGEHNHARPPQHDGAAKRSSAPPAGEAARPPAPLPLQKQEAGPSSEVARKNLAEHMAVTLTRDPGFKAALVSALSGRIFDKGL

SEQ ID NO: 9252 - protein, 205 aa, Zea mays
  Clone ID: TF_LIB5116-036-A1-PF1-G12.pep
MSPVPSPNQSHLLGHGSRKEKRMRKVDTFAPHNDGHQWRKYGEKKINNCNFPRYYYRCTYKDNMNCPATKQIQQKDHSDPPLYQVTYYNEHSCNSAFLALTPTEFQLQTASGKAVSICFDSSGAQEPGANASSPSSSAAPRATPSESKNKPLALRSEALSSWAPGVVEQKTACADLQSCSTECQDAYISEDICREIRFYQILPFF

SEQ ID NO: 9253 - protein, 188 aa, Zea mays
  Clone ID: TF_LIB5116-050-A1-PF1-D11.pep
MSPVPSPHQSQLLGHESRKEKRMRKVDTFAPHNDGHQWRKYGEKKINNCNFPRYYYRCTYKDNMNCPATKQIQQKDHSDPPLYQVTYYNEHSCNSAFLALTPTEFQLQTASGKAVSICFDSSGAQEPGANASSPSSSAAPRGTPSESKNKPLALRSEALSSAPGVVEQKTACADLQSCSTECQDAYIS

SEQ ID NO: 9254 - protein, 213 aa, Zea mays
  Clone ID: TF_ZmC580972_1.pep
MHMALSSRSSFAADVLLPATMSYRQPCSGASSYLGSQPAAPFPSAAFGAVAQLDVFDCLSSDEGVGVPAAVPGAFAPPPPLMPAERVVPDAAAGYSSHTRSAAAVAGEGSRTTHRIAFRVRSDEDEVLDDGYKWRKYGKKSVKNSPNPRNYYRCSTEGCNVKKRVERDRDDPRYVVTMYEGVHNHVSPGTVYYATHDAASGRFFVAGMHQPGH

SEQ ID NO: 9255 - protein, 323 aa, Zea mays
  Clone ID: TF_ZmC568819_1.pep
MALVLGREEELLAQLRALLTFLPPPASPPAPAAPVKVESIMGTSGGGRRLGSKRDRDDDSEAEAEQHGDEPAAAQPHYCPHPPPPCKRTRRRKNKKKRQQSKCLVTTVPDFDGYQWRKYGQKQIEGAMYPRSYYRCIQSAKQGCQAKRTVQRNDDDGAAAPPEYTVVYVAEHTCTANDDALEAPPVILETTTSVVVVPAPAAHTDPVVVVVPATTSAAAAAASACSTTVTTGTESPAISGDDDVACWSSSGSSSSGYSYADDSCCCCCCDGLLAAVVHGGCGSSWAPGPADSVSVPSFQLQEMEDLTGPIRSPVHVPRAWLDR

SEQ ID NO: 9256 - protein, 140 aa, Zea mays
  Clone ID: TF_LIB4764-044-R1-K1-D1.pep
KQYSPYPRSYYRCTAPKCGVKKRVERSYQDPSTVVTTYEGQHTHHSPASFRAGGAHLFMPNAHALPPQHLMLPSSFRPADLMGMVHPVSMGANLSMFLPTMPPHMPSPASRAHPLQQQQHQFTDYALLQDLFPSTMPNNP

SEQ ID NO: 9257 - protein, 331 aa, Zea mays
  Clone ID: TF_ZmC1431_1.pep
MTTLDLMGGYGRVDEQVAIQEAATAGLRGMERLILQLSQAGTGERSLSPPAVQAQRQQQKQLEQIQQQVDCRELTDMTVSKFKKVISILNRTGHARFRRGPVAARSQSQSQGPASPEPAQSAPAPAARPLTLDFTKSVSGYSRDSGFSVSGASSSFLSSVTTGDGSVSNGRAGGSSFLMLPPAPGAASCAKPPPAGAAQKRKCHDHAHSENVAGGKYGANGGRCHCSKRRKHRVKRTIRVPAISPKVADIPADEYSWRKYGQKPIKGSPYPRGYYKCSTVRGCPARKHVERDPADPSMLIVTYEGEHRHSPASGQDPPPPSLAPLPELPSH

SEQ ID NO: 9258 - protein, 381 aa, Zea mays
  unsure (1)..(381): unsure at all Xaa locations
  Clone ID: TF_ZmC16975_1.pep
LSNGLAIKQKQERERERNKIESEETTTMFPSPGRAVMALGHGGQHMTASSTAGGMAASSSSTPTITFAXQPAVPSPSSDGDELPRPRPPPPPWRARLRLRLPSPGPPPPNHHHLLGLSLARGSVDRRPGPHPPPPLPWPCSRSAARFPFPSHEGVASSSSSMVDGGGLRRRAGAASRSSPTSRPRRQTAEGEGSGGERGVGGGAGGGRRADEEGGRRRRRQGAAEGARAAVLLQDDERRRRARRRLQVAQVRPEGRQEHAAPKELLPVHAGQLPGEEAGGAARRGPPHGHHHLRGPPRPLPVPRRRRRRRSRQRRDELHLVACRSGSDRRLSFSACNVVYSAASGLSFASHQQQLNILNLAIISIHASKNSLIDRVCMWHV

SEQ ID NO: 9259 - protein, 374 aa, Zea mays
  Clone ID: TF_ZmC413227_1.pep
MENKSDDLQHEHGMPDQTSRPFTSLLLSATSVAQAAQQDTGSDIKSLSLLHGSSLLPPDDGYIWKARAQNIVPGCEYPTMYYKCAQDNCNTNKLVVCSADGHQVLETVLSGCHNHPRQQDCDLPIPKVSKTDTSMPVSREGDDEQLSSSSDSDEDDVDQARVEGDGSVTRHVPHPAERITAQTGTANSHRHAGRRRPKSKVWEEFSAVLRDDKIQWAECKHCKMSLGGTSTGRTTHLRRHLKICPALPATDRMQKQRSSPHPGSTIESIWKFDQDRSLELLIKVLVSNLFSSPLTSSTTFRQLWAGICPTNDVLSDAAIEEKFLSIFENEKLKLKEEIALAPGGVFLTAASSSLETKNFIFLTVHFIDKEWKLE

SEQ ID NO: 9260 - protein, 132 aa, Zea mays
  Clone ID: TF_ZmC153952_1.pep
MDAEWSGDESKAGAAGGVSSADCPGSPPPVSPAPPSTSPAATGAGRRRSANKRVVTVPLADVSGPRPKGVGEGNTPTDAWAWRKYGQKPIKGSPFPRAYYRCSSSKGCPARKQVERSRAEPDKVIVTYSFEH

SEQ ID NO: 9261 - protein, 107 aa, Zea mays
  Clone ID: TF_LIB3592-037-Q1-K6-H4.pep
LLPQSERRINYLSTSSIIELLCRGSRRRKNAKHVVSSVVTQAPNFDGYQWRKYGQKWISKTKHSRLQLSTFILYQGHSLLVLSMVLAFVLLVDHLAPRPPLRQAHHS

SEQ ID NO: 9262 - protein, 271 aa, Zea mays
  Clone ID: TF_ZmC554_7.pep
MDPWISSQPSLSLDLRVGLPPLSLHQAPVAVALARPKVLVEENFLLPPKKEPEVAALETELRRMSEENRRLAEALAAVASKYEALRSQHKEMVSAAPAGGNASSASEGGSVSPSRKRKSESADTAPAPAQRPHPAADLSECTSGGEPPCKRVVRDRAEEVEEEEECRPRVTKLYVRADPADLSLAVRDGYQWRKYGQKVTKDNPCPRAYFRCSFAPACPVKKKVQRSAHDASVLVATYEGDHTHAPPPSGSGKNAAKPPSPARRQEAAVAV

SEQ ID NO: 9263 - protein, 367 aa, Zea mays
  Clone ID: TF_ZmC5807_21.pep
MADSPNPSSGDLPAGPGGSPEKPVLADRRVAALAGAGARYKAMSPARLPISREPCLTIPAGFSPGALLESPVLLNNFKVEPSPTTGTLSMAAIINKSTHMDIMPSPRDNSAGSGQEDGGSRDFEFKPHLNSHLAAPSVNNQNHHDTMQKYSSNHTTPSSNLKTENKPLCSRESSHTAHASIAPNQTVSIVCPSDNMPAEVGTSEMHQINSSENATQETQIENVAEKSAEDGYNWRKYGQKHVKGSENPRSYYKCTHPNCEVKKLLERSLDGQVTEVVYKGRHNHSKPQPNRRLAGGAVPSSQGEERYDGVATIEDKPSNIYSNLCNQVHSAGMIDTVPGPASDDDVDAGGGRSYPGDDANDDDLDSK

SEQ ID NO: 9264 - protein, 496 aa, Zea mays
  unsure (1)..(496): unsure at all Xaa locations
  Clone ID: TF_ZmC32154_1.pep
MSARPPPQPRPRLALPPRSTAESLFTGAGDTSPGPLTLASALFPSDADGGGGPGGASSSAAGAATFTQLLTGSLAPPPPQQQRHDAERGRGGGVARAGPALSVAPPASASAGASVFTVPPGLSPSGLFDSPGLLFSPAMGGFGMSHQQALAQVTAQATHSPLRMFDHLEQPSFSTAATTSGALQHMNSAASMAGISDMTMATANNENPSFQSAEASQRYQVNAPVDKPADDGYNWRKYGQKVVKGSDCPRSYYKCTHPNCPVKKKVEHAEDGQISEIIYKGKHNHQRPPNKRAKDGNSSAFDHNEQSNDTASGLSAAKRDQDNIYGMSEQASGLSDGDDMDDGESKRHEDXTSDNESKRRNIHISSQRTLSESKIIVQTTSEVDLLDDGYRWRKYGQKVVKGNPHPRSYYKCTFAGCNVRKHIERCSSDPKAVITTYEGKHNHEPPVGRGGNQNAGMSSQQKGQNNVSSNQASFSRPDLSNANQMPIGILQFKSEQ

SEQ ID NO: 9265 - protein, 512 aa, Zea mays
  Clone ID: TF_ZmC1136_1.pep
MVGAAGADHQERSPRGLFHRGATRGGGVGVPKFKSAQPPSLPISPPPMSPSSYFSIPPGLSPAELLDSPVLLHSSSNFFASPTTGAIPAQRFDWKQAADLIASQSQQDDSRAAVGSAFNDFSFHAPTMPAQTTSFPSFKEQQQQQVEAATKSAVPSSNKASGGSGGSTKLEDGYNWRKYGQKQVKGSENPRSYYKCTYHSCSMKKKVERSLADGRVTQIVYKGAHNHPKPLSTRRNSSGGVAAAEEQAANNSSLSGCGGPEHSGGATAENSSVTFGDDEAENGSQRSGGDEPDAKRWKAEDGENEGSSGAGGGKPVREPRLVVQTLSDIDILDDGFRWRKYGQKVVKGNPNPRSYYKCTTAGCPVRKHVERACHDARAVITTYEGKHNHDVPVGRGAASRAAAAAAAGSGALMATGGGQLGYQQHQQQQPYTLEMLSSGSYGGGGYVPRRRQPSCCCGGGGFAFSSGFDNPMGSYMSQHQQQQRQNDAMHASRAKEEPREDMFFPTSLLYTD

SEQ ID NO: 9266 - protein, 116 aa, Zea mays
  Clone ID: TF_LIB3116-028-P1-K1-A11.pep
ETGADQPFRQPFRLSRVLMSGSQGPRSGRRVTKASRGPRPYFRCSFAPACPAKKKVQRRATNPTILVATSKGNHNNGQPPQQAQAPNNGSSLGPRKKPPSPPRPFAAVPGRFHNKQ

SEQ ID NO: 9267 - protein, 215 aa, Zea mays
  Clone ID: TF_LIB5116-047-A1-PF1-F3.pep
MALDSVPSYPSDLGSSGRATRTQQRIRKEERTWTADTYAPYDDGHQWRKYGEKKLSNSNFPRFYYRCTYKTDLKCPATKQVQQKDMSDPPLFTVTYFNHHSCNTTSRPIGSAPDTTEQSSSRRAVSICFGSHATGEQPTFLTLPGTLQSPASTTNQQSDRGAYGHQFQWTDTSPSAGDAPVKMETDSLAGTDASSGAASGHALSRTLLPIGQSRC

SEQ ID NO: 9268 - protein, 166 aa, Zea mays
  Clone ID: TF_ZmC1382_2.pep
MAASLGLNPEAVFTSYTSSPPFMSDYVAASFLPPAVVDSTDFSAELDDLHHHLDYSSPAPTLAGARSDRSEKQMIRWCEGGGGEKRLGRIGFRTRSEVEILDDGFKWRKYGKKAVKSSPNPRNYYRCSSEGCGVKKRVERDRDDPRYVITTYDGVHNHASPAAAAI

SEQ ID NO: 9269 - protein, 104 aa, Zea mays
  Clone ID: TF_ZmC240676_2.pep
PRTTRIAFRTRSEIEILDDGYKWRKYGKKSVKNSPNPRNYYRCSTEGCNVKKRVERDKDDPSYVVTTYEGMHNHVSPSTVYYASQDAASGRFFVAGTQPPGSLN

SEQ ID NO: 9270 - protein, 283 aa, Zea mays
  unsure (1)..(283): unsure at all Xaa locations
  Clone ID: TF_ZmC58440_1.pep
MSSAEDGYCSSDSPRAESPDEPQAGADAESPRAGAGLNKRERDLPASPSSPLPPAKRSRRSVEKRVVSVPLAECGDRPRGASGEGPPPSDSWAWRKYGQKPIKGSPYPRGYYRCSSSKGCPARKQVERSHADPTALLVTYTFEHNHEAPQPKTSGGSCCHQQGKPSANEXSSRSELGPEHEPEDEQEPEQKVVPGLAGPETAPATATLAPVAEEDESFDLGWFDQYPTWHRSALYAPLLPPEEWERELQGEDALFAGLGELPECAVVFGRRRELSLAATAPCS

SEQ ID NO: 9271 - protein, 86 aa, Zea mays
  Clone ID: TF_ZmC332_4.pep
MPVAIQERPQLATSFGAQFTLLYLCQNMQITDTHKAHRPCRGYYKCSSVRGCPARKHVEGCVDDPSMLIVTYEGDHNHSRVLAQPA

SEQ ID NO: 9272 - protein, 414 aa, Zea mays
  unsure (1)..(414): unsure at all Xaa locations
  Clone ID: TF_ZmC91351_1.pep
MSSGDFHYHDELAALFAQRPAPAGEMTMALQQQAPAASWFADYLHAGAPGMGMDMDYDLLCRALDLPVPGDEDGVVKRELLLVADTGGGGGGFAAPLTPNTTSSMSSSSSEAAGAAAGGGGGGSFGAAEEESQSLGRCKKEDDGDGEESKDKEAMKGEEDDADTGKKGSAAGKGKGKGEKRQRQPRIAFMTKSEVDHLEDGYRWRKYGQKAVKNSPYPRSYYRCTTQRCPVKKRVERSHQDPAVVITTYEGKHTHPIPSTLRGSSTHLLAAQLHHHHHHNIVGAFPPPPPPPQTMCLPFVGRTGDGGGVIDMLGLCLPPRNHAAVPPAATGLAPSPCSMSGPVGTVAGATQTTAPXTTTVTTTTTSSPPPPPSLQTMQHFMAQDDFGLLQDMLPSSSSSLSFVVHSNGSNVQLP

SEQ ID NO: 9273 - protein, 228 aa, Zea mays
  Clone ID: TF_ZmC8945_1.pep
MALDSVPPYPSDLGSSRAAAAARTQQRIRKEERTWTSDTYAPYDDGHQWRKYGEKKLSNSHFPRFYYRCTYKNDMKCPATKQVQQKDSSDPPLFSVTYFNQHTCSSSSALGSARDVASQSSSKKAVSICFSPHAPSEQTSFLTTTTVAPPVMHSYGANRQPDRSAYNQQPQWWTGGVPSPTSNGPAKMEVAESTQKPSGSYGSTTGNAPSRTLLPIGQSRCIEYFHFL

SEQ ID NO: 9274 - protein, 302 aa, Zea mays
  Clone ID: TF_ZmC746_2.pep
MASVIDGNGGSRLVVTELGHLKELAMQLEGHLGGSSPDLCKHLASQISSITDRSISLLITATSSSPHGGASDAPPFIKATTKKRKRMDKKRHEVRVGSAGGGGGDHPADDGYSWRKYGQKEILGAKHPRGYYRCTHKSSQGCAATKQVQRTDEDPAFFDVVYLGDHTCVQSQRAAATAGRQAAADAQAPVYDANLMVKTEGPALEPEQQRRGWDDAPTPFLFSSTPACLVQERSPFSAPSTSENWGVSPATSDSNHVVSFPPFEVAAAAAAQFEFEEVMSAMDRADGEFLEDLDIYVSSFLA

SEQ ID NO: 9275 - protein, 136 aa, Zea mays
  Clone ID: TF_LIB4742-048-R1-K1-C11.pep
WVPRGRPRPASRIGFRTRSEVDVLDDGFKWRKYGKKAVKSSPNPRNYYRCSAEGCGVKKRVERDSDDPRYVVTTYDGVHNHAAPGDAYLCPPPPSRGAAHYSPPVAAPSWSAALDAWEAQLHRHAAAAAHSSESSY

SEQ ID NO: 9276 - protein, 218 aa, Zea mays
  Clone ID: TF_ZmC260_40.pep
MADDYFQFGFTGQEMVADDCSAPVFANSSSDAVTAAVGNGMSLLSYGVDGDGDGRRPMSGPPYGTGGNGGGRPPSSSRIGFRTRSEVDVLDDGFKWRKYGKKAVKSSPNPRNYYRCSAEGCGVKKRVERDSDDPRYVVTTYDGVHNHAAPGPGAASYLCQPPPPRGATATATPFSPPRSASAPAPLAAAPSWSAACDAWWEAQLHAAAAVAHSSESSY

SEQ ID NO: 9277 - protein, 189 aa, Zea mays
  Clone ID: TF_ZmC165426_1.pep
MQTQSRLAMSGGGGTGGSSSSSASEDEHEAVIRELTRGHELTAQLRAEALRALRGQGQAEATAAFILQEVSRAFTVCLSIMSSPARAPPPTMEMPAPALAPRRGRDDSIPREQRRTSSPHSDGYQWRKYGQKRITKSPFPRCYYKCSFHRERSCRATKQVQQCSDGDGHPPQYVVMYFNEHTCDTAGWE

SEQ ID NO: 9278 - protein, 81 aa, Zea mays
  Clone ID: TF_LIB3279-196-Q1-N6-F4.pep
QKPIKGSPYPRGYYKYSTGRGCPPRKHVEGDPPDPSMLIVPYEGEHRQSPPSGQDPPPPSLAPLRELPTHKFGFRPALSCQ

SEQ ID NO: 9279 - protein, 128 aa, Zea mays
  Clone ID: TF_ZmC1136_7.pep
LVVQTMSDIDILDDGFRWRKYGQKVVKGNPNPRSYYKCTTAGCPVRKHVERASHDKRAVITTYEGKHNHDVPVGRGAASRAAAAAAAAGSGALMATGGGQLGYHHQQQQQPYTLEMLSSGSYGGGGGY

SEQ ID NO: 9280 - protein, 326 aa, Zea mays
  Clone ID: TF_ZmC746_1.pep
MATTETMEMGVVVDGVSSNGSGGCGGLVVTELSHIKELVRQLEVHLGGSPDLCKHLASQIFSLTERSIGLITSSSSSSGLDGARRKRSAGDAGLASPLSATPTSGVTDGPFKNTKKRKAMEQRRQRVSSAGGENPVDDGRSWRKYGQKEILGAKHPRGYYRCSHRYSQGCQATKQVQRTDEDPTLYDVIYHGEHTCAPHRPAAAAAQHNPDARGHLQTLSAGLTVKTEGLPDPWAPRGRGAATPLYLSASSTPPSTSENWGVSPATSGSTHVASFRPFEAAEWRGQAEHQEVVSALVAAIAPPPAVDSLDDLLIDIDLDDIASFFA

SEQ ID NO: 9281 - protein, 336 aa, Zea mays
  Clone ID: TF_ZmC746_3.pep
GYLEAGHIATYTGHSHLVATTETGVVVDGVSSNGSGGCGGLVVTELSHIKELVRQLEVHLGGSPDLCKHLASQIFSLTERSIGLITSSSSSSGLDGARRKRSAGDAGLASPLSATPTSGVTDGPFKNTKKRKAMEQRRQRVSSAGGENPVDDGRSWRKYGQKEILGAKHPRGYYRCSHRYSQGCQATKQVQRTDEDPTLYDVIYHGEHTCAPHRPAAAEHNPDARGHLQTLSAGLTVKTEGLPDPPRGRGAATPLYLSASSTPPSTSENWGVSPATSGSTHVASFRPFEAAEWRGQAEHQEVVSALVAAIAPPPAVDSLDDLLIDIDLDDIASFFA

SEQ ID NO: 9282 - protein, 156 aa, Zea mays
  Clone ID: TF_LIB4759-048-R1-K1-C7.pep
MASFGSDDHVPAAMAVNDLIEARDGVARLRILLLQLDEQRAAWAQLEIDAVLAKLSSAISALDASEVGRSRAAGPDGARPQRQQSGRSGGNKRKQGSSRSRSQRPSDKKITATLEDGHEWRKYGQKEIQDSPYPRSYYRCTHKADQGCNAKEAVQR

SEQ ID NO: 9283 - protein, 567 aa, Zea mays
  Clone ID: TF_ZmC1377_1.pep
MSGASNYGSLIDEWLPPPTPSPRTLMSSFLNEEFSSAPFSGPHDQSEKSREVLNSSDEVPSHAVKGLFQNGFSNLFSAKSNSNGGLAERRAARAGFSVPKIDTSRVGSSTVIRSPVSIPPGLSPTTLLESPVFLYNKMAQPSPTTGTLPFLMATNDKSTISPAAKITEDSTFDNDVFSFQPHLGSEQTGFSTAEKKKRKSPKKQSLSNIHQQESSLQSSFTAVKDNTSATIVKAKPSSSSMFSDSHYSADQQQADETNIKVQGKGVEARSAAFAPVSAHSDASLLESQEALDVSSTLSNEEDERATHGTVSIECDGDEAETVSKRRKLELDALEATLTATTSTTSTIDMGPAASRAVREPRVVVQTTSEVDILDDGYRWRKYGQKVVKGNPNPRSYYKCTNPGCSVRKHVERASHDLKSVITTYEGKHNHEVPAARNSGQGSSSAPSASQAGGSHRRQEPAQASFAHFGTASFSSFGLPPSGQLGPTTGNFGFGMVPPGMTIPVPSLGSLAPVKMVGNSSAMQGYPGLMVPGEPKVEPVSQPLIQMANASPPAYQQILSRPPFGHQM

SEQ ID NO: 9284 - protein, 506 aa, Zea mays
  unsure (1)..(506): unsure at all Xaa locations
  Clone ID: TF_ZmC1136_2.pep
MASSTGSLEHGGFTFTPPPFITSFTELLSGAGDMLGAGADQERSSPRGLFHRGARGVPKFKSAQPPSLPISPPPMSPSSYFAIPPGLSPAELLDSPVLLHSSSNILASPTTGAIPAQRFDWKKAADLIASQSQQDGDSRAAAAGFDDFSFHTATSNAVRAHTTTTSLPSFEEQQQQVEKAAVPSSNRASGGGNGNTKLEDGYNWRKYGQKQVKGSENPRSYYKCTYHSCSMKKKVERALADGRITQIVYKGAHNHPKPLSTRRNSSGGGAAAEELQAGNSSLSAVAAAGCTGPEHSGATAENSSVTFGDDEAENGSQRSDGDEPDAKRWYVRDPARASERDSLFATRGPRFTSXACITTVSSCSCNSCIYVCLIRKQEDGENEGSSAGAGGKPVREPRLVVQTLSDIDILDDGFRWRKYGQKVVKGNPNPRSYYKCTTAGCPVRKHVERASHDTRAVITTYEGKHNHDVPVGRGAASRAAAAAAAGSGALMATGGGQLGYQQQQQQ

SEQ ID NO: 9285 - protein, 271 aa, Zea mays
  Clone ID: TF_ZmC2906_1.pep
CSGSPGYVYDHSGGGRPYPGDDSNDDDDLDSKRRKMESAGIDAALMGKPNREPRVVVQTVSEVDILDDGYRWRKYGQKVVKGNPNPRSYYKCTNTGCPVRKHVERASHDPKSVITTYEGKHNHEVPVSRNASHEMSTAPMKPAVHPINSNMPGLGGMMRACDARAFNNQYSQAAESDTISLDLGVGISPNHSDATNQMQPSVPEPMQYQMRHMAPVYGSMGLPGMPVPAIPGSMYGSREEKGNEGFTFKAAPLDRSANLCYSSAGNLVMGP

SEQ ID NO: 9286 - protein, 263 aa, Zea mays
  Clone ID: TF_ZmC2906_2.pep
SLCPKGFLLPIANAVLHNCVARKMESAGIDAALMGKPNREPRVVVQTVSEVDILDDGYRWRKYGQKVVKGNPNPRSYYKCTNTGCPVRKHVERASHDPKSVITTYEGKHNHEVPVSRNASHEMSTAPMKPAVHPINSNMPGLGGMMRACDARAFTNQYSQAAESDTISLDLGVGISPTHSDATNQMQPSVPESMQYQMQHMAPVYGSMGLPGMPVTAVPGNAASSIYGSREENGNEGFTFKAAPLDRSTNLCYSSAGNLVMGP

SEQ ID NO: 9287 - protein, 308 aa, Zea mays
  Clone ID: TF_ZmC740_3.pep
MAVDLMGCYTPRRADDQLAIQEAATAGLRSLELLVSSLSGAAPSKAPQQHPQQPFGEIADQAVSKFRKVISILDRTGHARFRRGPVQSAPPPPPPPAPVAPPPPPPLTVVAPVSVAAPLPQPQSLTLDFTKPNLAMSGATSVTSTSFFSSVTAGEGSVSKGRSLMSSGKPPLSGHKRKPCAGAHSEATTNGSRCHCSKRRKNRVKRSIRVPAISSKVADIPPDEYSWRKYGQKPIKGSPYPRGYYKCSTVRGCPARKHVERATDDPAMLVVTYEGEHRHTPGAVQGPSPLATASPVPVAVSAGNGLVV

SEQ ID NO: 9288 - protein, 139 aa, Zea mays
  unsure (1)..(139): unsure at all Xaa locations
  Clone ID: TF_ZmC58440_4.pep
MANWALVYFCASSRRSVEKRVVSVPLAECGDRPRGASGEGPPPSDSWAWRKYGQKPIKGSPYPRYVLSDDKPAXALLYVMCRGYYRCSSSKGCPARKQVERSHADPTALLVTYTFEHNHEAPQPKSSGRTCCHQQGKPS

SEQ ID NO: 9289 - protein, 222 aa, Zea mays
  Clone ID: TF_ZmC554_6.pep
FGSSATPQLPPLLPSLAVPLPAPGPDQMECTSAAVTAAGAAFHHEPARRIREERKPKVSRRYVHADPSDLSLAVKDGYQWRKYGQKVTKDNPCPRAYFRCSFAPSCPVKKKVQRSADDRTILVATYEGDHNHAQPPRHNGGGNKAATRSTPAATEAARPAPPLPLQHQQQQKQEAATGPSSEVARKNLAEHMAVTLTRDPGFKAALVSALSGRILDLSPPRD

SEQ ID NO: 9290 - protein, 322 aa, Zea mays
  unsure (1)..(322): unsure at all Xaa locations
  Clone ID: TF_ZmC2906_3.pep
GAHQTENVAEKSAEDGYNWRKYGQKHVKGSENPRSYYKCTHPNCEVKKLLERSLDGQITEVVYKGHHNHPKPQPNRRLAAGAVPSSQAEERYDGVAPIEDKPSNIYSNLCNQAHSAGMVDNVPGPASDDDVDAGGGRPYPGDDSNDDDDLDSKRRKMESAGIDAALMGKPNREPRVVVQTVSEVDILDDGYRWRKYGQKVVKGNPNPRSYYKCTHTGCPVRKHVERASHDPKSVITTYEGKHNHEVPVSRNASHEMSTAPMKPAVHPINSNMPGLGGMMRACDARXFTNQYSQAAESDTISLDLXGVGISPXHSDATNQMQP

SEQ ID NO: 9291 - protein, 253 aa, Zea mays
  Clone ID: TF_LIB5117-056-Q2-PF1-B5.pep
APKFKSAQPPSLPISSPFSCFSIPAGLSPAELLDSPVLLNYSHILASPTTGAIPARRYDWQASADLNTFQQDEPCRGDSGLFGFSFHAVKSNATVNAQANCLPLFKEQQQQQQQQVVEVSNKSSSGGGNNKQVEDGYNWRKYGQKQVKGSENPRSYYKCTYNNCSMKKKVERSLADGRITQIVYKGAHDHPKPLSTRRNSSGCAAVVAEDHANGSEHSGPTPENSSVTFGDDEGDHGLQLSDGAEPVTSAGRS

SEQ ID NO: 9292 - protein, 56 aa, Zea mays
  Clone ID: TF_700151333H1.pep
VDKVAVPSSNRSSGGGNGNTKLEYGYNWRKYAQKYVKGIENPRTYYKCTYHSCSMK

SEQ ID NO: 9293 - protein, 228 aa, Zea mays
  Clone ID: TF_ZmC346080_1.pep
MPLSPPPPSSSPRQAAIQELRRGTQLAELLRQQVELIPEPNRRHAAAVNVGEISMAMESSLSILQSQMEHPFSEPEVMAAALTAHSDGGTSGERNGGPVARTRKVRVRHRPGRGRPAAGDELPIKEILTEAPENDRFHWRKYGEKNILYSEYPRLYYKCGYSDDHKCPAKKYVQQQSNSYPPIFLVTLINEHTCDALFRDDEPIISSSSSGSSQVLDFTKASLSSPLH

SEQ ID NO: 9294 - protein, 154 aa, Zea mays
  Clone ID: TF_LIB4762-013-Q1-K1-E6.pep
RPGHPFSEPTAHYDGGTSGERNGPVARTRKVRVRHRPGRGRPAAGDELPIKEILTEAPENDRFHWRKYGEKNILYSEYPRLYYKCGYSDDHRCPAKKYVQQQSNSYPPIFLVTLINEHTCDALFRDDDPIISSSSSGSSQVLDFTKASLSSPLH

SEQ ID NO: 9295 - protein, 89 aa, Zea mays
  Clone ID: TF_ZmC734841_1.pep
GRRTSASSRCCPASSASTSPCRRTSSTSSRCASCQWRKYGQKISKGNPCPRAYYRCTVAPHCPVRKQVQRCAEDTSVLIPSTIARTTTR

SEQ ID NO: 9296 - protein, 75 aa, Zea mays
  unsure (1)..(75): unsure at all Xaa locations
  Clone ID: TF_jC-zmXLIB3526P032bh01a1.pep
SNIYIVGDRFRWRKYSQKLLXGDPDXRIYHKCVSAWCSVRKHVYARFLCARAVISTHKGKHQPLRARGPRTKHNR

SEQ ID NO: 9297 - protein, 233 aa, Zea mays
  unsure (1)..(233): unsure at all Xaa locations
  Clone ID: TF_LIB4759-038-Q1-K1-B11.pep
MSSGGGDHHGVYHQQHGHGHGHLARADGAEYAFHGNDDMESFFFNHPASAGLDGGGSRTTGADELLAPYSSITDYLQGLLDPSGLARHLDAPLKHELSVDASHDSQGTSGAPGGEAAAMHTPXSSVSLSSSDRDGEGQQPRRCKKGRTNKAEDAEGDEKDQQDGXENSTKANKSKKKAEKRQRQPRVAFLTKSEXVDHLEDGYRWRXYGQKXAVKNSPYPRSYYRCTTPKCGV

SEQ ID NO: 9298 - protein, 51 aa, Zea mays
  Clone ID: TF_LIB3236-084-P1-N1-B12.pep
VQRLAKDTSIVVTTYEGVHNHPCEKLMEALSPILKQLQLLSQLQSCTNQLL

SEQ ID NO: 9299 - protein, 197 aa, Zea mays
  Clone ID: TF_LIB4740-138-A1-K1-A11.pep
MQPHEKVAVLKPVASRPFSSFWPFPKFLHDFNATCSPTITFPQETELIRPKATRLASLPGDLPTHIAATTDAGSDTMSEEVEGYAKHHTYRDHATACQAARRNGERSRLSLDGYSWRKYGQKKVKGSEFPRSYYKCTHPSCPVKRKVETQVAEIVYSGEHNHLKPGKPCPPRKPLLSTSTDAVMCDTHGIDDMTPPE

SEQ ID NO: 9300 - protein, 128 aa, Zea mays
  Clone ID: TF_LIB4977-067-Q1-K1-D11.pep
MSPAPSSHHSQINSRKEKRMRKVDTFAPHNDGHQWRKYGEKKINNTNFPRYYYRCTYKDNMNCPATKQVQQKDHSDPPLYAVTYYNDHSCNSAFLPLSPSEFQLQTSSCSTECHDALLGRRRRARRRW

SEQ ID NO: 9301 - protein, 131 aa, Zea mays
  Clone ID: TF_ZmC300_23.pep
MSPAPSSHHSQINSRKEKRMRKVDTFAPHNDGHQWRKYGEKKINNTNFPRYYYRCTYKDNMNCPATKQVQQKDHSDPPLYAVTYYNDHSCNSAFLPLSPSEFQLQTSSGKDVSICFDSSSGTGAARPPPPM

SEQ ID NO: 9302 - protein, 160 aa, Zea mays
  Clone ID: TF_ZmC332_2.pep
ASSSRSFLSSLSMEGSLASLDGSRASRPFQLVSGSQTSSTPELGLVQRRRCAGKEDGSGQCATGSRCHCSKKRKLRIRRSIKVPAVSNKVADIPADEFSWRKYGQKPIKGSPHPRGYYKCSSVRGCPARKHVERCVDDPSMLIVTYEGDHNHSRVLAQPA

SEQ ID NO: 9303 - protein, 402 aa, Zea mays
  unsure (1)..(402): unsure at all Xaa locations
  Clone ID: TF_ZmC91351_2.pep
PRVRSSLISEQAARTGGAPMSSRDLYFHDELASLFAQRPAPAGEAMMTHQHQQQQQAPASWFADYLHAGAPGMGMDYDLLCRALDLPLPGDDVVKREEELLLVDTGGDGGGFAAPTPTPSGGGTAPVTPNTTSSMSSSSSEAAGGAAGGGGGGGGGREEDSPQGRCKKEEGDGEESKALDKGEEDADKGKKGSAAAGKGKGKGEKRQRQPRFAFLTKSEVDHLEDGYRWRKYGQKAVKNSPYPRSYYRCTTQKCPVKKRVERSSQDPAVVITTYEGKHTHPIPVTLRGSTHILAAQLHHHHNHHLGAFPTPLPQTGAAPFGRAAGXRGVIDMLGLLPPRNHGMSGGPMSAVAGAATTTAATITTTSTTPSSPPSLQMQHFMAQDFGLLQDIMLPSFPRRRRR

SEQ ID NO: 9304 - protein, 595 aa, Zea mays
  Clone ID: TF_ZmC9869_1.pep
NEVPSPYLTIPPGLSPATLLESPVFVSNSMGQASPTTGTLFMFGSTNDNDPIRFGGGPPSVGDGPNAFPFKPLDLKSSHYTAEAMKEQNTKSSVKTETKILTVQEASLLSQLNQLNHNSQIIIDSGGPHDPKLSRPASGAGAGNEHISPPDHGQTAEETDAREDYPAMAITTPAEDGYSWRKYGQKQVKHSEYPRSYFKCTHPNCLVKKKVERSHEGHITEIIYKGAHNHPKPTQSRRPGVQPVHPFGDSAQADAADNLGSQANAVDANQPRRAGVQDGMDATSSPSVPIERCDSPASMQVDSAARFGSPEGADVTSVSDEVGGDDRVTRGSMSQGGADAEGDELECKRRKLESYAIDMSTASRAVREPRVVIQTTSEVDILDDGYRWRKYGQKVVKGNPNPRSYYKCTYPGCVVRKHVERASHDLKSVITTYEGRHNHEVPAARNSGHPGTAAATGAGGPRRLEHPSLRDGLMGHLGGCGVPFGLPPPRDPLAPMGNYPTYASSIPLGGAGPTSLPSLPVPAGTLSAVDGLKLPMLAPSSLQQHPLLRHRQAMQAAGLVAPKDDVKVEGNVAGGAAPSVYQQMMCSGLRLRQQM

SEQ ID NO: 9305 - protein, 234 aa, Zea mays
  unsure (1)..(234): unsure at all Xaa locations
  Clone ID: TF_ZmC56014_1.pep
MMLLMDSGSRGDCSPVCLDLSVGLSPPSPGSGPETTADAERLDRPATGCWGPRTSSLADGQDEAKTLEARLTQVSEENRRLTEIIAYMYASQVAARRSPDGRKRSRDSLEPSNSGDANAAVESAALSDEGTCRRIKLTRVCTKIDPSDTTLTVKDGYQWRKYGQKVTRDNPSPRAYFRCAYAPSCPVKKXGAEERGGQXMLVATYEGEHNHPSPTRAGELPSFTSINSSGPITL

SEQ ID NO: 9306 - protein, 322 aa, Zea mays
  unsure (1)..(322): unsure at all Xaa locations
  Clone ID: TF_ZmC554_3.pep
MDPWISSQPSLSLDLRVGLPPLSLHQAPVAVALARPKVLVEENFLLPPKKEPEVAAALESELRRMSEENRRLAEALAAVVSKYEALRSQHTEMVAASSASEGGSVSPSRKRKSESADTAPVQRLHQQHAAADLSECTSGGEPPCKRVVRDRAEEVEEEEECRPRVSKLYVRADPADLSLAVRDGYQWRKYGQKVTKDNPCPRAYFRCSFAPACPVKKKVQRSAHDASVLVATYEGDHTHGPPPSGSGSGSGASSKNAAKPPSPPRRQEAAVAVTAAAAASEMVRXPNLAEQMAVTLARDPSFKAALVSALSGRILELSPTKD

SEQ ID NO: 9307 - protein, 132 aa, Zea mays
  Clone ID: TF_LIB3606-048-Q1-N6-A9.pep
AFGCLQFWISFCPYLRHACPSSRSLTLFVTTDDGWALLRHAAALLPAPPAAFLLPVQVTSLCPTPSPRRRAGSLTDTPWPSEGSCASSTAGSPSPTTSPPLPQRTRFLSRAFCPRDHRCSFLVPAAPCFFPL

SEQ ID NO: 9308 - protein, 295 aa, Zea mays
  unsure (1)..(295): unsure at all Xaa locations
  Clone ID: TF_ZmC740_1.pep
MAVDLMGCYAPRRANDQLAIQEAAAAGLRNLELLVTSLSTQAAAPHRAADQPFGEIAGQAVSKFRKVISILDRTGHARFRRGPVEPPPPTPXLSSPVLPLAPVSVAQPPQSLTLDFTKPNLAVSAATSVTSTSFFSSVTAGEGSVSKGRSLMSSGKPPLSGHKRKPCAGAHSEATTNGSRCHCSKRRKNRVKRTIRVPAISSKVADIPPDEYSWRKYGQKPIKGSPYPRGYYKCSTVRGCPARKHVERATDDPAMLVVTYEGEHRHTPGAVQGPSPLATASPVPVAVSAGNGLVV

SEQ ID NO: 9309 - protein, 205 aa, Zea mays
  Clone ID: TF_ZmC1382_1.pep
MATSLGLNPEDLFTSYSSSYYSSPPFMSDYAASFTPAAGDSTAFSSELDDLHHFDYSPAPIVTAAGAGAGGGDRNEKMMWCEGGGDERRLRSNGRIGFRTRSEVEILDDGFKWRKYGKKAVKNSPNPRNYYRCSSEGCGVKKRVERDRDDPRYVITTYDGVHNHASPGAAAIIVPYGSGGGNSGFYSPPHSGSPSATSYSGSLAF

SEQ ID NO: 9310 - protein, 267 aa, Zea mays
  unsure (1)..(267): unsure at all Xaa locations
  Clone ID: TF_ZmC713262_1.pep
MCDYFLQRMDQGDHHHHHQAGDLTDVVRAGGGAMHQAAVAELSSADTGWQLPAEPAAGASLFPPPQPSSSDCDGFADAFAGLPDPFASDFRTSSSSSGVGLGPADFFDFEAPAAAAAAGGGARRGGGVLAGAQMPALSPREIRPYPVTMGGDTVKIGAPTMMPGLAVGPPCCAFDAVAGMQMPSAHAHGEGMKRKKNQARKVVCIPAPAPXSGGGRTTGEGVRSDLWAWRKYGQKPIKGARYPRGGYRCSSSKGWPARKQVERKRTD

SEQ ID NO: 9311 - protein, 74 aa, Zea mays
  Clone ID: TF_LIB3732-003-Q1-N6-E5.pep
KRKTRVKRSIKVPGISSKVPDIPPEEFLWRKYGQKPIKGSPYPRGFYKSSPVRGCPARKHVEGAPADPAILVVT

SEQ ID NO: 9312 - protein, 98 aa, Zea mays
  Clone ID: TF_ZmC240676_1.pep
GKKSVKNSPTPGDGYQCSTYGKKSVKNSPNPRNYYRCSTEGCNVKKRVERDKDDPSYVVTTYEGMHNHVSPSTVYYASQDAASGRFFVAGTQPPGSLN

SEQ ID NO: 9313 - protein, 106 aa, Zea mays
  Clone ID: TF_LIB4185-024-R1-K1-A8.pep
RSIKVPAISLKVADIPPDEFSWRKYGPKPIKGSPFPRGYYKCSPVRGCPARKPVERAPDDPAILVVTYEGEPPPPPGPVQGPSPLATAFPGARSRFPRQRGRCLVF

SEQ ID NO: 9314 - protein, 342 aa, Zea mays
  unsure (1)..(342): unsure at all Xaa locations
  Clone ID: TF_ZmC1136_4.pep
GGSTKLEDGYNWRKYGQKQVKGSENPRSYYKCTYHSCSMKKKVERSLADGRVTQIVYKGAHNHPKPLSTRRNSSGGVAAAEEQAANNSSLSGCGGPEHSGGATAENSSVTFGDDEAENGSQRSGGDEPDAKRWYAEDGENEGCSGAGGGKPVREPRLVVQTLSDIDILDDGFRWRKYGQKVVKGNPNPRSYYKCTTAGCPVRKHVERACHDARAVITTYEGKHNHDVPAGRGAASXALYRPAPPTADTAGHHYLAAARPGVAYQTGQQYGFGDQLGSFGLSGAPAQSGGGGFAFSSGFDNPMGSYMSQHQQQQRQNDAMHASRAKEEPREDMFFPTSLLYTD

SEQ ID NO: 9315 - protein, 103 aa, Zea mays
  Clone ID: TF_LIB3245-516-P1-K1-C4.pep
MAPPPAKPALHEPPQLPRSAASANKTSEKRQRVPSAYNRFIKDEIQRIKASNPDITHREAFSAAAKNWAHFPHIHFGLMPDQGLKKHPMQTQEGAECMLFKDG

SEQ ID NO: 9316 - protein, 109 aa, Zea mays
  Clone ID: TF_ZmC32886_2.pep
MHRSDVSLLLFFFLLALSLGEYDCRDEIQRIKAGNPNISHREAFSAAAKNWAHFPHIHFGLMPDHQGLKTTSLLPQDHQRKDGLLKEGLYAAAAAAAAHAAANMGIAPY

SEQ ID NO: 9317 - protein, 169 aa, Zea mays
  Clone ID: TF_LIB4740-008-R1-K1-D11.pep
MSAQFASEHACYVNCNYCNTILGVNVPSSCSYNVVTVKCGHCTMVLSMDLSPFHQQARTVPDNQVVQNRGFQYNNFGSYEQASSRNLRTPPMYPVSNNLPQVPPIRPSEKRQRVPSAYNRFIKEEIQRIKTSNPEISHREAFSAAAKNWAHLPRLHFGLSVADGGGGSN

SEQ ID NO: 9318 - protein, 169 aa, Zea mays
  Clone ID: TF_ZmC31888_1.pep
MSAQFASEHACYVNCNYCNTILVVNVPSSCSYNVVTVKCGHCTMVLSMDLSPFHQQARTVPDNQVVQNRGFQYNNFGSYEQASSRNLRTPPMYPVSNNLPQVPPIRPSEKRQRVPSAYNRFIKEEIQRIKTSNPEISHREAFSAAAKNWAHLPRLHFGLSVADGGGGSN

SEQ ID NO: 9319 - protein, 169 aa, Zea mays; identical to SEQ ID NO: 9318
  Clone ID: TF_ZmC31888_2.pep

SEQ ID NO: 9320 - protein, 169 aa, Zea mays
  Clone ID: TF_ZmC31888_3.pep
MSAQFASEHACYVNCNYCNTILVVNVPSSCSYNVVTVKCGHCTMVLSMDLSPFHQQARTVPDNQVVQNRGFQYNNFGSYEQASSRNLRTPAMYPVSNNQPQVPPIRPSEKRQRVPSAYNRFIKEEIQRIKTSNPEISHREAFSAAAKNWAHLPRLHFGLSVADGGGGSN

SEQ ID NO: 9321 - protein, 169 aa, Zea mays; identical to SEQ ID NO: 9320
  Clone ID: TF_ZmC31888_4.pep

SEQ ID NO: 9322 - protein, 169 aa, Zea mays
  Clone ID: TF_ZmC31888_5.pep
MSAQFASEHACYVNCNYCNTILVVNVPSSCSYNVVTVKCGHCTMVLSMDLSPFHQQARTVPDNQVVQNRGFQYNNFGSYEQASSRNLRTPPMYPVSNNQPQVPPIRPSEKRQRVPSAYNRFIKEEIQRIKTSNPEISHREAFSAAAKNWAHLPRLHFGLSVADGGGGSN

SEQ ID NO: 9323 - protein, 220 aa, Zea mays
  unsure (1)..(220): unsure at all Xaa locations
  Clone ID: TF_ZmC7254_10.pep
MMSSSSSSSAACCFPLDHLAPSPTEQLCYVHCNCCDTILAVGVPCSSLFKTVTVRCGHCANLLSVNLRGLLLPPAAPAPPNHLNFAHSLLSPTSPHGLLDELALQQAPSFLMEQASANLSSTMTGRSSNSSCASNLPPPAPMPAAQPVQQEAELPKTAPSVNRPPEKRQRVPSAYNRFIKXEIQRIKGGNPDITHPXRRSAQPAKNWAHFPHIHFGLMPD

SEQ ID NO: 9324 - protein, 81 aa, Zea mays
  Clone ID: TF_UC-ZMFLB73131H04_FLI.pep
TTAPEKRQRVPSAYNRFIKEEIRRIKACNPDISHREAFSTAAKNWAHFPNIHFGLGPCESSNNLDEATGAMCHPQKVQDLY

SEQ ID NO: 9325 - protein, 206 aa, Zea mays
  Clone ID: TF_ZmC21266_2.pep
MDTVSQSEHLCYVRCTYCNTVLAVGVPCKRLMDTVTVKCGHCNNLSYLSPRPPMVQPLSPTDHPLGPFQCQGPCSECRRNQPLPLASPTSTDLTPRMPFVVKPPEKKHRLPSAYNRFMREEIQRIKAAKPDIPHREAFSMAAKNWAKCDPRCSTTASTATSNSAPEPARVVVPTPHVTEPRFDLEDRAKEHVIESFDIFKQIERNI

SEQ ID NO: 9326 - protein, 207 aa, Zea mays
  Clone ID: TF_ZmC21266_3.pep
MDTVSQSEHLCYVRCTYCNTVLAVGVPCKRLMDTVTVKCGHCNNLSYLSPRPPMVQPLSPTDHPLGSFQCQGPCSECRRNQPLPLASPTSTDLTPRMPFVVKPPEKKHRLPSAYNRFMREEIQRIKAAKPDIPHREAFSMAAKNWAKCDPRCSTTASTATSNSAPEPASRVVVPTPHVTEPRFDLEDRAKEHVIESFDIFKQIERTI

SEQ ID NO: 9327 - protein, 216 aa, Zea mays
  unsure (1)..(216): unsure at all Xaa locations
  Clone ID: TF_ZmC13380_5.pep
MSSSQIAPADHVCYVHCSFCNTVLAVSVPGNSMLNIVTVRCGHCANLLSVNLRALTHSLPEQDHQLQENIKVHGINGTLHDDHQCGHLDQLGSSSSSRFRRLPVMCSPQNGQHLLQEKTLNNNARPPEKRQRVPSAYNRFIKEEIRRIKANNXPDINHREAFSTAAKNWAHYPNIHFGLDDSGREGKKKLVDHEAAASVVAVAAAPTAAKKIQGFY

SEQ ID NO: 9328 - protein, 165 aa, Zea mays
  Clone ID: TF_ZmC32886_1.pep
LHPPHSPLLRPRPSAGSPGPQLLQQRLPAAAIPSGRNGLHPHPPQPQPQPPAAGKGAKEPSPRANSAINRPPEKRQRVPSAYNRFIKDEIQRIKAGNPDISHREAFSAAAKNWAHFPHIHFGLMPDHQGPKKTSLLPQDHQRSDGGGLLKEGLYAAAANMGVAPY

SEQ ID NO: 9329 - protein, 87 aa, Zea mays
  Clone ID: TF_ZmC13380_4.pep
NEIAAPEKRQRVPSAYNRFIKEEIRRIKANNPDISHREAFSTAAKNWAHYPNIHFGLNSGREGGKNKLVDEAVAAVAVAPKKIQGFY

SEQ ID NO: 9330 - protein, 206 aa, Zea mays
  unsure (1)..(206): unsure at all Xaa locations
  Clone ID: TF_ZmC13380_2.pep
MSSAQIVPADHVCYVHCNFCNTVLAVSVPGNSMLSMVTVRCGHCTNLLSVNLRALMHSVPEQDQLQXNIRVHGTLREHHQCGGGHHLELGSSSSSRFRLPMMMSYAPQNEHLLQEQTLNNARPAPEKRQRVPSAYNRFIKEEIRRIKANNPDISHREAFSTAAKNWAHYPNIHFGLNSGREGGKNKLVDEAVAAVAVAPKKIQGFY

SEQ ID NO: 9331 - protein, 192 aa, Zea mays
  Clone ID: TF_ZmC13272_2.pep
MSSAPLQIAPVPEHVCYVHCNFCNTILAVSVPSHSMLNIVTVRCGHCTSLLSVNLRGLIQSLPVQNHHYSQQQENFTVQNMGFTENYPEYAPSYRMPTTLSAKGDLDHMLHVRAPEKRQRVPSAYNRFIKEEIRRIKACNPDISHREAFSTAAKNWAHFPNIHFGLGPCESSNNLDEATGAMCHPQKVQDLY

SEQ ID NO: 9332 - protein, 261 aa, Zea mays
  Clone ID: TF_ZmC7254_8.pep
MMSSSSSSSSSAACCFPLDHLAPSPTEQLCYVHCNCCDTILAVGVPCSSLFKTVTVRCGHCANLLSVNLRGLLLPPAAPAPPNHLNFAHSLLSPTSPHGLLDELALQQAPSFLMEQASANLSSTMTGRSSNSSCASNLPPPAPMPAAQPVQQEAELPKTAPSVNRPPEKRQRVPSAYNRFIKDEIQRIKAGNPDITHREAFSAAAKNWAHFPHIHFGLMPDQGLKKTFKTHQDGAEDMLLKDDLYAAAAAAAAANMGITPF

SEQ ID NO: 9333 - protein, 205 aa, Zea mays
  Clone ID: TF_ZmC21266_1.pep
MDMVSQSEHLCYVRCTYCNTVLAVGVPCKRLMDTVTVKCGHCNNLSYLSPRPPMVQPLSPTDHPLGPFQCQGPCNDCRRNQPLPLASPSSTELSPRMPFVVKPPEKKHRLPSAYNRFMREEIQRIKAAKPDIPHREAFSMAAKNWAKCDPRCSTAASTETSNSAPAEPRVVPTPQLTEPRFDLEDRAKGQVIESFDIFKHIERSI

SEQ ID NO: 9334 - protein, 200 aa, Zea mays
  Clone ID: TF_ZmC21266_4.pep
MDMVSQSEHLCYVRCTYCNTVLALQVGVPCKRLMDTVTVKCGHCNNLSYLSPRPPMVQPLSPTDHPLGPFQCQGPCNDCRRNQPLPLASPSSTELSPRMPFVVKPPEKKHRLPSAYNRFMREEIQRIKAAKPDIPHREAFSMAAKNWAKCDPRCSTAASTETSNSAPAEPRVVPTPQLTEPRFDLEVLQSLLPSLFSVDK

SEQ ID NO: 9335 - protein, 67 aa, Zea mays
  unsure (1)..(67): unsure at all Xaa locations
  Clone ID: TF_LIB3596-045-Q6-K7-A8.pep
GFDPRRPIGFSAASNRFMHGRLRQXIKRDNPDIKHREAFSTGAKHWARYPNIHFGLHDSGREWQARN

SEQ ID NO: 9336 - protein, 164 aa, Zea mays
  Clone ID: TF_LIB4828-125-R1-N1-C9.pep
MSSAPLQIAPVPEHVCYVHCNFCNTILAVSVPSHSMLNIVTVRCGHCTSLLSVNLRGLIQSLPVQNHHYSQQQENFTVQNMGFTENYPEYAPSYRMPTTLSAKGDLDHMLHVRAPEKRQRVPSAYNRFIKEEIRRIKACNPDISHREAFSTAAKNWAHFPNIHF

SEQ ID NO: 9337 - protein, 216 aa, Zea mays
  Clone ID: TF_ZmC13380_1.pep
MSSAQIAPADHVCYVHCSFCNTVLAVSVPGNSMLNIVTVRCGHCANLLSVNLRALMHSLPEQDHQLQENIKVHGINGTLHDDHQYCGHLDQLGSSSSSRFRRLPVMCSPQNEQHLLQEQTLNNNARPPEKRQRVPSAYNRFIKEEIRRIKANNPDINHREAFSTAAKNWAHYPNIHFGLDDSGREGKKKLVDHEAAASVVAVAAAPTAAKKIQGFY

SEQ ID NO: 9338 - protein, 204 aa, Zea mays
  unsure (1)..(204): unsure at all Xaa locations
  Clone ID: TF_ZmC151488_1.pep
MMSSAPEETLFNLDQQQPPPAEQEQICYVHCSYCDTILAVGVPCSSLFQTVTVRCGHCSNLLYVNLRALLLPAAAANNQLPPFGQPLLSPTSPHGLLDAEAMSFQAPSLPGAEPPSACVSGVTSINNTCGGNTTTSSAMSSMAPPPAKHALQEAQQLPRTAASVNRTSEKRQRVPSAYNRFIKDEIQRIKASNXDITHREAFSA

SEQ ID NO: 9339 - protein, 206 aa, Zea mays
  unsure (1)..(206): unsure at all Xaa locations
  Clone ID: TF_LIB4744-101-A1-K1-B10.pep
SRRPGIHTKEWFASFLSPSISRLLLDQRRVRCCRSTNRHLSCQYASEHACYVNCHYCXTILVVNVPXSCSYNXLTAKRALRTKGLLLDLSPFHHPPLTVPHNEVAHNXASNNLSLVLTTHKPANLSTRPPSVIHVSEHICHNCHPYDPHRKHPLLHHDTTHSSTANXRRLKTSHPEISHREAFRAATKNWPHLPXLHFRLIVCDHR

SEQ ID NO: 9340 - protein, 163 aa, Zea mays
  Clone ID: TF_LIB4975-011-R1-K1-D11.pep
MMSSSSSSSSSAACCFPLDHLAPSPTEQLCYVHCNCCDTILADELALQQAPSFLMEQASANLSSTMTGRSSNSSCASNLPPPPPMPAAQPVQQEPELPKTAPSVNRPPEKRQRVPSAYSRFIKDEIQRIKGGNPDITHREAFSAAAKNWGHFPHIHFGLMPDQ

SEQ ID NO: 9341 - protein, 146 aa, Zea mays
  Clone ID: TF_LIB4073-012-Q6-K1-G12.pep
RTRGRTRGHKHTQISSSISPLSFTSLYLQAVCTTQGEKSRRNVGPADRAGAGACVLRALQLLQYNSRAPEKRQRVPSAYNRFIKEEIRRIKASNPDISHREAFSTAAKNWAHFPNIHFGLGPYESSNKLDEAIGATGHPQKVQDLY

SEQ ID NO: 9342 - protein, 180 aa, Zea mays
  Clone ID: TF_LIB4703-004-R1-K1-F7.pep
VPGNSMLSMVTVRCGHCTNLLSVNLRALMHSVPEQDQLQQENIRVHGTLREHHQCGGGHHLELGSSSSSRFRLPMMMSYAPQNEHLLQEQTLNNARPAPEKRQRVPSAYNRFIKEEIRRIKAPNPDISHREAFGTAAKNWAHYPNIHFGLNSGREGGKNKLVDEAVAAVAVAPNKIQGFY

SEQ ID NO: 9343 - protein, 91 aa, Zea mays
  Clone ID: TF_LIB4744-099-A1-K1-A7.pep
MAQTLISTDHPLLPYQRLGPCNDCRRNQPLPLCSHMSSDLTRRMAFRCHPQHKRHRLPSGHNLCMTDYIQRISADWPHIPHWEAFTMDVHN

SEQ ID NO: 9344 - protein, 258 aa, Zea mays
  Clone ID: TF_ZmC1397_2.pep
MKVQCDVCTAEAASVFCCADEAALCDACDRRVHRANKLAGKHRRFSLLHPCSSSSSSAAHKPPLCDICQERRGFLFCKEDRAILCRECDAPVHSASDMTRRHSRFLLTGVRLSSAPVDSAGPSEEEEQENSRGPCNDESCSSGSGAGGATTATASDGSSISEYLTKTLPGWHVEDFLIDDASAGDVGACSDGLYQGQNGQISGVLQEAYLPWTEREQVQTDVADERASWERWVPQMHAEFGGGGKRPRASPSPPCSYW

SEQ ID NO: 9345 - protein, 210 aa, Zea mays
  Clone ID: TF_ZmC1397_1.pep
MKVQCDVCAAEAASVFCCADEAALCDACDDRVHRANKLAGKHRRFSLLHPCSSSAHKPPLCDICQERRGFLFCKEDRAILCRECDAPVHSANDMTRRHSRFLLTGVRLSSAPVDSADPSEGEEEEEQENSSRPGNGESCSGGAGATTATASDGSSISEYLTKTLPGWHVEDFLVDDAYASDVGACSSDGLYQVSSVLPCEWNCKLSLRRS

SEQ ID NO: 9346 - protein, 308 aa, Zea mays
  Clone ID: TF_ZmC3762_1.pep
MQMLCDVCAAAPAAVICCADEAALCSACDRRVHRANKLAHKHRRIPLAQPSGDESDADAKPLCDVCKERRGLVFCVEDRAILCPDCDDPIHSANDLTAKHTRFLLVGAKLSAALVDAQAPHSPDDDDNDCGRGNGAAAEPDAVPAVCAQGSCAAKASSLESGGGGGGGSGSGSSISEYLTNICPGWRVDDLLFDDSAFSAASKADSCDDGHEQVPSLDADLFDVVAGAGWPGKRGSAWSGVGALGFDKVPASVVVVPTAAKQQQGCVRERTWDSDSDSDVFAVPELPQPPQAKKARPAPAPAPTFWCF

SEQ ID NO: 9347 - protein, 180 aa, Zea mays
  Clone ID: TF_LIB4741-061-R1-K1-E4.pep
MKIQCNACGAAEARVLCCADEAPLCVACDEEVHAANKLAGKHQRVPLLTDAAVAAAAAAPAVPKCDICQEASGYFFCLEDRALLCRDCDVAIHTVNSFVSVHQRFLLTGVQVGLDPADPVPPIAEKHVNAAGGSVNQPVRHQPKRSPTVQFSVEGSASVPTKNVTNGDCSRQNFVPTARG

SEQ ID NO: 9348 - protein, 376 aa, Zea mays
  Clone ID: TF_ZmC460_8.pep
MKIQCDACEGAAATVVCCADEAALCARCDVEIHAANKLASKHQRLPLEALSASLPRCDVCVRVPMLIFLGGCWPACLHWKPRPTLGRSRPKGPCHWLSPPGRRAAAGRLEAPFPTGGMRIQCDACEAAAATVVCCADEAALCARCDVEIHAANKLASKHQRLPLGDAAALPASLPRCDVCQERPAFIFCVEDRALLCRDCDEPIHVPGTLSGNHQRYLATGIRVGFSSVCGASAEGLPPAPPKGSSKPAAVVSAPAAGTTTKTRTVKDALPQEVPSSPFLPPSGWAVEDLLELSDYESSDKKDSSLGLKELEWFEDIDLFHAHSPAKTAMAEFFASPQPVSNAGFYKANGARLFKKSRMEVPDDDDEDYFIVPDLG

SEQ ID NO: 9349 - protein, 375 aa, Zea mays
  unsure (1)..(375): unsure at all Xaa locations
  Clone ID: TF_ZmC3_1.pep
MKIQCNACGAAEARVLCCADEAALCVACDEEVHAANKLAGKHQRVPLLTDAAAAAAAAAPAVPKCDICQEASGYFFCLEDRALLCRDCDVAIHTVNSFVSVHQRFLLTGVQVGLDPADPVPPIAEKHVNAVGGSVNQPVRHQPRRSPTVQFSVEGSASVPTKNVTNGDCSRQNFVPTARAEVVDWTMNNSTIRSVESPPKYISEESPTLLQSSQTTTVFSNQINGNSDGAYHLSFSGGNVTDSLPDWPVDEFFSNSEYGPNFGFSENGSSKGDTAKLGGAGGSPQCRLAEGSVAEELLGQVPGLITDEYMGRVPENSWTVPEVPSPPTASGLNWHGNLCFPAYDSTMXVPEITSLQNSESHFTVPSSFKRRRREY

SEQ ID NO: 9350 - protein, 56 aa, Zea mays
  Clone ID: TF_ZmC3809_2.pep
MKVQCDVCAAEAASVFCCADEAALCEACDRRVHRANKLAGKHRRLSLLGPVAPSSL

SEQ ID NO: 9351 - protein, 202 aa, Zea mays
  unsure (1)..(202): unsure at all Xaa locations
  Clone ID: TF_LIB3597-024-Q1-K6-F4.pep
LQRTPGSNVEESSILETVTAVAAGKPLSCPNHDGNVMDFYCQSCETAMCRECTEGEHAEHPTVPLKDVVEQHKASLQVQLDAVNKRLPEIDSALQFISEIIHQLTNQKASIVDDIHSTFDELQKTLNVRKSVLLMELEVNYGLKHKVLQSQLDTLLEGQESIKSCSNFTAQALNHGTETEVXLVKKQMSEKLNELADQDFPL

SEQ ID NO: 9352 - protein, 101 aa, Zea mays
  Clone ID: TF_ZmC9242_2.pep
CHQYVQCEICGEKHLKKNIKRHLQSHDKVPSDGRMKCTFDGCEHFFSNKSNLTKHVKACHDQLKPFKCGIVGCGKAFTYKHVRDNHETSGAHVYMEVSCAT

SEQ ID NO: 9353 - protein, 206 aa, Zea mays
  unsure (1)..(206): unsure at all Xaa locations
  Clone ID: TF_ZmC205_12.pep
MFHHQQELLQAEAAAADRESSMSNLTSSASGGPNAAAAAAAPPAPAASGNNKRKRSLPGNPDPEAEVVALSPATLMATNRFVCEICGKGFQRDQNLQLHRRGHNLXPWKLKQRGTGKEAQXRKGVRVPPRPSCVHHDPARALGDLTGIKKHFFRKHGREXKWKCDKCSKKYAVXSDWKAHSKIWGTREYKCDCGTSFSRRDSFITH

SEQ ID NO: 9354 - protein, 122 aa, Zea mays
  Clone ID: TF_ZmC28550_1.pep
LRAGVPAASSPTRPLARNTPHQSVSDRYVCEICGQGFQRDQNLQMHRRRHKVPWKLLKREAGEAARKRVFLCPEPSCLHHDPSHALGDLVGIKKHFRRKHSGHRQWACVFSRIVWGSIAWLI

SEQ ID NO: 9355 - protein, 122 aa, Zea mays
  Clone ID: TF_LIB3279-048-P1-K1-E3.pep
MPPPHPTDAEAGPEQVAPTEAVPLAAAAPAPVKKKRNLPGTPDPDAEVIALSPGTLLATNRFVCEVCGKGFQRDQNLQLHRRGHNLPWRLRQRGPGAAPPRRRVYVCPEPGCVHHSPTRALG

SEQ ID NO: 9356 - protein, 427 aa, Zea mays
  Clone ID: TF_ZmC12456_1.pep
ASQSERWLPSPQAWLFQPSATAAMPHVLSFLHLHLPLNTAPLHSFRVHRTRHSHPHLSLRTRRASATAAAAEAENPSASADVEMVRGRDGVWTARSPTVVVLWDLDNKPPRGPPFPAATALIGAASLLGRVVSISAFANRHAFSHLPGWVTAERRARRALDRSERAGVVVPSVPYSCSVCGRRFPTRPDLTRHFRQLHERERNKKLSRLRSLKGKKRQKFRERFITGNTKYEDAARELLTPKVGYGLASELRRAGVHVRTVPDKPQAADHALKRQVKHSVACGVDWLVLVSDDSDFTDTVRNARAADLRTVVVGDGCRALGKVADIWLPWDRVENGEVDEEMLRSCTFSEYREDQGTERDGQFIGDWDAGDFDDVVDDIVGTRTSLLGATTMSAFADEDIADGIFGVELTGDNMFWSSDDEEEDDYL

SEQ ID NO: 9357 - protein, 135 aa, Zea mays
  Clone ID: TF_ZmC3270_1.pep
MKHPRDAGAMPLSLALSLGAGVAPGHGSSKRPRRAAGGGDGELVCKTCSRAFVSFQALGGHRTSHLRAGRHGLALGMPAPAPAKEAPPPATTHLCHVCGLGFQMGQALGGHMRRHREEAAATTAQAPPVLLQLFV

SEQ ID NO: 9358 - protein, 153 aa, Zea mays
  Clone ID: TF_LIB4745-008-Q1-K1-G3.pep
MASNSSAAFFGVRDGDQQDQIKPLISPQQQLAAALPGLAGGVSAASGQGAPPAQPPPKKKRTMPDPDAEVIALSPKTLMATNRFVCEVCNKGFQREQNLQLHRRGHNLPWKLKQKNPLQAQRRRVYLCPEPTCVHHDPARALGDLTGIKKHFC

SEQ ID NO: 9359 - protein, 125 aa, Zea mays
  unsure (1)..(125): unsure at all Xaa locations
  Clone ID: TF_LIB4757-036-R1-K1-A8.pep
MAAASSAHLFGLGDGQMQMQPQQQQAPPPPLVNNPAAPPPKKKRNQPGNPSNXPDAEVIALSPKTLMATNRFVCEVCNKGFQREQNLQLHRRGHNLPWKLKQKNPKETRRRVYLCPEPTCVHHDP

SEQ ID NO: 9360 - protein, 120 aa, Zea mays
  Clone ID: TF_ZmC205_25.pep
MASNSSAAFFGVRDGDQQDQIKPLISPQQQLAAALPGLAGGVPAASGQGAPPAQPPPKKKRTMPDPDAEVIALSPKTLMATNRFVCEVCNKGFQREQNLQLHRRGHNLPWKLKQKNPLQA

SEQ ID NO: 9361 - protein, 164 aa, Zea mays
  Clone ID: TF_LIB4729-120-A1-K1-D11.pep
MMASNSPAAAFFGVRDGDQQDHQIKPLISPQQQQQLAAALPSVASGQGAPTAAAQPPPKKKRTMPDPDAEVIALSPKTLMATNRFVCEVCSKGFQREQNLQLHRRGHNLPWKLKQKDPLQAQRRRVYLCPEPTCAHHDPARALGDLTGIKKHFSRQHGEKKWKR

SEQ ID NO: 9362 - protein, 187 aa, Zea mays
  unsure (1)..(187): unsure at all Xaa locations
  Clone ID: TF_ZmC205_22.pep
MMASNSPAAAFFGVRDGDQQDHQIKPLISPQQQQQLAAALPSVASGQGAPTAAAAQPPPKKKRTMPDPDAEVIALSPKTLMATNRFVCEVCSKGFQREQNLQLHRRGHNLPWKLKQKDPLQAQXRRVYLCPXEPTCAHHDPARALXELXTGIKKHFSRXHGRKKWKCDKCSKRYAVQXDWKGALQIC

SEQ ID NO: 9363 - protein, 112 aa, Zea mays
  Clone ID: TF_LIB3354-032-P1-K1-D5.pep
LCRDRWRRRRGRGGGGADPDAEVIALSPKTLLATNRFVCEICNKGFQRDQNLQLHRRGHNLPWKLRQRSGKEVRKRVYVCPEPSCVHHDPSRALGDLTGIKKHFCRKHGEKK

SEQ ID NO: 9364 - protein, 122 aa, Zea mays
  unsure (1)..(122): unsure at all Xaa locations
  Clone ID: TF_LIB3205-044-P1-N1-E8.pep
SWSSPRCWLPHTHLCTMCGKGFKRDSNVRMHMRGHDDEYKSSCDAGRAAEGCGPXQEPFKRRYSCPFAGCNRNNLLESLQPLKTILCVKFQYRRSLCXKIHTCVRCRANMLSIVPDLRTHKK

SEQ ID NO: 9365 - protein, 77 aa, Zea mays
  Clone ID: TF_701160730H1.pep
HDDYCDPTSTPLTLQLSTALYNNSSSIRSTINAKAKVHECSICGAEFSSGQALGGHMRKHRNFLSAPIIGQLILQWW

SEQ ID NO: 9366 - protein, 262 aa, Zea mays
  Clone ID: TF_LIB4602-001-R1-K1-A2.pep
GLPYSSANDGDDSALCFQDQIGSIMDKTNVHSISSLTFSSYSSDPNDVNERNLNKANVYQCQKCNLTFGDRTSYAQHHLAYHEMSVKRRRTGKFGEPVVGKDGKFECPICHKTFEEEPQYFGHVGSHARYEGLAPEAFLDKATSRRAANDSLAEIPFSLQELTESHGQNNKVSYGEKGFQHHNHSNKHGDNNLTAIDLFGTNYSDNFIRPNKTCGSPEEGPSCNDAPSVSRYTNCTGHADVIVSRRASISNNQSGSNINGLY

SEQ ID NO: 9367 - protein, 244 aa, Zea mays
  Clone ID: TF_ZmC205_19.pep
MPHPTDPEAGSEQKAPAVPYLAAAAPAPVKKKRNLPGTPDPDAEVIALSPGTLLATNRFVCEVCGKGFQRDQNLQLHRLGHNLPWRLRQRGPGAPPPRRRVYVCPEPACVHHSPARALGDLTGIKKHFCRKHGEKRWVGPPSAPRYAPAPEPLRQQPPPAPHHAEPRNEPDTNATEAVQFAPPPPPPPPPPQLQLPVLSQASVSAAANVSASSSSSSVAGTSQSLLAGMSRALVDGVSAAVRGP

SEQ ID NO: 9368 - protein, 148 aa, Zea mays
  Clone ID: TF_ZmC547521_1.pep
MDVVELDAARHGCKVCGKSFLSGRSLGGHMRSHISLGEAALEVHAADELTPVSSNGGRGCDGLVAYGLRENPRKTRRLSDFADEKDVGHGVECGKSWRSLFGHIRNHASGDRYHDVDDDEDEEEDEFSVEEGEAEEAEMVRPTEAPVA

SEQ ID NO: 9369 - protein, 311 aa, Zea mays
  Clone ID: TF_ZmC65823_1.pep
MDNHIHSQPAANLYYQFGMGTEQQYPPPFASPPSTNIPHMDWNPATMLDNLTFIEEKIQQVKDVIRTMVDNAGQVQTGELLAQKQKQQVVNADLTCLIVQLISTAGSLLPSLKNSSFLSHPHPAGHVDMANHVGPSSSLVPNAMTVSEDYEELFKGWTDGGIEVDDDGVLVEEQEITKDGDSLSYELLQLEEDEILAPHTHFCTICGKGFKRDANLRMHMRGHGDEYKSPAALAKPPRDPGAEQEPAKRRYSCPFAGCKRNKLHKSFQPLKTILCVKNHYRRSHCEKSHTCGRCHAKKFSIVADLRTHEKH

SEQ ID NO: 9370 - protein, 155 aa, Zea mays
  unsure (1)..(155): unsure at all Xaa locations
  Clone ID: TF_LIB3607-011-Q6-K6-H3.pep
MSGAAGREFTGGGGGGSSSSFSSVSNASPTEVEEEFLRYHTNPLLGGPTTEMRDDGGPSDQPPLTVKKKRSLPGTPDPSAEVIALSPRTLMATNRFVCEICHKGFQRDQNLQLHRRGHNLPWKLRQRGGPXGGADCGGPSRKQVYVCXEASCVHH

SEQ ID NO: 9371 - protein, 125 aa, Zea mays
  Clone ID: TF_ZmC975_1.pep
IAICLAALAGTRKFGLGREKDQHQHTKWCPTTTTTHAPSAQQELRFRCAVCGKAFATYQALGGHKSSHRKPTTPERYAAALGQAATTTAARGDHSDEITASSLSGSAASGGYHRCSIRRHGSEEL

SEQ ID NO: 9372 - protein, 257 aa, Zea mays
  Clone ID: TF_ZmC747_1.pep
IVSIENSGEKGAMEKADMCVASTSITNTDDTSLCIGIHSHDSIVECQDYAMQHTLYCEKHLPRFLKRARNGKSRLVSKDIFVNLLKGCTSRKDKICLHQACEFLYWFLRNNLSHQHTSLASEHMPQILAEVSKNPDVGEFLLKLISTEREKLANIWGFDTNRSKQIYSENKEGSLVLHKEGTNLSSGPKCKICAHQFSDDEALGLHWTTVHKKEARWLFRGYSCAACMESFTNKKVLERHVQDVHGAQYLQYSILVM

SEQ ID NO: 9373 - protein, 45 aa, Zea mays
  unsure (1)..(45): unsure at all Xaa locations
  Clone ID: TF_700432333H1.pep
EARSYDCEQCVQVFKPSPKLTKHQDNXTGEESYKCEECGKAFNLS

SEQ ID NO: 9374 - protein, 141 aa, Zea mays
  Clone ID: TF_LIB3607-020-Q1-N6-H2.pep
AAVETEAEAVLLQQEHDGQERAKRKRSRRRRDRDGLQPKEATTQEEYLALCLVMLATGRRDADAAAPPQDHACSVCGKAFPSYQALGGHKASHRAKPSPSPSPAAAAALAPEPGAGHGDRHDEKKPAPSFSLSAGSRPAVA

SEQ ID NO: 9375 - protein, 182 aa, Zea mays
  Clone ID: TF_ZmC287271_1.pep
SPRAAFVHPLRRSRSGRDGRQRRPRRPRRRGRHTASHGCATGGRQGAAQQEGQDAGAAAVPIAIAIAVAASSSGSGSAKQHHPRVHECSICGAEFGSGQALGGHMRRHRPLVPAAAASRDDLHAPRKEKSLLELDLNLPAPCNEADAPELTSPRFAFAVAEQPPAPLPFPPATPSALVDCHY

SEQ ID NO: 9376 - protein, 181 aa, Zea mays
  unsure (1)..(181): unsure at all Xaa locations
  Clone ID: TF_ZmC954085_1.pep
CAALTSLSTSPLLLGAPVAAFSPEPGLEPWKEALVRPPGSYSSSSNSGDWGWDLASDQSSPSTPSPPLPPEAAHFLFGEPTLRKRKSPAQVMFQCLWKSCGKVLSTASAMQRHIRLVHLGRQAEPDQSDGEEDFYYTELDVGVDTLTDGLSSLTPVSPTASIRLAFXRLELPELLEPLAPA

SEQ ID NO: 9377 - protein, 173 aa, Zea mays
  Clone ID: TF_20507554.pep
QRQEPLLGRNSHARPRAPDTGNRSKRGLGCSAPAICKLKDDSVPAPPKETTGTASAGEPCKRRASVSGSSDRCVKKPQCGAGSNKQLQRGGSSSSSGGSSIRAGMQLRRLSGCYECHMVVAGSASMRATTICPCPDCGEVFVRQESLQLHQSIRHAVSELGTDDTSRNIIEII

SEQ ID NO: 9378 - protein, 109 aa, Zea mays
  Clone ID: TF_LIB3088-019-Q1-K1-F8.pep
QKAAIRILLESVGGSGNLRDDVLVVGGDEEGGRGGCRRDQPIRCLRGLSMSFDEGMGAHVTGEGAGTGEAPGAELACVIRHVHRACAFRRSELGELSAGAQMVRRPTRP

SEQ ID NO: 9379 - protein, 91 aa, Zea mays
  Clone ID: TF_LIB3959-020-Q1-K6-D10.pep
ANPLRAVAIGFGCASFPRIPQDLASSGGKCSLFKWVREDGYRNSKDNPRVLDVEAPKPEPTTEILFLCSYENCGKTFVDVSALRKHASVHN

SEQ ID NO: 9380 - protein, 64 aa, Zea mays
  Clone ID: TF_ZmC172980_1.pep
MIRRHRRLRNAVMCESSMFLMSPSPSPSPPQPSRPPPEYKHFCRVCNKGFTCGSALGGHMRAHG

SEQ ID NO: 9381 - protein, 134 aa, Zea mays
  Clone ID: TF_LIB3151-023-Q1-K1-G2.pep
LPAALSIAPSRSLSSPFLLLPRARQAPKGASFLAMGKNTCKLCSRRFASSRALAGHMRSHYMAATKETAATATAAAAAAAATAQHHISSASSASTSIAIADEEVGSMMTASTNGLRENTKRTLGVADVRFSDRE

SEQ ID NO: 9382 - protein, 68 aa, Zea mays
  Clone ID: TF_LIB3245-338-Q1-K1-B10.pep
AVCLQNPGASAMNHSAIGEQHQPPKPAKVSATPPAPSAERPYVCPYDGCDKAYIHEYKLNLHLKKEHP

SEQ ID NO: 9383 - protein, 75 aa, Zea mays
  Clone ID: TF_LIB3245-075-P1-K1-A9.pep
SSSPAPGAGSSSSSPHSSLRGLSGCYECRAINVEPMSRRYPRPRELCACPQCGEVFTKADTLEHHQAINHAGLQF

SEQ ID NO: 9384 - protein, 159 aa, Zea mays
  Clone ID: TF_LIB4762-051-R1-K1-D5.pep
MNSSSATAMDQIGKYWGMWGARRSSSSSSSTIPISAWAAAYGGSSEPSWEEQAFARDAAEHLGGCVWPPRSYSCTFCQREFRSAQALGGHMNVHRRDRALLRLGGSSSPEDVHATTNDQPHPQQGDGDANTTTTTTYLPRIIKESKNKRFMPMPDHSVS

SEQ ID NO: 9385 - protein, 243 aa, Zea mays
  Clone ID: TF_ZmC32995_1.pep
MNSSSATAMDQIGKYWGMWGARRSSSSSTIPISAWAAAYGGSSEPSWEEQAFARDAAEHLGGCVWPPRSYSCTFCQREFRSAQALGGHMNVHRRDRALLRLGGSSSPEDVHATTNDQPHPQQGALLYRAAASNPSTTTPSTTAAAGTTAAGPAAAITIAGAGDGDANTTTTTTYLSRIIKESKNKRFMPMPDHSVAGMREDQAAAIDDHRHNEDGDSWRSASAAEKRRRLDHPLATAAALLIF

SEQ ID NO: 9386 - protein, 201 aa, Zea mays
  Clone ID: TF_ZmC32995_2.pep
MNSSSATAMDQIGKYWGMWGARRSSSSSSSTIPISAWAAAYGGSSEPSWEEQAFARDAAEHLGGCVWPPRSYSCTFCQREFRSAQALGGHMNVHRRDRALLRLGGSSSPEDVHATTNDQPHPQQGALLYRAAASNPSTTTPSTTAAGPAAAITIAGAGDGDANTTTTTTYLSRIIKESKNKRFMPMPDHSVAEMREIRRRP

SEQ ID NO: 9387 - protein, 112 aa, Zea mays
  Clone ID: TF_cC-zmle189065b10d1.pep
ALAQQSLSYYRLLQLAAGEREELDLELSLQPCSDLAAEAAPSGFFVCTYCDRKFYSSQALGGHQNAHKYERTLAKRRRENVDFMRAHGARQDDPYDAYGHHEMMRFTLVEAR

SEQ ID NO: 9388 - protein, 240 aa, Zea mays
  Clone ID: TF_ZmC29465_1.pep
GQLGGCVWPPRSYTCTFCRREFRSAQALGGHMNVHRRDRARLRQCAPPDHDQEPIAAPLPAPELADHQQQLLQLHGSPMTKAAVLFSGRPAAACCTHQQTYCNNNREGEGEDSPARYISTTTTIIKDSKSKVLISIPAATTATGSKKAATTIAIIGEEEEEEEEEEEIMVTGRRTKRRRLVHQPFYDLRRLPPASSSPNKGGVEDDDAKVPKLSSPSSLSHHLAGRQEEVDLELRLGTSC

SEQ ID NO: 9389 - protein, 258 aa, Zea mays
  Clone ID: TF_ZmC13146_2.pep
MHSYRAMHPYTHHSYQHHTAAVAPTKHGHGHGHGHGHGDEEDDQSMLLLSLWPPGHHHGNAAASSACSSPPICASATTTSMAAAASSPASYPWLTHQSLYNNAGCGGGSSSSSHSSFLFQEHQQEPGVSISLSIAPPCSNNAASSCGGGGFAAPPAAPSTVTTTVTPGGGQVPRQYWIPSAAEILVGSTQFSCAVCNKTFNRFNNMQMHMWGHGSQYRKGSESLRGAITVGTAPPASLMRLPCYCCAEGCRNNIEHPR

SEQ ID NO: 9390 - protein, 181 aa, Zea mays
  Clone ID: TF_ZmC53387_2.pep
MTHPRPDHEPSGEVSLALALSTDSSGSAGAPAAKRARRRGAAAATSGEGEFVCRTCSRAFTSFQALGGHRTSHLRGRHGLELGVGARALRQQHKHHQQAGGGGGGGGGGGGGGDREPQAQHECHVCGLGFEMGQALGGHMRRHREETTTGAADAWVWRADDALQRARGGAADPPVLLELFA

SEQ ID NO: 9391 - protein, 175 aa, Zea mays
  Clone ID: TF_ZM4161.C2.o1.fg.pep
MTHPRPDHEPAGEVSLALALSTDSSGGSAGAPAAKRARRRGAAAATSGEGEFVCRTCSRAFTSFQALGGHRTSHLRGRHGLELGVGARALSRQQHKHHQQAGDGGGGDREPLAQHECHVCGLGFEMGQALGGHMRRHREETTTGAADAWVWRADDALQRARGGAADPPVLLELFA

SEQ ID NO: 9392 - protein, 173 aa, Zea mays
  Clone ID: TF_ZmC53387_1.pep
MKHPRPTEQDVSLALSLSTDSSTTTSDSAGTPPAKRARARARRRGAVVATSGEGEFVCRTCSRAFPSFQALGGHRTSHLRAGRHGLDLGVVGARALKQHKQQAANANANGCEGGKQRHECNVCGLGFEMGQALGGHMRRHREEEMGAADAWVTLWRTEASRAADPPVLLELFA

SEQ ID NO: 9393 - protein, 468 aa, Zea mays
  Clone ID: TF_ZmC205_6.pep
MFHHQQELLQAEAAAADRESSMSNLTSSTSGGPNAAPAAAAAAPPAPAASGNNKRKRSLPGNPDPEAEVVALSPATLMATNRFVCEICGKGFQRDQNLQLHRRGHNLPWKLKQRGTGKEAQRRKVYVCPEASCVHHDPARALGDLTGIKKHFFRKHGEKKWKCDKCSKKYAVHSDWKAHSKICGTREYKCDCGTIFSRRDSFITHRAFCDALTEESAKAIGLNAMAAVPAQHHHHPMLFSPPPTHVMQQDVALLQEHHHQEVMQQEHCNYAMKTEMPPWPGMTYDHPLLQPLCNAAAPQSSATSTPPPPTTMQLPAAYAHLSATALLQKAAQMGATVAGAGYTQMAGAATSATFGLGLPDLQNTQQQQHQDGEIMAGLARTASHGRGGEEGGGGGGDGMTRDFLGLRAFSHRDILGLAGLDSSCMGAIISASASMNCYDEPQQRAQAQAEQQQQSSNEQWHSMGSHQS

SEQ ID NO: 9394 - protein, 115 aa, Zea mays
  Clone ID: TF_ZmC7589_1.pep
ASRWGRCCDLCLVVFKTEAELAVHKKNMCTVSSCSRHFRSHRYLRRHQSAHNDDMPYKCPWDGCNMAFKWSWDRAEHFKVHAGAKPYKCTTPGCSKIFKFVSDFTRHRRRCKPQR

SEQ ID NO: 9395 - protein, 286 aa, Zea mays
  Clone ID: TF_ZmC342_1.pep
MGKKISTKKQKNDKTNRQFQENHKKADIVDLLHEDDGDEGTYIDCNEIRKQKTDDVRVKSRGKMQSGKKKVSRCQASDGSHNGGKEMKLSSDIEVCNRRGDGTTAANFEEIPKEKADAVKVKPKMQGDKKKTSKHQAGDGDKGAKFSCDIEGCDMSFSTQHDLSLHKRDICPVKGCKKKFFCHKYLLQHRKVHLDERPLMCSFPGCAKTFKWPWARTEHMRVHTGVRPYACTEPGCTQTFRFVSDFSRHKRKTGTRVTRKRNAAFDCSCTSTGFFSDGERSEGDGC

SEQ ID NO: 9396 - protein, 278 aa, Zea mays
  Clone ID: TF_ZmC97_2.pep
SLPCAVTSMELLHAVIHGAATTTTTTTTTTTSSSATVTSGDEGAHLPQGWAKKKRSRRQRSEEENLALCLLMLSRGDRHRVQAPPPPVPSAEFRCSVCGKSFGSYQALGGHKTSHRVKLPTPPAAHVQLPAPPAVALLVEAPAPPPVTATPPPLPLVAVAVAVREPATSSTSDGAAASRVHRCSICHKEFPTGQALGGHKRKHYDGGVGSAAASTEVPGAPAETSPEVGSSPARAFDLNLPAVPEFVFRCGKPGKMWEEDEEVQSPLAFKKPRPLMTA

SEQ ID NO: 9397 - protein, 176 aa, Zea mays
  Clone ID: TF_LIB4743-089-Q1-K1-F8.pep
MAAASSAHLFGLGDGQMQMQPQQQQQAPPPPLVNNPAAAEPPPKKKRNQPDPDAEVIALSPKTLMATNRFVCEVCNKGFQREQNLQLHRRGHNLPWKLKQKNPKETRRRVYLCPEPTCVHHDPSRALGDLTGIKKHYCRKHGEKKWRCDKCNKRYAVQSDWKAHSKTCGTREYRCD

SEQ ID NO: 9398 - protein, 433 aa, Zea mays
  Clone ID: TF_ZmC205_5.pep
MQMMMLSDLSSDDHEATGSSSYGGDMASYALSPLFLAPAASATAPLPPPPQPPAEELTNKQAAGGGKRKRSQPGNPDPGAEVIALSPRTLVATNRFVCEICNKGFQRDQNLQLHRRGHNLPWKLRQRSSLVAPSSAAAGSGGRQQQQGEAAPPRKRVYVCPEPTCVHHDPARALGDLTGIKKHFSRKHGEKRWCCERCGKRYAVQSDWKAHVKGCGTREYRCDCGILFSRKDSLLTHRAFCDALAEESARLLAAAANNGSTITTTTSSSNNNDLLNASNNITPLFLPFASSPPPVVVAAAQNPNNTLFFLHQELSPFLQPRVTMQQQPSPYLDLHMHVDASIVTTTGGLADGTPVSFGLALDGSVATVGHRRLTRDFLGVDGGGRQVEELQLPLCATAAAAGASRTASCATDLTRQCLGGRLPPVNETWSHNF

SEQ ID NO: 9399 - protein, 173 aa, Zea mays
  unsure (1)..(173): unsure at all Xaa locations
  Clone ID: TF_LIB4172-014-Q1-L1-E2.pep
MMSDELTVLEPSASESREFHEDRLAQLLGNPDKQSLESPSSQDGGFTQMTVTHWKIQTGDTAQTCSKSGRNPILNSNLLILQRELIDAEARSCGGGGKGFPFNSDVVPHQISHTGEKPYKCDHCGKGFSQTSLLTEHQRVHTGDRLCVCHVCGXDFVHYASLREHQHVHTXEK

SEQ ID NO: 9400 - protein, 142 aa, Zea mays
  Clone ID: TF_ZmC13442_1.pep
TVTGGTSVGKKDVSYVLFVIKLLKERTTYRSTCYPLVIKYQVSVVFLDGPMAGALPLGQKVIPFFFCYVFVLNQIFDIFLLFLVKPPFLCVCGRKYHHLGNLTRHKKFECGQEKRFVCSTCGKAFKRKDQLTAHSIQHYPHQ

SEQ ID NO: 9401 - protein, 240 aa, Zea mays
  Clone ID: TF_ZmC205_16.pep
MAAASSAHLFGLGDGQMQMQIQQQQQAPPPPLVNNPAAPPPKKKRNQPGNPNPDAEVIALSPKTLMATNRFVCEVCNKGFQREQNLQLHRRGHNLPWKPKQKNPKETRRRVYLCPEPTCVHHDPSRALGDLTGIKKHYCRKHGEKKWKCDKCNKRYAVQSDWKAHSKTCGTREYRCDCGTLFSRRDSFITHRAFCDALAQESARVPPMGAGMYGTGGMALGLSGMATSQLQSFQDQTHSS

SEQ ID NO: 9402 - protein, 542 aa, Zea mays
  Clone ID: TF_ZmC205_4.pep
MAAASSAHLFGLGDGQMQMQPQQQQAPPPPLVNNPAAPPPKKKRNQPADPDAEVIALSPKTLMATNRFVCEVCNKGFQREQNLQLHRRGHNLPWKLKQKNPKETRRRVYLCPEPTCVHHDPSRALGDLTGIKKHYCRKHGEKKWKCDKCNKRYAVQSDWKAHSKTCGTREYRCDCGTLFSRRDSFITHRAFCDALAQESARVPPMGAGMYGTGGMALGLSGMATSQLQSFQDQTHSSATTAISSNPAAQFEHLMQSSTGSPVFRGAQPTSSSSSPFYLGGAEDGHQSLSGHTSLLHGNKQAYHGLMLLPEQQHQAGSNGLLNLGFFSGGSSGQDARLVFPDQFNGAVGGNVRGDGSEHGHSGANTESAAIFSGNLMGNHQMASSAGFSSSLYNSSETVAPAQMSATALLQKAAQMGATTSSGNVNSLLRGLGSSAGGTLNGRPAGAAAGFMAGEGSSSRSTSQAENESQFRDLMNTLAASGSGAAGTAFSGGFPGMDDSKLSTRDFLGVGGGVVRSMGGAAGLPLRHGAAGIGMGSLDTEMK

SEQ ID NO: 9403 - protein, 178 aa, Zea mays
  Clone ID: TF_LIB3597-024-Q1-K6-C9.pep
MERAVEPWGPDLQGAEEREQLRSARTGIGSENVEISQPDEFEHTPQEDDLGFKEEEDLAPGHEVGNASLKPEGIQTWDDLWVQREVPGKPQARDGGPRLLGEPRWGQASDRAAVCGECGKSFRQMSDLVKHQRTHTGEKPYKCAVCGKGFGDSSARIKHQRTHSGEKPYRARPPAQGP

SEQ ID NO: 9404 - protein, 95 aa, Zea mays
  unsure (1)..(95): unsure at all Xaa locations
  Clone ID: TF_700447294H1.pep
TIHNGDEPYACKDCGRXFIRGSVLMQHQRIQAGDKAYKCEECGNAFIRGSQLTQHQRIHTNEKPYECKECGKMFSHGSQLTQHQRIHTGEKPYQC

SEQ ID NO: 9405 - protein, 539 aa, Zea mays
  Clone ID: TF_ZmC205_3.pep
MEVEATPTTAVSSSGVAAQLPPPGPPAKKKRALPGMPDPDAEVIALSPKTLLATNRFVCEICNKGFQRDQNLQLHRRGHNLPWKLRQRSGKEVRKRVYVCPEPSCVHHDPSRALGDLTGIKKHFCRKHGEKKWKCDKCSKKYAVQSDWKAHVKTCGSREYRCDCGTLFSRRDSFITHRAFCDALAEESAKARAEAPSAEDGSSAAAVVPPPAPPPAPAPLRQQPPPPAPHHAEPRNETDTNATEAVQFAPPPPPPPPPPPPPPPQLQVPVLSQASVSAAANVGASSSSSSVAGTSQSLLGGMFAPSSMASAPQYADLGGRPERAHPAKPPPLCLATDASSSIFSAAPAVTAERQQFAPPPPSPSPSAHMSATALLQKAAQMGATSSSSSFLRGLGLDVSSSSPGASSSGQQHQHQEAMRVSLPDASLQQWPPRLELEPAPMLSAGLGLGLPYDSTGAQVSLPELMMGQSSLFSGKPATLDFLGLGMSPSGASAGRGLPAFVQPIGGMAGTGAGAAETFGAGRGAQATPWERNPSSSPIL

SEQ ID NO: 9406 - protein, 256 aa, Zea mays
  Clone ID: TF_ZM4398.C6.o1.fg.pep
MALLVKSHHQMLVSSSTSSSSPSASQQRQPPPPPPSSSCLTEQQPSPAKRKRRPPGTPDPDAEVVALSPRTLLESDRYVCEICGQGFQREQNLQMHRRRHKVPWRLVKRAPPPPAAAAGGGGGAADANNSSGTGGGAGGGAPRKRVFVCPEPSCLHHDPAHALGDLVGIKKHFRRKHGGRRQWVCARCAKGYAVQSDYKAHLKTCGTRGHSCDCGRVFSRVESFIEHQDACNSSRMRGEAVVVAVPVPVPPPSALP

SEQ ID NO: 9407 - protein, 518 aa, Zea mays
  Clone ID: TF_ZmC1295_1.pep
MEGGMSSLEAAMKASSSMASSMARNADPNQQTLRPNLVEQFYFPRPGQSLPGIPPFFGPPSSLYLPNDNEAKFGNNFESNPSQNTDWNPQAIVSNLTFLEQKIKQVKDIVQSMSNRENQVAGGSCEVAAKQQLITADLTSIIIQLISTAGSLLPSMKNPLLSSNPAVRQLGNTLGSPTGFGMNANQRPSVDSKTDIPDTGKTSDYDELMNSLNPTQAERDEMIKCPNPCGGEGSEPTPMEDHDVKESDDGGEGENLPPGSYVVLQLEKEEILAPHTHFCLICGKGFKRDANLRMHMRGHGDEYKTPAALAKPTKDSGADHAPVTRYSCPFVGCKRNKEHKKFQPLKTILCVKNHYKRSHCDKSYTCSRCNTKKFSVIADLKTHEKHCGRDKWLCSCGTTFSRKDKLFGHVALFQGHTPALPMEDVKVSEASEQPQDSEPMNEMARSNVYSFPCSSSDGISNLDMKMADDVRGYFSPLNFDPCFGALDDFTRPGFDISENPFSFLPSGSCSYGQQNGDS

SEQ ID NO: 9408 - protein, 236 aa, Zea mays
  Clone ID: TF_ZmC205_8.pep
MASNSSAAFFGVRDGDQQDQIKPLISPQQQLAAALPGLAGGVPAASGQGAPPAQPPPKKKRTMPDPDAEVIALSPKTLMATNRFVCEVCNKGFQREQNLQLHRRGHNLPWKLKQKNPLQAQRRRVYLCPEPTCVHHDPARALGDLTGIKKHFCRKHGEKKWKCDKCSKRYAVQSDWKAHSKICGTREYRCDCGTLFSRRDSFITHRAFCDALAQESARLPPTSLSSLTSHYGATST

SEQ ID NO: 9409 - protein, 313 aa, Zea mays
  Clone ID: TF_ZmC1140_2.pep
SIGSQRTPKCDKALNGLVSGLGDHPEKLHQACLVHAFLKRPFSCTVDGCPFSYSRKDHLNRHLLTHEGKLFVCPVEGCGRKFNIKGNMQRHVQEIHKDVSPCESKKEFICPKVNCGKAFKYASKLKKHEESHVQLEYTEVMCCEPGCMKFFSNMECLKAHNQSCHQYVQCDICGTKQLKKNFQRHHRMHEGSCVTERVKCHIEDCKCSFSKKSNLDKHVKAVHEQRRPFVCQFSGCGKRFSYKHVRDNHEKSSAHVHTEGDFVEADEQRPRSVGGCKRKPVSVESLMRKRVAAPDDGPAHADATEYLRWLLSV

SEQ ID NO: 9410 - protein, 251 aa, Zea mays
  unsure (1)..(251): unsure at all Xaa locations
  Clone ID: TF_ZmC104_51.pep
MVVRSSSRIANRKSKMEEEDNGSANPPKPKAEGDKDNPAGRSRAKSPRQKTKADTKKKTKETRAEKRRAPSPASQKDEEEQAYDAEGCSITKQRLSLRKKGAKTEEKQQTEESRYRGRAPPSSPERKEEYASDIEGCSMSFGTKQALSLHKNDICPEKGCCRKFFSHKYLLQHRKVHADDRPXKCPWKGCSMAFKWPWARIEHMRVHTGDRPYVCLEPGCGQTFRFVSDFSRHKRRTCVQRRKQRSKAKQQ

SEQ ID NO: 9411 - protein, 522 aa, Zea mays
  Clone ID: TF_ZmC205_2.pep
MRPRGTSLQQSSASALGDGDAALPKKKRNRPGNPKPDAEVIALSPRTLLATNRFVCEVCSKGFQRDQNLQLHLRGHNMPWKLKQKDPKDARRRVYLCPEPTCVHHSPSRALGDLTGIKKHYCRKHGEKKFRCDRCSKRYAVESDWKAHGKTCGAREYRCHCNALFSRKDNFITHRATCDAAVRGTAQKPPLVAGLYVGSGSDDRLGLSDAAAQMHGFADQGQSSSAAEASQFDHVMPSYSGSSMFRSQASDFSLSFFLGGGTPLIEQDLSDNGGDLSEGSQGPLLHGKAPLHGVMTHLPEQQYQPNSGNANVNLLDIGFFSGNSGGTNARVNLPNLGVFSGNSGGWPGSSHQDARLVIQDQLNGGSSSNTEHGNGMASIGSHFGGGFVPSLHNSSPSAGLSATALLMKAAQMGSTTSSTTHNPNGPSALLRAAGFAGTASVRETSSRAAEEEKSHEAYFHDLIMNSLPLTGGGTGGLSGLAGVDDGNVSTRDFLGVGRDDATAPQGLHGMGAPNPTQMKWYM

SEQ ID NO: 9412 - protein, 269 aa, Zea mays
  unsure (1)..(269): unsure at all Xaa locations
  Clone ID: TF_ZmC3754_1.pep
MGAESATPEPNSEVLFLCSYEGCGKTFFDAGALRKHAHVHGERQYICHYENCGKKFLDSSKLKRHFLIHTGEKNFVCPHEGCGKAFSLDFNLKAHMKTHSADNYHVCQYPECGRRFTQESKLRAHIRAQHEKAVGLQNPGASSMNHSAIGGPHQPPKPAKVSAAPPAPSAERPYVCPYDGCDKAYIHEYKLNLHLKKEHPNHYQDGGPNGAAAPSKRSISKSSHRSKLDITSRMPPANIPKHRGYATPLPAVVSLPEEQQLXKESGVRG

SEQ ID NO: 9413 - protein, 136 aa, Zea mays
  Clone ID: TF_jC-zmX700083408a1.pep
HCRHKKDLMDISAASKVTKMKRNIFECKIDYCHMTFKPKAEHAAHKKNMCTVNSCSKHFRSHSYLRRHESAHNDDMPYKCPWDGCNMAFKWSWDRAEHFKVHAGAKPYKCMTPGCSKMFKFVSDFTRHRRRCKPQR

SEQ ID NO: 9414 - protein, 382 aa, Zea mays
  Clone ID: TF_ZmC13313_1.pep
MEYPATAAGSGSHKYYYPQQHSHSQPQALRRPPRPAARWVKQWIPQDLASSGGKCSLFKWVREDGYRNSKDNPRVLDVEAPKPEPTTEILFLCSYENCGKTFVDVSALRKHASVHNEKQYICNEPNCGKKFVDSSKLKRHYLTHTGQKDFVCPHPGCGKAFSLDFNLRSHLKTHALENYHICPFPACGKRFTSDFKLGAHVKSHEKTGTPIAVQHAPAPPAEKPRVAPKPPTPATTSYADRPYVCPYEGCDKAYIHSYKLNLHLKTQHPEHGQEENGKVGASGGQHAANEHTYQYNYAEVGEIAPNPKRSKTNHGHKVHSSKAYNAKVSRAMPSDIGVRNQWPGKATYQDDSEETEEDGGNNIEDGWRYGNNDDDEETPDED

SEQ ID NO: 9415 - protein, 95 aa, Zea mays
  Clone ID: TF_700017019H1.pep
TDSNVCRVCKESFSTNMLLIEHAKLHEEDPYICKYCDYKTVIFENLSQHIADTHFSDHLYWCEQCDVQFSSSSELYLHFQEHSCDEQYLCQFCEH

SEQ ID NO: 9416 - protein, 212 aa, Zea mays
  Clone ID: TF_ZmC22728_1.pep
MKRFAVQESEMARMLVLMSRSHGQDQALPLSACLAGGQQGEDRQAPERVFVCKTCNRVFPSFQALGGHRASHKKPRLDGDGGGDPSLAKPKLHGCSVCGLEFAIGQALGGHMRRHRAMTGGVPAVPPATTRIVVDEKPDGDVVGIIRHDHVHDHGGVKQPRGGLWLDLNYPPCDDGRDAVEAECGRNAAAATGITFHQFLDTATMAVDCLGY

SEQ ID NO: 9417 - protein, 184 aa, Zea mays
  Clone ID: TF_ZmC119244_1.pep
MVMTLTRHDSGESKEMEGLRAHSEAALLTLSSTTTGGTGTGTGTGTAAAAEGAFECKTCSKRFPSFQALGGHRTSHTRLQARTLVGDPAERYDDRPAARVHECAVCGLEFSMGQALGGHMRRHRGEGPPPPAAHDDDGDGPAQPDRDMPDLNLPPLDDDDGSQAGSRQSGGGRGSGPQLLNLLV

SEQ ID NO: 9418 - protein, 203 aa, Zea mays
  Clone ID: TF_LIB4756-101-R1-K1-A3.pep
RGRPGLSTNAPAQYRQSANNMSSMVDQTPEFPAHMTSMESSASEAEPPNGSQNSVLSDRYMSKPASTGAESGTYSCTYHGCSQRFETPQKLQKHKREGHRSANLSTAMTSAAILERNSQAGPHKCERINPTTGKPCNTVFSRPYDLTRHEDTIHNARKQKVRCALCVEEKTFSRNDALTRHMRVVHPEVDFPGKHRRRGGNHD

SEQ ID NO: 9419 - protein, 93 aa, Zea mays
  Clone ID: TF_700346018H1.pep
QRVHTGERPYVCKECGKSFTKCSTLQTHQKIHTGAKPYKCRECNKSFTQDSHLRTHQRVHTGERPYICKECGKSFTRCSYLRAHQKNHTGRER

SEQ ID NO: 9420 - protein, 330 aa, Zea mays
  Clone ID: TF_ZmC97_1.pep
LPQGGLGRSGPDRPPRTVSPQRARARRPSNHRENKSQPNSPVSQRSLSLHYSTMSSMELLHAVVPEKQSEEEVAPAATTTSSSATATGGDEGAHVLQGWAKRKRSRRQRSEEENLALCLLMLSRGGHHRVQAPPTPVPSAAPAAAEFRCSVCGKSFSSYQALGGHKTSHRVKLPTPPPPPPPAVTVPAAVPVPEAPAPTTVVVPPLPPVEVGREPATSSTAASSDGAASSRVHRCSICHKEFPTGQALGGHKRKHYDGGVGSAAASTDVPAAPAETSAEVGSSAARAFDLNLPAVPEFVFRCGKPGKMWEEDEEVQSPLAFKKPRLLMTA

SEQ ID NO: 9421 - protein, 202 aa, Zea mays
  unsure (1)..(202): unsure at all Xaa locations
  Clone ID: TF_ZmC3585_1.pep
LFNKPRSRAVTDRXAITHDDYVSLCLMALAAAGGGGGHAAAASARTTTMTTQECELRFRCSVCGKAFASHQALGGHKASHRKPPPTLVQAASSSSSVTTNTSSAGGSGAGQGRHRCSVCHRGFATGQALGGHKRCHYWDGLSVSLTASAASGSASSLRGFDLNLVPAAGAARWREEEEVQSPLPVKKRRLSSGPSTELSLTI

SEQ ID NO: 9422 - protein, 450 aa, Zea mays
  Clone ID: TF_ZmC1140_1.pep
MGEGTESGGGATTAPPLRYIRCYKCGFCDVVRSKKCLLRAHVLEHHKDEVDALGGYWEGGDAGPRKEISRACEQCGMSFKKQAHLKQHMQSHSLERPFSCTVDGCPFSYSRKDHLNRHLLTHEGKLFVCPVEGCGRKFNIKGNMQRHVQEIHKDVSPCESKKEFICPKVNCGKAFKYASKLKKHEESHVQLEYTEVMCCEPGCMKFFSNMECLKAHNQSCHQYVQCDICGTKQLKKNFQRHHRMHEGSCVTERVKCHIEDCKCSFSKKSNLDKHVKAVHEQRRPFVCQFSGCGKRFSYKHVRDNHEKSSAHVHTEGDFVEADEQRPRSVGGCKRKPVSVESLMRKRVAAPDDGPAHADATEYLRWLLSKYRSLDLNYKGNMLYWQDLEFLIVQNHSTLHSDLQMHVTKKDNLQMHHEPVAPDARQQLAPVQLAPESLQADQLRRPADRLD

SEQ ID NO: 9423 - protein, 47 aa, Zea mays
  Clone ID: TF_700582866H1.pep
SHERSHTGEKPFVCTECGKAFSYYSSFHRHRRTHQTVTLNTELEKTS

SEQ ID NO: 9424 - protein, 285 aa, Zea mays
  unsure (1)..(285): unsure at all Xaa locations
  Clone ID: TF_ZmC3754_2.pep
DRLAALKAKDKKHGAESATPEPNSEVLFLCSYEGCGKTFFDAGALRKHAHVHGERQYICHYENCGKKFLDSSKLKRHFLIHTGEKNFVCPHEGCGKAFSLDFNLKAHTXTLSADNYHVCQYPECGRRFTQESKLRAHIRAQHEKAVCLQNPGASAMNHSAIGEQHQPPKPAKVSATPPAPSAERPYVCPYDGCDKAYIHEYKLNLHLKKEHPNHYQDGGPQGAAPSKRSISKSSHRSRPDITARMPPAKVSKRKGGYAAPSPAVNLPEEHLPEEQQXAKESDVRG

SEQ ID NO: 9425 - protein, 196 aa, Zea mays
  Clone ID: TF_ZmC205_15.pep
MMASNSPAAAFFGVRDGDQQDHQIKPLISPQQQQQLAAALPSVASGQGAPTAAAQPPPKKKRTMPDPDAEVIALSPKTLMATNRFVCEVCSKGFQREQNLQLHRRGHNLPWKLKQKDPLQAQRRRVYLCPEPTCAHHDPARALGDLTGIKKHFSRKHGEKKWKCDKCSKRYAVQSDWKAHSQICGTREYRCDCGTL

SEQ ID NO: 9426 - protein, 175 aa, Zea mays
  Clone ID: TF_ZmC205_10.pep
MAAASSAHGLFGLGDGQMQMQIQQQQQAPPPPLVNNPAAPPPKKKRNQPDPDAEVIALSPKTLMATNRFVCEVCNKGFQREQNLQLHRRGHNLPWKLKQKNPKETRRRVYLCPEPTCVHHDPSRALGDLTGIKKHYCRKHGEKKWKCDKCNKRYAVQSDWKAHSKTCGTREYRCD

SEQ ID NO: 9427 - protein, 181 aa, Zea mays
  Clone ID: TF_ZmC205_14.pep
MAAASSAHGLFGLGDGQMQMQIQQQQQAPPPPLVNNPAAPPPKKKRNQPADPDAEVIALSPKTLMATNRFVCEVCNKGFQREQNLQLHRRGHNLPWKLKQKNPKETRRRVYLCPEPTCVHHDPSRALGDLTGIKKHYCRKHGEKKWKCDKCNKRYAVQSDWKAHSKTCGTREYRCDCGTLF

SEQ ID NO: 9428 - protein, 236 aa, Zea mays
  Clone ID: TF_ZM4183.C11.o1.fg.pep
MALLVKSHHQMLVSSSTSSSSPSASQQRQPPPPPPSSSCLTEQQPSPAKRKRRPPGTPDPDAEVVALSPRTLLESDRYVCEICGQGFQREQNLQMHRRRHKVPWRLVKRAPPPPAAAAGGGGGAADANNSSGTGGGAGGGAPRKRVFVCPEPSCLHHDPAHALGDLVGIKKHFRRKHGGRRQWVCARCAKGYAVQSDYKAHLKTCGTRGHSCDCGRVFSRHSKVQWDMIVTGGGLR

SEQ ID NO: 9429 - protein, 349 aa, Zea mays
  Clone ID: TF_ZmC7489_1.pep
MHSADRQCLDSADVPASTQPLSVSPVLMSDEQHVDDAHSAVKAIEHLGNNLANIKQKSLHMDVLMLEDAQVASMAAVPGHEGESVDAGSNSFDILLGALAEESKAADAPGKDEVGKASLTLITLASNEPSVTEGRVVDVVETDTILGAGKDDKQVDQAHDFHLSDLVSRCIGSSNRSDIICYVRRKHKRKRDYSCFVRSPCERLRPRSKPAVVEESEWSRTAEASFAKRGKRTQAVGSFQCDIDLCGMAFETRAELNAHKRNICTDESCGKRFSSHKYLKRHQCVHSEMRPFKCPWEGCKMTFKWLWAQTEHVRVHTGERPYKCSAPDCGQTFRYVSDYSRHRKKFNHY

SEQ ID NO: 9430 - protein, 141 aa, Zea mays
  Clone ID: TF_ZmC3270_2.pep
MKHPRDAGAVPLSLALSLGGGGGVATKHGISKKPRRAAGGEFVCKTCSRAFGSFQALGGHRTSHLRARHGLALGVPAAAPAKEDTATKPAAAEPAPASHLCHVCGLGFDMGQALGGHMRRHREEAAAAAAQAPPVLLQLFV

SEQ ID NO: 9431 - protein, 135 aa, Zea mays
  Clone ID: TF_LIB3068-001-Q1-K1-C7.pep
KTFYRNSQLVFHQRTHSRETYFQCPTCQKAFLRSSSFMKHQRIHTGEKPCKCDYCGKGFSDFSGLRYHKKIHTGEKPYKCPVCEKSFIQRSNFNRHQRVHTGEKPYKCTRCGKSFSWSSSLDKHQRSHLGKKPRP

SEQ ID NO: 9432 - protein, 238 aa, Zea mays
  unsure (1)..(238): unsure at all Xaa locations
  Clone ID: TF_LIB4172-013-Q1-L1-F9.pep
ACGFGPEFPGRPTRPNLIYVSECDKCFTQPSHLSIHRRIHSGEKPYKCSECDKCFTDKGSLRVHQRIHTGEKPYKCSECDKCFTDKSSLRVHHRIHAGEKPYKCSECDKCFTGKGYLRVHHRIHAGEKPYKCSECDKCFTHKGSLRVHHRIHAEEKPYKCSECDKCFTDKNGLRTHQRIHTGEKPYKCXECDKCSTRXSHLSIHQRIXTGEKLYKCSECDXCFTQHCHLSIHTIHSGE

SEQ ID NO: 9433 - protein, 260 aa, Zea mays
  Clone ID: TF_700220213_FLI.pep
PSPAPVREIPVVAASAQEQPLEAAKDDGGYEVVELDAAELLAEHVHFCEICGKGFRRDANLRMHMRAHGDRFKTLDALSRPGHGQPKPPVGSNVRFSCPFAGCNRNRTHRRFRPLKSAVCARNHFRRSHCPKLYACERCGGKKRFAVLADLRSHLRHCGEEAQWRCSCGTTFSRKDKLFGHLALFEGHTPAVTKPNKDVVTGPTESTIDAMEEGGFEEGIPDREEDEEGGYDPEFFKEWMDELRGGAGGSNWPGPAADGH

SEQ ID NO: 9434 - protein, 388 aa, Zea mays
  Clone ID: TF_ZmC587_1.pep
MDSTRSNQVAGRCSSTIASRAATVPPSLTMPRGELADAIVGGGGGGGADGDPRAALLRLSALGDRMAAVRGRISASISGEARPLSYADIQSVSSEISAAAQLVVLNAAELLASSVPFPAPPPPPPSAAPSPAPVREIPVVAASAQEQPLEAAKDDGGYEVVELDAAELLAEHVHFCEICGKGFRRDANLRMHMRAHGDRFKTLDALSRPGHGQPKPPVGSNVRFSCPFAGCNRNRTHRRFRPLKSAVCARNHFRRSHCPKLYACERCGGKKRFAVLADLRSHLRHCGEEAQWRCSCGTTFSRKDKLFGHLALFEGHTPAVNKPNKDVVTGPTESTIDAMEEGGFEEGIPDREEDEEGGYDPEFFKEWMDELRGGAGGSNWPGPAADGH

SEQ ID NO: 9435 - protein, 88 aa, Zea mays
  Clone ID: TF_700352188H1.pep
GKHFSAYSSLIYHQRFHTGEKPYKCNDCGKAFSDGSILIRHRRTHTGEKPFECKECGKGFTQSSNLIQHQRIHTGEKPYKCNECEKAF

SEQ ID NO: 9436 - protein, 324 aa, Zea mays
  unsure (1)..(324): unsure at all Xaa locations
  Clone ID: TF_ZmC205_27.pep
MFHHQQELLQAEAAAADRESSMSNNLTSSAPGGPNAAPAAAAATGNNNKRKRSLPGNPDPEAEVVALSPATLMATNRFLCEICGKGFQRDQNLQLHRRGHNLPWKLKQRGAGKEAQRKKVYVCPEASCVHHDPARALGDLTGIKKHFFRKHGEKKWKCDKCSKRYAVHSDWKAHSKICGTREXRCRGPCALSRRDSFITHRAFCDALAEESAKARAEAPSAEDGSSAAAVVPPPAPPIAPAPAPLRQQPPPPAPQHAEPRNEPDTNATEAVQFAPPTPPPPSTSQLQLPVLSQASVSAAANVSASSSSSSVAGTSQSLLGGMFA

SEQ ID NO: 9437 - protein, 374 aa, Zea mays
  Clone ID: TF_ZmC9242_1.pep
MCSEVHVEGDASVGQKGCKDIRRYKCEFCTVVRSKKCLIQAHMVAHHKDELDKSEIYNSDGEKIVHEQEHRCQECGCCFQKPAHLKQHMQSHSHERLFICPLEDCPFSYKRKDHLNRHMLKHEGKLFSCTLDGCDMRFSMKADMQRHVKEIHDSKNPHQFVCKEDGCNKVFRYSSKLKKHEESHVKLDYVEVVCCEPGCMKMFRNVEYLRAHNQSCHQYVQCEICGEKHLKKNIKRHLQSHDKVPSDGRMKCTFDGCEHFFSNKSNLTKHVKACHDQLKPFKCGIVGCGKAFTYKHVRDNHETSGAHVYMEGDFEELDEQLRARPRGGRKRKALTVETLTRKRVTISGEASSLDDGVEYLRWLLSGGDDSIDCQ

SEQ ID NO: 9438 - protein, 453 aa, Zea mays
  Clone ID: TF_ZmC13146_1.pep
MEDPYTSFLKNPHYYYCTSSFPAPPPTPHLPPPFPPYAALYPAVAAAATAAPHHQYPSFFQHQPAQPAHHYSTAPPSPPLREALPLLSLSPTPAARPRAAQQHDVADTDSDDDDNDCCYHLQQEVAAGSRTTSARTPLFADLNCVPSCCDDGDGDPMDVEASWSTSTDDAAVALRIGLPAAEADLLSGLSGRAAEEDEEEEDDCKPGGGHEEVPLGFSSSAPIGRLTKGQYWIPTPSQILIGPTQFSCPVCYKTFNRYNNMQMHMWGHGSQYRKGPESLRGTQPTAMLRLPCYCCAAGCRNNIDHPRARPLKDFRTLQTHYRRRHGIKPFMCRKCGKPFAVRGDWRTHEKNCGRLWYCACGSDFKHKRSLKDHIRAFGRGHAACGVDDCFDDDDDRDDPSSSEVDHAATNTTSNSTTTTAAAANAHHHHHTSWKPPPPPLSSSSRGSGDDRLL

SEQ ID NO: 9439 - protein, 153 aa, Zea mays
  Clone ID: TF_ZmC1325199_1.pep
MKRLTQDEDQEQEQEPGVVVSVAQGVTLLLARSGGGGGGGEPRASPRVFECKTCSRRFPSFQALGGHRASHKRPRAAPAKARPHGCGVCGVEFALGQALGGHMRRHHRAVAEECEARDGAAASAHGMDVDDAEAKPEEEATGLLRFDLNIAPS

SEQ ID NO: 9440 - protein, 221 aa, Zea mays
  unsure (1)..(221): unsure at all Xaa locations
  Clone ID: TF_LIB4172-011-Q1-L1-C8.pep
MNASVEGDTFSGSMQIPGGTTVLVELAPDIHICGLCKQHFSNLDAFVAHKQSGCQLTTTPVTAPSTVQFVAEETEPATQTTTTTISSETQTITVSAPEFVFEHGYQTYLPTESTDNQTATVISLPTKSRTKKPTAPPAQKRLGCCYPGCQFKTAYGMKDMERHLKIHTGDKPHKCEVCXKCFSRKDKLKTHMRCHTGVKPYKCXTXRLRAADSSSLYKHLR

SEQ ID NO: 9441 - protein, 181 aa, Zea mays
  Clone ID: TF_ZmC669707_1.pep
MAYGKRSRQKAEEMVWLPDGADVARFLLLFSGHQHYHGDGMAASAPERVFECKTCNRQFPSFQALGGHRASHKKPRLSDGVDAAAAEPPKPKVHGCSICGLEFAIGQALGGHMRRHRAADQTDGGSLGTGLTPKYDSGKTAASPAELVLDLNAVPELEEEQDHAKLELSIEPVAVVDFHAR

SEQ ID NO: 9442 - protein, 106 aa, Zea mays
  Clone ID: TF_ZmC1140_3.pep
DEVDALGGYWEGGDAGPRKELSRACEQCGMSFKKPAHLKQHMQSHSLEAIYHPEKLHQACLVHAFLKRPFSCTVDGCPFSYSRKDHLNRHLLTHEGETILCALVEG

SEQ ID NO: 9443 - protein, 214 aa, Zea mays
  Clone ID: TF_ZmC66749_1.pep
MSSVPDWADAIVPNSKRRRHRSPPAASSSSSHSSSTTQKEELEDEEEDMAKCLILLAQGPAAIEAARVMPAPRSRPKSTGSRRFLAAAEARGGVCVSYECKTCNRCFPSFQALGGHRTSHNKHPRRPAEEVLAAMAITTTLSLAATRPAHECSSCGSVFTSGQALGGHMRRHRPLTTTSSSPATGTEDQQDSSSKLLQESRINLELDLNLLPST

SEQ ID NO: 9444 - protein, 520 aa, Zea mays
  Clone ID: TF_ZmC795_1.pep
VPSGRPLLAEEMEFEYDWKDIFFEEATIVDRETIQEVVQDEEAIPARGDWAVKLGINLYYSANLAKSPLYSKQVPYNRVIYEAFGCGSPNDSPVKLKTYSRRQCRAKKIVLAGRWCGKVWMSNQVHPYLADRIKNHEPKEIDETFPSDQKSHAEPVENSSREAASTRKSSSRTIEGKTSKREKEQLEKANAKKPKFTEEDNSKSLEGTAEASTQKIKGRSVLEKTSKKEKAYTKKLKHTEKVSEALKGPSEASFPAPAGMVVRSSSRIANRKIMLKSKMEEEDNGSADRPKSKVEDDKDNPAGRSRAKPLRQKTKVDAKKKTKETRVEKRKAPSPASQKDEEEQSDDVEGRSTTKQRLSLRKKGAKTEGKQRMEKPRFGGSAPPPSSPKRKEEYVCDIEGCSMSFGTEQALSLHKNDICPEKGCCRKFFSHKYLQQHRKVHADDRPLKCPWEGCGMAFKWPWARTEHVRVHTGDRPYVCLEPGCGQTFRFVSDFSRHKRRTGHGASKKAKAKKQGKAAVT

SEQ ID NO: 9445 - protein, 843 aa, Zea mays
  unsure (1)..(843): unsure at all Xaa locations
  Clone ID: TF_ZmC6856_1.pep
MDSTALQYENQKLVQQLEVQKSEMHALERKFKELSDDQCSYDKTLISLNKLWNQLIDDLVLLGVRAGGDLDNLQALDHEELSEESLESCPSEEIFLLRLLKTNNIRDNSDTSLLKFVEEALAFRSSATVTLMKSLQETISSQQARSESLSLALNGQKSNEDVIVALRNHNDCLKEVAENASQAISIINEKHKRYLDEIEAFKSNHSRELQEIKRISGELEESIAELEESQRKLVVLQLQRHGSVMDASGANAVNGGISTHKSSDKSMSWQDLKDAVDAAKTLAGNRLLELHQTQEDNLILSKELGDLEGQLKDEKYVLVSKPYMILNDKLQHLNAEIERYRGLVEVLQNDKDQLMQREKEISAKAESLDSVKQTETPIYQISRQLVKHMKTCXRKISIFFNSLLIEMTFNIKLVSDSVMMDQACSPLLSEGMMENQLSRSKDAASEALALREQAESLRSLVAKKIEEHKKISDKYNSQVIEIKSLKALVEELEQEKQELEFIADMYVKESSESRTIADIEESETRARNQAEYLRSNLEEHSLELRVKAANEAEAACQQRLSFAEVELEELRTKVDASERDVVELKEAIRIKEAEGDAYISDIETVGQAYEDMQTQNQHLLQQLTDRDDFNIKLVSDSVKMKQACSSLLSDKLMLEKQLQQVNTSLESSKLKIARGEEQMKTCVAQAIKTSAENRHLTISLERIALELSNTDKELKWLRSSVGSSEKEYEQTQQKISELRALLEHERSERRRLEEQYEEVKNEVMELTSETEETTVRKLEDEIKECKGILKCGVCFDRPKEVVITKCFHLFCSLCIQRNLEIRHRKCPGCGTPFGQNDVREVKI

SEQ ID NO: 9446 - protein, 571 aa, Zea mays
  unsure (1)..(571): unsure at all Xaa locations
  Clone ID: TF_ZmC6856_2.pep
TQAVDAAKTLAVXRLLELHQTQEDNLILSKELGDLEGQLKDEKYVLVSKPYMILNDKLQHLNAEIERYRGLVEVLQNDKDQLMQREKEISAKAESLDSVKQTIITYEKKIEELETQIQILFSEKNDLETKVEETLQDSGKKDFKNEIHVMAAALSNELGMMENQLSRSKDAASEALALREQAESLRSLVAKKIEEHKKILDKYNSQVIEIKSLKALVEELEQEKQELEFIADMYVKESSESRTIADIEESETRARNQAEYLRSNLEEHSLELRVKAANEAEAACQQRLSFAEVELEELRTKVDASERDVVELKEAIRIKEAEGDAYISDIETVGQAYEDMQTQNQHLLQQLTDRDDFNIKLVSDSVKMKQACSSLLSDKLMLEKQLQQVNTSLESSKLKIARGEEQMKTCVAQAIKTSAENRHLTISLERIALEVSNTDKELKWLRSSVGSSEKEYEQTQQKISELRALLEHERSERRRLEEQYEEVKNEVMELTSETEETTVRKLEDEIKECKGILKCGVCFDRPKEVVITKCFHLFCSLCIQRNLEIRHRKCPGCGTPFGQNDVREVKI

SEQ ID NO: 9447 - protein, 458 aa, Zea mays
  Clone ID: TF_ZmC25442_1.pep
MLSAAGVRMDAEKETLFEATLSLQDQLKESQVALLVEQEKAEAAVKEADVAKAAWACRICLNAEDALRIVMISVTNHFPSFEALALVQIERTLEDISQKLQLVQRLHTRFLLLPNLQDVTRTIQHPSIHEWSSNGMHRSICFVNKATGYILIAEPPSFLTIYDVIAIIVSHRLGAPMILPIASVFACPDGSEKEVLQILHLGSDFGVSKREGRYDASLGAELLSQDARQVQFLPLRPFYSGEIVAWKTGKEGEKLRYGRVPEDVRPSAGQALYRFPVETAPGEIRMMLSSHVYSFKSVSMADLLSAPSQVNGDVALGGQEKLLATNTGTEVTKDADAGLEYGKVSSTELVQAVHDMLSAAGVRMDAEKETLFEATLSLQDQLKESQVALLVEQEKAEAAVKEADVAKAAWACRICLNAEVNMTIIPCGHVLCNRCSSSVSRCPFCRTQVARMMKIFRP

SEQ ID NO: 9448 - protein, 215 aa, Zea mays
  Clone ID: TF_ZmC49155_1.pep
LEAGRGRDYRRQVSVTIYYFATEGKDCSFSSVYPELQTPTKIPFEKGLAQRFIQPSGSGVDLGFFSLDELSSSSGEVFPLVVYAEAYPSPEEGGPSVNATRAQITLAVLEKHNNDLQVKVMKQILWIDGVRYELQEIFGLVNSTEADVADADADDTGKECVICLSEPRDTAVMPCRHLCLCSECAKTLRFQSNKCPICRQPVEKLMEIKVRSPGP

SEQ ID NO: 9449 - protein, 443 aa, Zea mays
  Clone ID: TF_ZmC64108_4.pep
SRPAGLVEAHGPPRPRAPPLRRRDHQAPGDGGGGGAAACSICLDAVLARSAGRSVAKLQCGHEFHLDCIGSAFNAKGAMQCPNCRKIEKGRWLYASGHRASVDIDMGGWVTSDNYDITSELPFGFQWCPFSGFTRLASMFEEREAELTYHTTGDRSSAASSSLVCPYLALRGFLHPVHVPSTSNPGAESTSFRRHATGLEGHATLDLNNAQLFHAIESINHDSEHRHLSNLPVSGIPEYSMTPFGIGLPRYDSGSQQRFRSYAHHHPLIHRPAPRSGSNLVAPPLGSIPAVVAAAETARGSHMYQHSSVHGSPFPPTTTRRVRPRALTITSFIAATSSGEIGGPHGFSAPGATMNRSVSDAEGISRPIDRPYNAWGREGFAPFPWIPAEGESHWWGTFNPVQNHAHGGFSRRPAGERMPPQSQSHPENSYQAVPPSQRMPPFL

SEQ ID NO: 9450 - protein, 731 aa, Zea mays
  Clone ID: TF_ZmC106180_1.pep
MESRWRKAKMSLGLNLCVYVPRTLEGDDAASSPDTASSTAALVSPVASSSSAATSTNTTPTAASADQSSASGKVLMPTTPTPTSAGLRLSKSGSKSFKKTCAICLTTMKPGQGHALFTAECSHTFHFHCISANVKHGSSSCPVCRIKWKELPFRGPLPAELPQGNARINPVNGYQNGGHMNILRPLPRARSSGRLHHLATLLPDTDPSTFNDDEPLDLSSEEANDNHQGCLRTVEIKTYPEFTEVPENTSERNFTVLIHLKAPVAQHLQPSSNLGDGNGLSTARAPVDLITVLDVSGSMAGTKLALLKRAMGFVIQNLGSSDRLSVIAFSSSARRLFPLRRMTESGRQQSLLAVNSLTSNGGTNIAEALRKGSKVIEERQAKNPVCSIILLSDGQDTYTVSPTAGVHKGAPEYCALLPSTNGNQQVPVHVFGFGADHDSVSLHSISQTSGGTFSFIETEATIQDAFAQCIGGLLSVVAQGLHVKVESLHPDVHFGSIRSGSYSSRVSDDKRNGSIDVGDLYAEEERDFLVSVNVPPGYGETALLNAGGVYKDPLMKETVNMADVQVKISRPAFVSVQSVSIEVDRQKNRLHAAEVMAEARFSAERGDLTTAVSLLEDCRRMIMGSASGQSGDRLCQALDAELKEMQDRMANRQRYEASGRAYVLSGLSSHSWQRATARGDSTDSESLIQAYQTSSMVDMLLRSQTMSRSSTPRPTPQMRHAKSFPARPQPR

SEQ ID NO: 9451 - protein, 201 aa, Zea mays
  Clone ID: TF_ZmC77550_2.pep
FQKICAICLNAMRSGRGRALFTAECSHKFHFNCISSNVQHGNKICPICRAVWKQLPFQGPLAASAAHGSARVNPAIWPQMSMLSVNPLDELPVFGNPEPVVFNDDEQILLQPETAVGGEEGDEVPPLLEITTYNEFPATQESVAQEEFAILIHLKAPHVPSWVSTRAPLDLVTVLDVSGSMSGHKLALLKRAMRFVIENLT

SEQ ID NO: 9452 - protein, 299 aa, Zea mays
  Clone ID: TF_ZmC25728_1.pep
MAADDAARSSRRMDLNLYLGLPRAPRAPRPDLGSDLALGTPMLSSSSPSSSAASADAPPLETDPLHPPYSPSRADLMRPPTPAHEPYNPFAPEAHPPYVPPPPLPVAGALPVLADELEFGFSDAHLGLVERLDRPSSSTASSSFRPDLAERYRHLIGQPVNNTFDLPRRSSNPFPSEGMDLLRHIAFAGLEDSERFATAVSELRRIARPSPYGASTSSNPPNPEPIDGTHIAMALAADQASNSSTMAVIQEDAAFAESAGEPSNAGSSRSLRRRRGSGALGSLDVDGGDLHQNKRRRLN

SEQ ID NO: 9453 - protein, 382 aa, Zea mays
  unsure (1)..(382): unsure at all Xaa locations
  Clone ID: TF_ZmC492_1.pep
RTRGAFSLLLSEPFCQLSLVKNYSMGESCSSAQQSGTSQSAELMPDSDKTVHLREELSDLIEFPTSELLKTXLTARDRVDVFIAWSLLLSHLQTLPASSSIKGDVLQYIQEKVSPCILDCIFQHIPVKAAAPSGKKKDTELAPEAEAAAKASKNAIATCSLLPYLESLWPIGTLQMASLAGSLYGMMIRLLPSFVRTWFTTLRDRSLSYSIESFTKQWCSPPLLLDEFSQVKESVYGDENFSVSVNRSAFEIVATYKKEETGIDLVIRLPSCYPLRHVDVECTRSLGISEVKCRKWLLSLTSFVRSQNGAIAEAIRTWKSNFDKEFEGVEECPICYSILHTSNHNLPRLACKTCKHKFHGACLYKWFSTSNKSTCPLCQTPF

SEQ ID NO: 9454 - protein, 266 aa, Zea mays
  Clone ID: TF_ZmC2252_1.pep
MKALPRIDLSNATTDITEWRPPDAPVSASRRRLDVGRGKQNNAGSATASASRAPCHGADTESGNRKGGREMDSSTSAAAAGEAAVPPEDDVCSVCHDRFRIPCQANCSHWFCGECIIRVWNYGPPVQACKCPICRRLINLLVPAALSGQEDGPQAQRILGEIQHYNCIFGGAPRSLTQRLQDLPFFIRRLFRELMDPQRTLPLVFRARMLMMVALSAIYVLSPVDILPESMLGLFGFVDDLLILLIVFLHLAAVYRSLLLYRHGGQ

SEQ ID NO: 9455 - protein, 209 aa, Zea mays
  Clone ID: TF_ZmC13982_1.pep
MQTSETTGTASPPAVEPEAEDKVEEGARANEEAAAKVGGDDEDDWESEHEGRRGRRQRCRRGGAAGDSAVAMVKRELLTRCLTCPLCDHLLRQATTISECLHTFCRKCIYKKLNDEDLDHCPVCKIDLGCTPVEKLSRGRNKLLRADREPWATCAQLGGAVAEGWPGAPAAHGDRLLRGRLCDGDKLWAAQVRVLLKPYHHRRPGEVDS

SEQ ID NO: 9456 - protein, 486 aa, Zea mays
  Clone ID: TF_ZmC13982_2.pep
MQTSETTGTASPPAVEPEAEDKVEEGARANEEAAAKVGGDDEDDWESEHEGRRGRRQRCRRGGAAGDSAVAMVKRELLTRCLTCPLCDHLLRQATTISECLHTFCRKCIYKKLNDEDLDHCPVCKIDLGCTPVEKLRADHNIQDVRSKFFPFKRKKVNAEEAESPIMLPVKVKERSISSLVVNTPRVTPAALTGRRTRAVTRKAAALRGLGPIIVDPLKKDNDNPNKQTDNSSLLDSLNKIPQTRRQLLSNGDTTSHLSVKDKAGDNKDLDKSEFWKPLNCLVEAASKTKPLTSAPRPALKGDKPRKSPSSDSEHSSRTKTREPLQKSKAEVDKSDPGPIVMLRKRGRPGRKRKNPLPETNADSTATAIQARKALSPIWFSLIASFDQKGVPPLPQIPAHYLRIKDGSIPASSIQKYIVQKLSLLSESEVEISCCGQTVNPGQPVRNLVERWLRVGPARPLHTVIGSSGGDYVMVISYGRPKSASC

SEQ ID NO: 9457 - protein, 70 aa, Zea mays
  Clone ID: TF_jC-zmXLIB3526025da05a1.pep
YVDNDDLRLLPCGHFFHKDCVDKWLKINALCPLCKAEIDVVPRTAPPAIGFGRRDSHRRVGNDIESQRLP

SEQ ID NO: 9458 - protein, 195 aa, Zea mays
  Clone ID: TF_LIB4704-006-R1-K1-F2.pep
MAPAWERARRALTARFCMRFAARRVVVEDAPRGMVDIEAPFPVAVAEAEQQQEQPEDEREMLLAAVSSEPVSEQLASSRSGSRSSAICAICLSAMRSGRGQALFTAECSHKFHFNCISSNVQHGNKICPICRAVWKQLPFQGPLAASAAHGSARVNPAIWPQMSMLSVNPLDELPVFGNPEPAVFNDDEQILLQP

SEQ ID NO: 9459 - protein, 639 aa, Zea mays
  Clone ID: TF_ZmC77550_1.pep
FQKICAICLSAMRSGRGQALFTAECSHKFHFNCISSNVQHGNKICPICRAVWKQLPFQGPLAASAAHGSARVNPAIWPQMSMLSVNPLDELPVFGNPEPAVFNDDEQILLQPETAVGGEEGDEVPPLLEITTYNEFPATQESVAQEEFAILIHLKAPHVPSWVSTRAPLDLVTVLDVSGSMSGHKLALLKRAMRFVIENLDPSDRLSVVAFSSSAWRLFPLQRMTASGQQQSLQAVNSLAADGGTNIAEGLRKAARVVEDRQARNPVCSIMLLSDGVDSHNLPPRDGSAPDYGPLVPRSILPGSEHHVPIHAFGFGMDHDSRAMHAVAQMSGGTFSFIDVVGSIQDAFAQCIGGLLSVVAQETTLSVECADQGVLLTSIKSGGYASGADGDGRGGFVDVGRLYADEERDFLVTVRVPQSRGTIALVRPSCTYRDAATTEMVRVGGDPVTLLRAASPVSAGMSLQVEREWHRVHATEDIAAAQTAAEEYDYARAASILEARRLLLESCASLSSDQQTQALVAELREMQERVLNAELYEGSGRAYLLSGLSSHSWQRATARGDSTELTGLVHSYQTPFMVDMLNRSQALQPEVAEALSRSPTIASSRSSAPTPAPASSGSPWTRRGLRSFRPAKSFTGLSL

SEQ ID NO: 9460 - protein, 365 aa, Zea mays
  Clone ID: TF_ZmC49468_1.pep
MSRRVPCKFFLHGACFKGDYCEFSHDCNDQPDNVCTFYQKGTCTFGSRCRNEHVEVHCNCPQPATTVARASSNSSQLVASSRDPHCSECQTDLCDQTQQICKSTAALSAHQPAWVVDYHDHDTPDDTTSWPLHQAVQNQTSQYPVHLPICSSTADGTCPYGKGCSQMHGDLCAFCERQCMNPYQSDERGVHVKLCKKNNRVLEAMRRSEDIECGVCLDRVLSKPTAAERRFGLLSDCDHSFCISCIRNWRSTSPTSGMDVNSTLRACPICRKLSYYVVPSITWYSSKEEKQEIVEGYKAKLRSIDCKHFDFGKGTCPFGSSCFYKHAYDDGRLEDALLNHHDADDASAAIAKLMRLSYLLTRLHV

SEQ ID NO: 9461 - protein, 107 aa, Zea mays
  Clone ID: TF_uC-zmroteosinte084d10b1.pep
LINNRVLEAMRRSEDIECGVCLDRVLSKPTAAERRFGLLSDCDHSFCISCIRNWRSTSPTSGMDVNSTLRACPICRKLSYYVVPSITWYSSKEEKQEIVEGYKAKLR

SEQ ID NO: 9462 - protein, 68 aa, Zea mays
  Clone ID: TF_LIB3356-061-P1-K6-D8.pep
HGFHVACVDTWLRSNSSCPSCRRPIVLDDPAPPKRCLKCEAVVLEAVLASSSSSSAAGGGRGGGGFLP

SEQ ID NO: 9463 - protein, 171 aa, Zea mays
  Clone ID: TF_ZmC285028_1.pep
MPSRSGSRGRRPRPAPEVAAPTAVQVSSSGSSEEGSDEEEERSPGGSASKYKAAESEAEAEDPCLPSCPICMVVWTADGAHRVSCIPCGHVYGRHCLEMWLLQYGKKKAPCPQCGKRYTQNNIINLYVPEIVVPNNDLENQVLSLRERNEYLEKQQAKLLEEIKEHKVPHR

SEQ ID NO: 9464 - protein, 369 aa, Zea mays
  Clone ID: TF_ZmC130770_1.pep
MSTKKVLCKFFMHGACLKGEYCEFSHDWSDQANNVCTFYQKGACSYGSRCRYDHVKVSRNPTVPPPRPTSSTSRRASTSLQLSSYNHPPHMVHQTDSSNQRHQISVDVLAHSASKPAWRNDFQHDIVSDDGIDWSSNQNLINQTSLKPVDLPICSFAAAGNCPYGEGCPQMHGDLCATCGKLCLHPYRPDEREEHIKLCEKNHKRLVALKRSQEIECSVCLDRVLSKPTAAERKFGLLSECDHPFCIECIRNWRSNSPASGMDVNSALRACPICRKLSYYVIPSVLWYFSKEEKEEITESYKSKLKSIDCKYFDFGTGSCPFGTSCFYKHAYRDGRLEEVILRHLDADDGSTVIAKSIRLSDFLGRMDL

SEQ ID NO: 9465 - protein, 235 aa, Zea mays
  unsure (1)..(235): unsure at all Xaa locations
  Clone ID: TF_ZmC13088_3.pep
FFGPVGVTLHTPHEKKTHLVCRQVQQDCANCGACLGKYFCAKCNFFDDDKCSLFCFLRFCCRVPWHFXVSKNQFHCDGCGICRTGGAENFYHCGRCGCCYTTTLKDSHRYVDGAMHHNCPVCMEYLFDSMKAISVLHCGHTIHLECLYEMRAXQQFYAPVCLRSACNMSDIWQKLDQQVAASPMPSDXIRRRWXWILCNDCGXTSNVQFHILAHKCPGCSSYNTRQTRGRSSRML

SEQ ID NO: 9466 - protein, 328 aa, Zea mays
  unsure (1)..(328): unsure at all Xaa locations
  Clone ID: TF_ZmC3546_2.pep
ASLSGTSRRRWTRTPRWRASWVPQVCWDIKGVQVACADGRSICLDAFCDSNPSTMTKCKHDYHLQCILVWCQRSSQCPMCWQHISMKVPMSQELLEVVEQXRNIRANPSRNTRCFQPSXLGNFEIPIGSDDAXLEERIIQHLAAAAGSXRSHRHHNRRDGHQSRSEASSHPQFLVLSADERTISGQEGDYEQASAVASGRPLRTLVEQERTRGLADASSPSLRCSTPADSTGRSNNRISGIESTPVDQDGTGPSAVQSMVQGFHNQSASGWRERWFSRSNSLLDLGSEVRREVNAGIAAVSRMMEWHDARDGTGAGPSPTSASRSGSQ

SEQ ID NO: 9467 - protein, 95 aa, Zea mays
  Clone ID: TF_ZmC11832_4.pep
SVLRCGHTMHLQCFHEMLKHDKFSCPICATPIFDMDKFFKALDAEMEASYLYTGKGWVVCNDCRDTTQVFSGMAGHKCCHCQSHNTCRVAPPVLP

SEQ ID NO: 9468 - protein, 387 aa, Zea mays
  Clone ID: TF_ZmC17724_1.pep
MESAVLACEAPTAAAAAAPGAGGDRGAEGVVMLRRSGLAACLTCPLCGRLLRDAATITECLHTFCRKCISEEFVNKEVCCCPVCSIDLGCAPLEKLRIDHSLQYVRSKVFPSKKRKVEDPEVTSPITSPIKTKVRSLSSLTKHAPQMSMQKCLRKRRTKASCLQNLPLHSTLRGSSNITKKSGGWRPLGCHFRAAKKKRSLRPKSDDIKTAGKRTDDPVDVTLASQAKTRKQVTRRGNLEKRTGTKKVLILKGKQKNRKTKNTPNKRRLPALWFYLLAAFDQKGHPPLPQIPSKFLRIKDVNLPASFIQKYLAQKLNLSSETEVEIFCGGRPVSPGITLHDLADHWIGKRSKGRVRSSVGTPAAEFVLKVFYARSGAPLPKTESNQD

SEQ ID NO: 9469 - protein, 742 aa, Zea mays
  unsure (1)..(742): unsure at all Xaa locations
  Clone ID: TF_ZmC6175_1.pep
STALVTLLSGWACKGRLEDTSNPGKFVCLASGAVSCASDGNGFKTCQSLCPCYVSSNGAFSKPVKRASQGESSTNTDRNHSSHDAATEASPCNNRACYIPRLRVESSYLGVHSSTPTKSFRPLSFNYVAPSLYSSLFSWDTDTLVSGPDNISKPIDTIFKFHKAIRKDLEFLDLESGKLIDGDESCLSQFIGRFRLLWGLYRAHSNAEDEIVFPALESKEALHNVSHSYTLDHKQEEKLFQDISTVLSELSQLHDGLSYPLDVEAGTNDISSSEIDWARKRNELLTKLQGLCKSIRVTLSNHVHREELELWPLFDKHFSVDEQDKIIGHIIGTTGAEVLQSMLPWVTSALSLEEQNMMLDTWKQATKNTMFDEWLNELMRFXEXSLRTSDKASTLSEESHFQENLEQNDQMFRPGWKDIFRMNQSELEAEIRKXVSRDSTLDPRRKAYLIQNLMTSRWIAAQQKSPQPSVEGHNGCTRRPGCVPSYRDPGKQIFGCEHYKRNCKLVAACCNKLFTCRFCHDKVSDHTMDKKSVMEMMCMQCLNVQPVGPNCQSPSCNGLSMAKYYCSICKFFDDERSVYHCPFCNLCRLGSGLGTDFFHCMKCNCCLGIKMIEHKCREKMLEMNCPICCDFLFTSSAPVKGLPCGHFMHSACFQAYTCTHYTCPICCKSLGDMTVYFGMLDGLLAAEQLPEEYQDRCQDILCNDCERKGRSRFHWLYHKCGFCGSYNTRVIKTDTAECSRPL

SEQ ID NO: 9470 - protein, 503 aa, Zea mays
  Clone ID: TF_ZmC24792_1.pep
MLHGAQQASASSTAGPRPKSTAILQSDQPPRAAAAREGGRGGTGPESLVRGSVVAPCVSCGICGGLLRDATAFTECLHAFCRKCIYDKVAKDNIKCCPKCGIFMGNPLEKLRPDHSLEHIRPLIFPAKRRKVVTMKKRKERVSSESTLPSVVGTTAEESTALIPAASESKAQKDLTPVGRDALSRIRGRDFDSACGLTEDTGALIVWQAPPILEETAAHNQLDSKQDPDSFRPPATSDIEYQRQGPTAQMTNISFMVGNSSHARPTDQDDENMRGDILTLINESNARIMEMYDAHISKLKAGNIKLIEQLENERAAALERTRILEERLQQELENERTVAAERTRLLEKKLQRELEHEREAAIERTRVLDERLQRESEIARTAASRNEALKEEIFKLQEELEHGRAYNQALMSDILEKSEELATLTYYSNLLESEKTYLENQVDHLNEELKCTRKEHAAYVRKVLDAARAIPNDLEPINSATPMLCRDRGARRGSVSQPQAGHG

SEQ ID NO: 9471 - protein, 275 aa, Zea mays
  Clone ID: TF_LIB4738-122-A1-K1-H3.pep
IGTSSRPGRRPWSNDLDDPQFMCCVCLDLLYKPVVISCGHMSCFWCVHKAMHIFRESHCAVCRQPYIHFPSICQLLHHLLLKLETNDYKRREKEVLEEEKRMQTYSPQIIEFLNYKTNVGSYKENRNEDSKARPPQEVPLNDSVPDEHLKKIKLEDVSCPLCMEMLYQPAVLNCGHGTSGRKGSTRALHAEDPSNIHIGVGCDSCGVYPIRGKRYKCQDCTELIGFDLCEACYNSSSKLPGRFNQRHTPNHRMEVDNSALVHRILRHHGIPRGRP

SEQ ID NO: 9472 - protein, 249 aa, Zea mays
  unsure (1)..(249): unsure at all Xaa locations
  Clone ID: TF_LIB5117-058-A1-PF1-C8.pep
MDKLAVSESKPAWRNEVQLDSVSEDGIGWSSIQTAQNQTSMKLAGMPICSFAAGGNCPYGEECPHMHGDLCAFCGKMCLHPYRPDERQEHIKLCEKNHKRLEALKRSQEIECSVCLDRVLSKPTAAERKFGLLSECDHPFCISCIRNWRGNSPTSGMDVNSALRACPICRKLSYYVIPSVLWYFSKEEKLEITENYKAKPKSIDCKYFDFGTGTCPFGTSCFYKHAYXXGRLEEVVLRHLDCDDGSTLI

SEQ ID NO: 9473 - protein, 229 aa, Zea mays
  Clone ID: TF_ZmC21544_3.pep
MELAEAPAPVPDEDGLDERGVALHLPRLLAGVVSGALTGLFALAGALTGAVTGAVAGRASDSGGVLRGAGLGAVAGAVLSIEVLEASRAYWCSSDRLGSHGGASSMADFIEQLLRARFVQEQFTASGYASYRWQLSISYFGQDDLYDIFGDISSEGLSQESLKKLPHHVVSDQTRDLLGEILCCPICLQDIVAGDTARRLPSCSHTFHHPCVDRWLVDRGSCPVCRQDV

SEQ ID NO: 9474 - protein, 83 aa, Zea mays
  Clone ID: TF_ZmC60532_2.pep
TCSHAMCIKCYREWRSRSQSCPFCRDSLKRVNSADLWIYTDSNDIVDMATVRRENLRRLFMYIDKLPTVIPESVFDVYDSHVK

SEQ ID NO: 9475 - protein, 416 aa, Zea mays
  Clone ID: TF_ZmC9088_1.pep
MNQLLLIVLQKQRQQQMMDGFGGYYDECMYWRQNDEIHDAHKEASAPCSSAPVSHLGAHQQECWQHSSYGSQHHDNQNLLEMEVRVRGEMSQIQHEIYELQKLVESCIASQVKMQHSIKEEVCSALREAGLMPNQPDTTAAKGGNCCIPETMGDIENHNNPIQFNDRPWIESPNSWRSLCVVTQSDCHALSHNADICNLLERKKVSKSLESDFSNKMNQLLLTALQKQRQQRMMDDFGGYYDERMYWRQNDEIRDADKEASAPCSLAPVAHLGAHQQESWQHSSFGSQHQHHDNQNLLEMEVRVRGEMSQIHQEIYQLRKLVESCIASQVKMQHSIKEEVCSALREAGLMRSQPDTAAAKRGNCCICHRMQVDSLLYRCGHVCTCFDCADQLKSSGMSCPICQSPIDDVVLARLNF

SEQ ID NO: 9476 - protein, 78 aa, Zea mays
  Clone ID: TF_jC-zmX148004Q1E1F9b1.pep
GYNNLDPSPGAAEQKRGENKTARHGTPTGKKEAKEAMPTQEIPSSNDGDDAASCPVCLEDYAAAEHPRQKPCTHTIHS

SEQ ID NO: 9477 - protein, 46 aa, Zea mays
  Clone ID: TF_LIB3957-008-Q1-N6-G3.pep
TLQEDYVEGEDLGRLDCGHDFHTACIKQWLVIKNLCPICKKTALDT

SEQ ID NO: 9478 - protein, 414 aa, Zea mays
  Clone ID: TF_ZmC64108_1.pep
MDLERSPPPSPAEAAGAAACSICLDPVLACVAGRSVAKLQCGHEFHLDCIGSAFNAKGAMQCPNCRKIEKGRWLYASGRHPPADIDMGGWVTSDNYDITSELPFGFQWCPFSGFTQLASMFGVREAEPTYHTTGDHSSAASSSLVCPYLALRGFLHPVHVPSTSNSGAESTSFHRHSTGLEGHVTPDLNNAPVFHATESRNHDSEHRHLSNLPVSGTPEYSMTPFGIGVPRYDSGSQQGFRSYAHHHPLIHRLTPRSGSNLVAPLGSVPAVVAETRGHGHGAPGHMYQHSSVQGSPFPPTTRRVRPRALTITSFIAATSSAEIAGPLGHGFPAPGAVNRSVSDAEGIDRAYTWGREGYDLFPWTPAEWGTFNPMQNHAHGSFTRRPAGERMPQSRPENGYQPPVPTSQRMPPFL

SEQ ID NO: 9479 - protein, 273 aa, Zea mays
  Clone ID: TF_ZmC64108_3.pep
MDLERPPPASAAEAAGAAACSICLDPVLACVAGRSVAKLQCGHEFHLDCIGSAFNAKGAMQCPNCRKIEKGRWLYASGRHPPADIDMGGWVTSDNYDITSELPFGFQWCPFSGFTQLASMFGVREAEPTYHTTGDHSSAASSSLVCPYLALRGFLHPVNVPSTSNSGAESTSFHRHSTGLEGHVTPDLNNAPVFHATESRNHDSEHRHLSNLPVSGTPEYSMTPFGIGVPRYDSGSQQGFRSYAHHHPLIHSSSRAAALAPRGVHQTNRPQHL

SEQ ID NO: 9480 - protein, 155 aa, Zea mays
  unsure (1)..(155): unsure at all Xaa locations
  Clone ID: TF_LIB4979-013-A1-K1-F5.pep
MAAAFEPTPNISEQPEHRPATNKGTLVFSYTCVGLTGTALVADLLFYCYHQLLRRRAPVTAAAAAGAAAETNNPPGSEGHHVGGVDISKLPGFAYAATSSRRRRNGGDGAHCSVCLGAVTRREMLRRLPLCKHLYHVECIDMSLESHATXPLCRS

SEQ ID NO: 9481 - protein, 114 aa, Zea mays
  unsure (1)..(114): unsure at all Xaa locations
  Clone ID: TF_LIB4765-009-Q1-K1-D9.pep
MSGGNAWSPLPSHGFGSESSGMANRAGEPVARTNSDGGGGGSKDSGSFECNICLDLAQXPVVTLCGHLFCWPCLYEWLHVHAHSQECPVCKPXVEEGKLVPLYGRXWQLRRTPC

SEQ ID NO: 9482 - protein, 139 aa, Zea mays
  unsure (1)..(139): unsure at all Xaa locations
  Clone ID: TF_ZmC163039_1.pep
MAVTATTVAAAITMLAAVAAVFLTVLLCFYIVLCAKQYRGEAPRAGGGGGARAWLLRAVFGGGGADGGGGATEWCHEGGLDDKAMARLPRREVGAGEALDCAVCIAEVAAGEAARVLPRCGHPFHVGCVXAWLRSHSTC

SEQ ID NO: 9483 - protein, 352 aa, Zea mays
  Clone ID: TF_ZmC33545_1.pep
MASRDAGASPRSAPHRPGAVAPKDGADLLSPRFRSAAALAGWDEESVLLAAMVVEDTPVRESRRKRRASTSSAGGSAGSSTRKMRPRRQSPAKIPPVVLALDDDDDDDAADGKSIVNAATKEEEKVVVVGDKEASGSGDKAASGSGDKAVATGNLPCMDRLREELSCAICLEICFEPTTTSCGHSFCMKCLIHAASKCGKRCPKCRQFISNSRSCTINTVLWNTIQLLFPGEVEARKNSTSPCDKDASRSPLRANRLSQGGNGMRTRTRSRSSSTEARTRSSYRSFMEPGIRLDQSEDAALAYRLQQEEFMNAFEEPEQERQQPRNAVSTARDTLRAIASRAVRLRARGWHV

SEQ ID NO: 9484 - protein, 164 aa, Zea mays
  Clone ID: TF_ZmC285028_2.pep
VAAPTAVQVSSSGSSEEGSDEEEEDGNKGSGDGARSPGGSASKYKAAESEAEAEDPCLPSCPICMVAWTADGSHRVSCIPCGHVYGRHCLEMWLLQYGKKKAPCPQCGKRYTQNNIINLYVPEIVVPNNDLEKQVLSLRERNEYLEKQQAKLLEEIKEHKVPHK

SEQ ID NO: 9485 - protein, 130 aa, Zea mays
  unsure (1)..(130): unsure at all Xaa locations
  Clone ID: TF_ZmC2252_2.pep
PATARTQRVETGREEERWIPPPRRRRQGRRPCRRRTTSAPSATTASGSRARRTAPIGSVRLQDLPFFIRRLFRELMDPQRTLPLVFRARMLMMXMLGLFGFVDDLLILLIVFLHLAAVYRSLLLYRHGGQ

SEQ ID NO: 9486 - protein, 122 aa, Zea mays
  Clone ID: TF_LIB4172-012-Q1-L1-A3.pep
TPADPVRNSRVDPRVRSARIQPQDTPPEAEEEVIRAAPARGREQLNEDEPAAGQDPWKLLKEQEERKKCVICQDQSKTVLLLPCRHLCLCQACTEILMRHPVYHRNCPLCRRSILQTLNVYL

SEQ ID NO: 9487 - protein, 69 aa, Zea mays
  Clone ID: TF_ZmC3359_2.pep
KGQGHECPVCKVGVAVGQRVKRLPCSHRYHDGCIPTRPQVRNSCPLCRFELPTDDPEYESWKAGRTDAA

SEQ ID NO: 9488 - protein, 631 aa, Zea mays
  Clone ID: TF_ZmC2094_1.pep
MENLRRFLNPLVLNLQKMELELTCPVCLKLLTSPTTLPCYHTSCSKCALTPTSKGYSCAICKSGYCSQDLRPASHLESIVSIHRSLSSTVSTMIEQQDSQINIHVAKAASHGTPESGNRSGVEEKSDQMKSYNPVASKLVYNQPTGPAFGNIDSVQAKDPAFENNAGAAAVAPMAFVRKGHSGSQSSDGPGDLDCDSNDLEGELMTSLSPLQTALKREANAMDDHTRELKKQKSNDQVQRQTNMASAWKCEFCHSSQVTECTGPLSHYLNGEPVEADQAWKSSVQHVHEKCIEWAPQAFFTGDTANNLGPELARASKIKCSVCGLKGAALGCLVKSCRKSFHVPCAYNVKGCKWDQENFVMLCPTHSSKKLPCERLKPKKKAKLQQPSSDIDGPISPSPMQRAELWTASPFLTSEWVICGSALIGHEKEILDQFECHTGITVTNTWSSDVTHVIANTDERGACARTLKVLMAILAGKWVLNVNWLKACMEAREPVPEEPYEIRCDVHGSVDGPRSGRLRAMQQAPGLFAGLTFYFSGHFMPGYRANLEDLIAAAGGSVLEKAELSSTSLILYSMEAPPPHNNLDALETINKRLAEAQELATTAGCKAIPHTWLLDCIASCAVELNVSCSTA

SEQ ID NO: 9489 - protein, 228 aa, Zea mays
  unsure (1)..(228): unsure at all Xaa locations
  Clone ID: TF_LIB5117-040-A1-PF1-A1.pep
MANAGDPASLPPSASPFSSTRALESVPFSSGNPRIEETRGVVLLHPDPPTAAAAASSSSSHLPAERKPQVFVPAVPNHMTYADFCRFCGSFVPHMLEMRIVRIDGAEDQYSVLIKFGTLSSTDSFYKHFNGKQFSSLEGDVSRIRFVEDVHYTQLIEHAHSSITSSAEQPTCPVCLERLDQDPGGILTTICNHSFHCSCISKWTDSSWPVCRYXQQQPEKSMGSVWGT

SEQ ID NO: 9490 - protein, 125 aa, Zea mays
  Clone ID: TF_LIB3060-112-Q6-K6-F6.pep
LSSHFLNSPLLSRLPSSPPQTPTPTPRSTLPIYSFLSGPAPQGTAPPETVGAGAMRVRGGSLCNVRYDEEERTPLLLHCGHGFCRACLSRMLAAAPGATLPCPRCRHPTGGGGSVSALRLYFPIL

SEQ ID NO: 9491 - protein, 190 aa, Zea mays
  unsure (1)..(190): unsure at all Xaa locations
  Clone ID: TF_21210563.pep
TRDGRGGSSNSNDDGLLEEYDVLGAGLSLLLQHLAENDPNRYGTPPAKREAVEALPTVQIAEAVSCSVCLDDLELGSPAXQMPCGHRFHSSCILPWLELHSSCPVCRFELPSEETKDLNEPSDVHRRTESAREEVRADDPENDSESGNSAWPLVPWFFSGLFSVPEPHTDRGTLTTDQQSPSTNPNAGGN

SEQ ID NO: 9492 - protein, 177 aa, Zea mays
  Clone ID: TF_LIB3900-009-Q1-N6-C9.pep
QKQELLRQQSYSIAITCWNRGARNEVRLPDAHGRFSSLHVYLRTQTQVAYISFTRVACRRGTSHGRRAICPRKAGGRRESSRAASSLSHRPQCPAARRRTLAIRSAVGVDNNNKKKKKKKGASQGQTLHLVANKFRYEISDCTPTMHSLSRCPTIACAWTCIHGLIYYLARKPFLKK

SEQ ID NO: 9493 - protein, 121 aa, Zea mays
  Clone ID: TF_LIB3592-049-Q1-K6-H11.pep
VGLVSLSFPYVQPRCGVCSRGVKSGGSSAVFTAECSHAFHFPCIAAHARSSSANGVLSCPVCASPWRQAPFLASLRLHCSFHDDKHRGGGDGRKTSPLAKLYDDDEPLLAPKATANGGGFN

SEQ ID NO: 9494 - protein, 285 aa, Zea mays
  Clone ID: TF_ZmC73469_1.pep
PRVRPRVRVASTRRLHCAATTHDYNVFSFHPDNSPCHGFEEVLACYRKIVPHLKLSGPTSFAPIVEAAVDIVDRSGGQYHVLVVVADGQVTRSVDTGDGDLSPQEKRTVDSIVMASSYPLSIVLVGVGDGPWDDMRRFDDKLPARDFDNFQFVNFTAIMARAATAQQKESAFALAALMEVPIQYKATMELGILGRSTGNAKRVAPAPPPLPHAQRQASSLRRGASNVGGAAAAPRDDQVCPICLTNAKDLAFGCGHMCCRECGESLTRCPICRQPIRSKLRLYSG

SEQ ID NO: 9495 - protein, 92 aa, Zea mays
  Clone ID: TF_LIB4969-018-Q1-XP1-A1.pep
MASVTDETAKIEGLTSAAAFVEGGIQDACDDACSICLEAFCESDPSALTGCKHEFHLQCILEWYVSSSNISILHVTIFTIFYIIPTFRMNST

SEQ ID NO: 9496 - protein, 173 aa, Zea mays
  unsure (1)..(173): unsure at all Xaa locations
  Clone ID: TF_ZmC1202668_1.pep
MPYSTDKGGYSTHDTLVLLAIGFCATAVSVLIIVLCECLCCRRRRRGPGGTVVYVAARPFFLPSTTDDGDGGLSPSAVSTLPSFVFRRGLPVGGGSGRGEGSGSGSGRGWAQCAVCLSLVQEXEVVRRLPACTHLFHVCCIDMWLHSHSTCPLCRATVPPTKEVPSNDPQPPV

SEQ ID NO: 9497 - protein, 358 aa, Zea mays
  Clone ID: TF_ZmC25188_1.pep
MAMAAAQLEAEEELRLELEAVAAVYGDDVRVLRDLPPHLFVHVRPRTADDTSQQFVELFLGIKASSQYPKEPPHIYAVESKGLDENRQIYLITSIQNKANELSNCPMLVTLCEEAGEILSNMNHPAGDCPLCLYPLMGEDKVGSELPFMKLMSCYHCFHSDCIMRWWEWLQHGDTNPKEPNTGDKHYNVNQPRGFCPVCRKVFDEKDIEHVRDLLGDNTSRLASLTVDLGEDEKELLHSEAEQNRRKRIESLVNLQQELNGLIEPKKDLAIQPGMYVSVPPSTPDTAEEENADPSQGTATSTSETEQRGQASNASSNKPKNPGHRRRNRANASRRQPHGQGQPARQQWQRKEAGTSHQ

SEQ ID NO: 9498 - protein, 242 aa, Zea mays
  Clone ID: TF_ZmC1254_3.pep
MARRLAYTTALTTLFSYGLLFAFGQLRDLFRHLLGCFRPNKDDDVKQGYAPICVGLEDFFVRRLYLRVQDCFGRPIASAPDSWFDVVERTSDDNNKTLQRTSKTTRCLNLTSYNYLGFAAADEYCVPRVVDSLKKYSASTCSARVDGGTTKLHTELEELVARFVGKPAAVVFGMGYVTNSATIPCLIGKGGLIISDSLNHNSIVNGARGSDATVRVFQHNCPAHLEEVLREQIAGGQPLQHM

SEQ ID NO: 9499 - protein, 369 aa, Zea mays
  unsure (1)..(369): unsure at all Xaa locations
  Clone ID: TF_ZmC2195_2.pep
MGANCCIAAKERTQPCITPIEVSAYRNVRRSPSWNIRWDNRTHIEDIMDIPTLFSNHSSGSIHPHTKSGSVAPTEGFSNGNSLGTSPSNVFHGAKWHKSDKKMEARKVTKSDSRANRSTASNSSPETKLSRKSLHWSPRGRPXEGLHSSSMLSVCSNDLSAAGSYAESSDGWSMRTFSEMVATSQRERWSLDSELLGSISSKVTRTSASNSTTLPPEQEVCKLCLKLLKERSTWNAQELAVVAVLLCGHVYHADCLDSITTEADKYDPPCPVCTHGEKCTVKLFGKLESKVKNKIPKNVAADINPDGNSNKHQKKGRREPRLGTSSSMKVPFSRPFLRRHFSIGSRPPRSVSETDSTRKKGFWARHWRE

SEQ ID NO: 9500 - protein, 63 aa, Zea mays
  Clone ID: TF_LIB3637-254-Q6-N6-D1.pep
FEASKDDSREASPECSICLDGFYDGDELIRLRCGYRFHSTCLEPWARKCADCPYCRTNIRSRS

SEQ ID NO: 9501 - protein, 247 aa, Zea mays
  Clone ID: TF_ZmC6487_3.pep
TPQPASDSHLPLCRGTRLLVLAVPTRVSPEDFVRFCGPHLECAADIRFIRDDGVEDRYSVLVEFEDQSSAEWFYADLNGWRFSTSESEVCHVLFIAAVQYTPSSEVATTPPAGSTELPMCPVCIERLDQDISGILATTCDHSFRCSCVSVWTNSSCPVCQFCQKQSENSTCSVCQTTGNLWICVICGFVGCGRYQEGHAKQHWKDTQHCYSLDLETQRVWDFVGDRFVHRLNQSKSDAKHAKFKSKS

SEQ ID NO: 9502 - protein, 437 aa, Zea mays
  Clone ID: TF_ZmC2195_4.pep
MGANCCVAAKERTQPCITPIEVSTYRNVRRSPSWNIRWDNRTHIEDIMDIPTLFSNHSSGSIHPDTKSGSIAPTEGFSNGNSLGTSPSNVFHGAKWHKSDKKMEARKVTKSDSRADRSTASNSSPETKLSRKSLDISSVASDLKTSVSVPSTPPLVSRADPSSSKGHSQPTDSDLMKKAWRSPGYQLYRQVSDSKIPSLRSLNEIRSPEGRPPSSMLSACSNDLSAAGSYGESSDGWSMRTFSEMVSTSQRERWSLDSELLGSISSKMTRSSASSSTTRPPDQDVCKLCLKLLKERSTWNAQELAVVAVLLCGHAYHADCLDSITTEADKYDPPCPVCTHGEKFSVKLFGKLESKIKNKIPKNVSVDINLDGNSSNKHQKKGRREPRLGTSSSMKVPFSRPFLRRHFSIGSRPPRSVSETDSTRKKGFWARHWERVE

SEQ ID NO: 9503 - protein, 431 aa, Zea mays
  Clone ID: TF_ZmC2195_5.pep
YKEWFHCQPCITPIEVSAYRNVRRSPSWNIRWDNRTHIEDIMDIPTLFSNHSSGSIHPHTKSGSVAPTEGFSNGNSLGTSPSNVFHGAKWHKSDKKMEARKVTKSDSRANRSTASNSSPETKLSRKSLDISSVASDLKTSVSVPSTPPLVSRADPSSSKGHSQPTDSDSMKKAWRSPGYQLYRQVSDSKIPSLRSLNEIRSPEGRPPSSMLSACSNDLSAAGSYGESSDGWSMRTFSEMVSTSQRERWSLDSELAGSISSKMTRSSAWSSTTCPPDQDGCKLCLKLLKERSTWNAQELAVVAVLLCGHAYHADCLDSITTEADKYDPPCPVCTHGEKCTVKLFGKLESKIKNKIPKNVAVDINLDGNSSNKHQKKGRREPRLGTSSSMKVPFSRPFLRRHFSIGSRPPRSVSETDSTRKKGFWARHWERVE

SEQ ID NO: 9504 - protein, 68 aa, Zea mays
  Clone ID: TF_LIB3059-040-Q1-K1-D9.pep
NSRVDARVRPRVRDQLVLDICVICLEQEDNAVFVPCGHMCCCMACSSHLTNCPLCRRRIDQAVRTFRH

SEQ ID NO: 9505 - protein, 169 aa, Zea mays
  Clone ID: TF_ZmC71625_2.pep
MRCSGVGFCATAVYQRRGGPHLWPQGSLASCGKGILSLFEEWEAINDLRADMARLQQGMSHMQRMLEACMDMQLELQRSVRQEVSAALNRFIGEQGGESKEIIDDGSKWINVRKGTCCICCETPIDSLLYRCGHMCTCSKCANELVRGGGKCPLCRAPIIEVIRAYFIM

SEQ ID NO: 9506 - protein, 228 aa, Zea mays
  Clone ID: TF_ZmC93126_1.pep
MELLSVSSLLSNGFGESLERLERLIRSYREQRGHGPLNWNLDPPMHPSNGPNANQEQDGKPESQQSQAPVNLVIPPPPLPPRPPLWHSELRHNNWSSRHREWDAINDLRADMGRLQQGMSSMQRMLEACMDMQLELQRSVRQEVSAALNRFAGPEGFSMDLSDDGSKCNQVRKGTCCICCDTQIDSLLYRCGHMCTCSKCANELVRSGGKCPLCRAPIVEVVRAYSVL

SEQ ID NO: 9507 - protein, 170 aa, Zea mays
  unsure (1)..(170): unsure at all Xaa locations
  Clone ID: TF_LIB4301-007-Q1-K1-E2.pep
VRTSGSPPRPRHADRARLAGGGEGGGGGGGGGGRRGGGEEDGGQPRRERERERRRRRRRKREAAAAASEVXMXKRELLARCMTXPLCRRILRDATTVSECLHTFCRKCIYKKINDEELEHCPVCKIDLGCAPLEKLKADHNIQDVRAKIFSLKRKKGNAEKGESPIAPPA

SEQ ID NO: 9508 - protein, 381 aa, Zea mays
  Clone ID: TF_ZmC30542_1.pep
IIMSSICPFAGATTGGGVCPVKSDKSNTGVCPAKSDKSISGVCPVTGKDHGSKLKESGDHGEEKGTDPRVVPAKCPFGYDSNTFKLGPLSCIVCQALLHESSKCKPCAHKFCKACISRFKDCPLCGADIEGIEPDAELQALVDRFIDGHARIKRSHAAGDVEAADGKNKVIYEDVSMERGAFLVQQAMRAFRARNIESAKSRLTMCADDIREELKSSEDNLDLCSQLGAVLGMLGDCCRTLGDVPAAITYYEESAEFLSKPPAKDLELVHTLSVSLNKIGDLRYYDGDLQSARNYYARSLDVRRNAVKEHSAVASQVIDLATSLAKVADVDRNLGNESTAVEGFEEAIRCLEKLKLDSEQTSLEQRRLSVLDFLHNQLADK

SEQ ID NO: 9509 - protein, 197 aa, Zea mays
  unsure (1)..(197): unsure at all Xaa locations
  Clone ID: TF_ZmC30542_2.pep
IIMSSICPFAGATTGGGVCPVKSDKSNTGVCPAKSDKSISGVCPVTGKDHGSKLKESGDHGEEKGTDPRVVPAKCPFGYDSNTFKLGPLSCIVCQALLHESSKCKPCAHKFCKACISRFKDCPLCGADIEGIEPDAELQALVDRFIDGHARIKRSHAAGDVEAADGKNKVIYEDVSWERGVFLVQQAXRAFRARNIE

SEQ ID NO: 9510 - protein, 132 aa, Zea mays
  unsure (1)..(132): unsure at all Xaa locations
  Clone ID: TF_ZmC30542_3.pep
IIMSSICPFAGATTGGGVCPVKSDKSNTGVKLKESGDHGEEKGTDPRVVPAKCPFGYDSNTFKLGPLSCIVCQALLHESSKCKPCAHKFCKACISRFKDCPLCGADIEGIEPDAELKLLXTXLIDGHARISD

SEQ ID NO: 9511 - protein, 238 aa, Zea mays
  Clone ID: TF_ZmC28824_1.pep
MDNLKTHSEYADQPQGPQANAVSFALPTGQVLDLDSHMIGQQHTNLSSFWFSLEQHRLQLDQALQLHNQQLQVSLQQQISMQNSTLLNLVESMTRDVLMQKNDEIASLRVELQRNQEDLETTLHDRDEWMKVAMAAYEINQTLIRMLRTVQLEANSHVSSNDLDAPSYSEASSMARTALETAQPNLICKVCNSGNAGVLMLPCQHLCACKPCVAWLATCPICGAVKTDAIEARFVYKK

SEQ ID NO: 9512 - protein, 489 aa, Zea mays
  Clone ID: TF_ZmC3545_1.pep
LPKLVKTGALCCVAARPHGTKSDPASRDRSMDPTEPRWRINSSFSPPTSRRWDCRYSSDGLPHRVHDAPHDHPPYVSSLSSHSKGSRSAFGSDQYLNHHHSASDGALSYFGSPADSLQAPRWTPSLQRFDLGEFSTPAGGSRPETSDYPQSSERPLTATSSFSSASPFSESSQLASSSKQAAPYLPRNHMGRRSFMSKPVYPLVFRNPVSESEACRMLEVSNAGRATPSDDSQASPLWRRSLASPELKFHNALNELGKMEVSPERNTSSRREGFRWSNASSYDFGYDGDAIDISDHISIESQRSPTSSARFLKCGLCERFLHQKSPWTSNRIVRNADMPVAAVLPCRHVFHADCLEESTAKTEVHEPPCPLCARATDDEGHVSFSEPLHVALRSARRNLLLGTGAGGNSGISDPPRTDRGLKRNNSAVMPRRSGGALFRNRFKKQFPFKARIGKELFGGRVLNKVGLSLSSGQHDDHRQQAPKHDRPMK

SEQ ID NO: 9513 - protein, 213 aa, Zea mays
  Clone ID: TF_ZmC223_6.pep
SIDKLLVIAYLYKNIFLICGCQVGLAPQTFVCCICNCSLSKEGAISAVRLFSCGHATHLQCESEQTRSSNQESKEGCPVCLSMSDTQARSKSPMFENGLMKYSGAEHEVSHGMYQIHEVDHAERSRGLQQMSRYEILNNLQKAQKSFHIETVPPLKLAPPAIYHEKIQKRTTSVGETSKHSVRSQKPQKIWQMKEKKSKEAGSHHPQKSSFLR

SEQ ID NO: 9514 - protein, 167 aa, Zea mays
  unsure (1)..(167): unsure at all Xaa locations
  Clone ID: TF_ZmC35583_2.pep
KKKFDEAKKKXELSLENVLAGMWVLVAKLKRGALGISDFNVDDRTVNLADITNGTKENKGEKNFALVEKQVSEDSVKSLSTEEHRSPEFEPLLVRLKAKIQEMKEKDTDPLSDKDGNSHVCKVCFESATAAVLLPCRHFCLCKPCSLACSECPLCRTRIADRIITFT

SEQ ID NO: 9515 - protein, 90 aa, Zea mays
  Clone ID: TF_ZmC35583_3.pep
SLSPEEHRSPEFEPLLVCLKAKIQEMKEKAPDPLSDKDGNSHVCKVCFESATAAVLLPCRHFCLCKPCSLACSECPLCRTRIADRIITFT

SEQ ID NO: 9516 - protein, 231 aa, Zea mays
  Clone ID: TF_ZmC552193_1.pep
MRPRRRALFPLHSAGAGACGDPWADCQTPPPVPSTPDSGPGPSPSLPPYGDLPCPPVLSPSPSPSPAPAHNGRRNQGGTQGYGPPPGAGDHDRRHLVKYALIAAGVFAFVCLILLGVSVAVRRRQVRRRRQALLAPPIPFPEGAANVGGGGGHDHGWDGAAGVVHHVWNIRTVGLDEASISSIAATRYRAGAGLLGAADCSVCLGEFQDGELVRLLPKCAHAFHVPCIDTW

SEQ ID NO: 9517 - protein, 151 aa, Zea mays
  Clone ID: TF_LIB4738-102-Q1-K1-D9.pep
MSGQSSSSYGDTDPGTDRAYSTTSSSIRWGPHGRGMTACLVVVNVVLVALVYLYFWRVFSRRSAASPSAANPTDHDDDASSTSTPPSPLSSQDQHGRIVASLPTFVVRSGSGAGAECAVCIAELRDGDEGRALPRCGHRFHAACVDAWLRL

SEQ ID NO: 9518 - protein, 215 aa, Zea mays
  unsure (1)..(215): unsure at all Xaa locations
  Clone ID: TF_ZmC35583_1.pep
SLFVEDMKIELQVRRHREAALEAALAEKEXCEEEDIDPXTDKDGNSHVCKVCFESANEKELPLEKDLSGMWVLVATWKRGALGISDLNVDDRTVNLADITNSTKENKGGKNFALVEKQASEDSVKSLSSEEHTSPEFEPLLVRLKAKIQEMKEKDIDPLTDKDGNSHVCKVCFESAAAAVLLPCRHFCLCKPCSLACSECPLCRTRIADRIITFT

SEQ ID NO: 9519 - protein, 157 aa, Zea mays
  Clone ID: TF_ZmC9878_2.pep
MYNHELLSDTMVRQAAMAVKCMLLLYYKNCRGRNYRRQGQMLTLVEYLLLLYRALLPTSVWYRFFLNKEYGSLFSSLTTGLYLTFKLTSVVEKVQSFLAAVKALSRKDVHYGSYATAEQTDSSVLAAGDMCAICQEKMHVPVLLRCKHIFCEDCVSE

SEQ ID NO: 9520 - protein, 258 aa, Zea mays
  unsure (1)..(258): unsure at all Xaa locations
  Clone ID: TF_ZmC11832_1.pep
MEHDAEARRGFARMGFGCKHYRRRCRIRAPCCGDVFHCRHCHNESTKDGHELDRHDVQSVICLVCDTEQPIAQVCCNCGVCMGEYFCAACNFLDDDVDKEQFHCHDCGICRVGGKENFFHCQKCGSCYSTTLRDRHCCIENSMKNNCPICYEXQYLFDSLRETSVLRCGHTMHLQCFHEMLKHDKFSCPICATPIFDMDKFFKALDAEMEASYLYTGKGWVVCNDCRDTTQVFSGVAGHKCCHCQSHNTCRVAPPVLP

SEQ ID NO: 9521 - protein, 350 aa, Zea mays
  unsure (1)..(350): unsure at all Xaa locations
  Clone ID: TF_ZmC4401_1.pep
MMIPWGGVGCCLSAAALYLLGRSSGSDAEVLRSVARAGSMKDLAAILDTASKVLPLVVAISGRVGSDTPLICQQSGMRGVIVEETAEQHFLKHNDAGSWIQDSAVMLSVSKEVPWYLDDGTGRVYVVGARSAAGLILTVASEVFEESGRTLVRGTLDYLQGLKMLGVSELXRVLPTGTSLTVLVTRGFYYPLAIKDDVGTIRIQRPHKGPFYASSKSIDQLIVNLGKWAKLYRIASMGFATFGVFLLAKRALQHFLERRRRHELQKRVLNAAAQRQAREAEGSKGTSDAEPNSKKDQLVLDICVICLEQEYNAVFVPCGHMCCCMACSSHLTNCPLCRRRIDQAVRTFRH

SEQ ID NO: 9522 - protein, 343 aa, Zea mays
  Clone ID: TF_ZmC4401_2.pep
MMIPWGGVGCCLSAAALYLLGRSSGRDAEVLRSVARAGSMKDLAAILDTASKVLPLVVAVSGRVGSDTPLICQQSGMRGVIVEETAEQHFLKHNDAGSWIQDSAVMLSVSKEVPWYLDDGTGRVYMVGARSAAGLILTVASEVFEESGRTLVRGTLDYLQGLKMLGVKRTERVLPTGISLTVVGEAIKDDVGTIRIQRPHKGPFYVSPKSIDQLIMNLGKWAKLYRLASMGFATFGAFLLAKRAIQHFLERKRRHELQKRVLNAAAQRQAREAEGSIGSSDTEPNSKKDQLVLDICVICLEQEYNAVFVPCGHMCCCMACSSHLTNCPLCRRRIDQAVRTFRH

SEQ ID NO: 9523 - protein, 125 aa, Zea mays
  Clone ID: TF_ZmC4401_4.pep
HVCGRLYRIASMGFATFGVFLLAKRALQHFLEKRRRHELQKRVLNAAAQRQAREAEGSKGTSDAEPNSKKDQLVLDICVICLEQEYNAVFVPCGHMCCCMACSSHLTNCPLCRRRIDQAVRTFRH

SEQ ID NO: 9524 - protein, 260 aa, Zea mays
  unsure (1)..(260): unsure at all Xaa locations
  Clone ID: TF_ZmC64108_5.pep
MLTVPHAHERLRGDEENHQAERGWGGAQMDLERSPPASSAEAPGDGGGGGAAACSICLDAVLARGAGRSVAKLQCGHEFHLDCIGSAFNAKGAMQCXCRKIEKGRWLYASGHRASVDIDMGGWVTSDNYDITSELPFGFQWCPFSGFTRLASMFEEREAELTYHTTGDRSSAASSSLVCPYLALRGFLHPVHVPSTSNPGAESTSFRRHATGLEGHATLDLNNAQLFHANESINHDSEHRHLSNLVSGIPEYSMTFGIGL

SEQ ID NO: 9525 - protein, 99 aa, Zea mays
  Clone ID: TF_21210971.pep
LLYEPRSLIYRLPMNLSPDNQCTSKPRQGRGRGADRQRGGNLPLPTICNKSEKNVYVHRSSIWRALVWPRGTHTTSPIFTGRIYRELAGLDHLYFQNVI

SEQ ID NO: 9526 - protein, 66 aa, Zea mays
  Clone ID: TF_LIB3592-075-Q1-N6-G10.pep
QGKKPPRKRCVFCQMEYRKGIFQMTFPCKHVYHASWVTKWLGINKVCPVCFAEVPGEDLEAMSHQL

SEQ ID NO: 9527 - protein, 201 aa, Zea mays
  Clone ID: TF_ZmC518526_1.pep
MWSFASNAIAGSIKKKVQPSKGSLSNPDCSDDDGSSCASREEGLECPICCESFNIVENVPYVLWCGHTMCKNCILGLQWAVVKFPTLPIQLPLFVSCPWCNLLSFRLVYKGNLKFPRKNYFLLWMVESMNGDRAKFHSSGHEERQSVCPSSGGTSSSQHHRRTPTARAETSSSARDRNAAANTPNTASVSLQKLMVCFVQL

SEQ ID NO: 9528 - protein, 228 aa, Zea mays
  Clone ID: TF_ZmC2009_3.pep
GPEEVPYLPEEAHSKTATPGVPPIALVAQCRVILLQVLPYRARGAGGYWGPGAELHPHPPTRTHFAGGEHHQDSSIFYCNTMNSHGAGSHSRLLDLNYPPAEGAGEGASRFSSIPVSHREGSSSMPVQHIQASSSTPPATGEPRIGMRSCPIDVEAIDDDAVIYSSRPLPRARQQLTTTESITIIIDDDSETNLETAGDALDEHVNLLLSLGIERSHEPTSATNTFPG

SEQ ID NO: 9529 - protein, 182 aa, Zea mays
  unsure (1)..(182): unsure at all Xaa locations
  Clone ID: TF_ZmC9505_3.pep
MIPRTSSVSAAAAPSPPAWQSASSSDGMFPGPGSSGQQQLAISNGVLLAAVIFLFMVVVFVFLLYLYAKRYLGANPLLAPSSPSSRFLFVAASPLPQRGLPASVLQSLPVTVYGSPGGKDKDALECAVCLSEVGDGEKVRTLPKCSHGFHVECIDMWFHXHDTCPLCRAPVGDLDALPREEP

SEQ ID NO: 9530 - protein, 110 aa, Zea mays
  Clone ID: TF_cC-zmpo14820003g11d1.pep
SVVVPRLRSDGIHHDDAASCPVCLEDYAPGQRAREMPCMHRLQRNSIGPRLKRHICCPVCRLHLTATGYRRSCSVRDGVYLNVDPDRDGHDHGRCDGRASCPGNAYLACT

SEQ ID NO: 9531 - protein, 472 aa, Zea mays
  Clone ID: TF_ZmC84167_1.pep
GKQSSSASAVLERKCRSFSDSTTSNLKGSSRVAKGFAASISGSEVSVDLSFTGTLSPSPSFDAKVVSNSNSAPAASTDLSLALPSSDSLTPSLSHDSNTEVVDSSSKINFSYDEEQKVWIPQDKKDEIVLILVQRQKELQAHTRDWTDWAQQKVMQVAHRLAKEKDELQSLRKEKEEADRLQEERHHLEESTRKKLLEMESAISRANAQLEKAEASARRREVENAQLTLQMEAAKRHAAESATNISELLKKDENSRKRSQRWESDRALLQEDLAAQKSRLSRVQEHLQHAKELKDQVQARWKQEEAGKIEVIALVTSKKKEREQIETSMRSEENLLHLKAANDTERYKSEIRALEQRIAQMKVSLDSSKVAAPKWGADNKTYALHLSEGRKNSSAQILSNIAVPQDPSFDDIQRDRECVMCLSEEMSVVFLPCAHQVVCAKCSDLHEKQGMKECPSCRTPIQRRVRARPAGC

SEQ ID NO: 9532 - protein, 472 aa, Zea mays
  Clone ID: TF_ZmC12187_1.pep
MQRRRGHTWAGVGKTAQAAAAHAALFCFTLLLALRVDGRTAYSWWIIFSPLWLFHGIVARGRFSMPAPSLPHGRHWAPCHSIVAAPLLIAFELLLCIYLESIRVRNHPSVDLKIVFLPLLAFEAIILIDNFRMCRALMPGDEESMSDEAIWETLPHFWVSISMVFLIAATTFTLLKLSGDVGALGWWDLFINYGIAECFAFLVCTRWFNPMIHKSPTHGEASSSSAIRYRDWESGLVLPSLEDHEQEKLCGLPDIGGHVMKIPLVAFQVLLCMRLEGTPPSARYIPIFALFSPLFILQGAGVLFSLARLVEKVVLLLRNGPVSPNYLTASSKVRDCFAFLHHGSRLLGWWSIDEGSKEEQARLFYTESTGYNTFCGYPPEVVRKMPKKDLAEEVWRLQAALGEQSEITKCTKQEYERLQNEKVLCRICYEGEICMVLLPCRHRTLCKSCAEKCKKCPICRVPIEERMPVYDV

SEQ ID NO: 9533 - protein, 252 aa, Zea mays
  Clone ID: TF_ZmC22071_1.pep
MESNTTPFAAVGTAAEEASTRRVANRIIRALQHQLRLLHRAGAEFFVLGVTGNVYTVTLSTTPACTCPDPAVPCKHILFVLLRVLGLSLDEACVWRQTLHPCQVARLVGTPTYPDVLAGARARERFHQLWSARPANNVADDRQEASSHRPLDGAACPVCLEEMAPAQPSQGSGATAQAILTCRTCRNAVHAECFTRWKRSRSRRAATCVVCRSRWKKPNREHEHEQYMNLAAYMNDDGDVTMLSADGWLCAG

SEQ ID NO: 9534 - protein, 66 aa, Zea mays
  Clone ID: TF_ZmC14225_2.pep
VSAADVGSLSFLYVQSRCGVCSRGVKSGGSSAVFTDDCSHAFHLPCIVGHARSCCDNRVLFCPVCA

SEQ ID NO: 9535 - protein, 165 aa, Zea mays
  Clone ID: TF_ZmC35655_4.pep
HIPSRAFDNFQFVNFSEIMSKNMAQSRKEAAFALSALMEIPQQYKATVELGILGRRSSKSPNRVPLPPPSASHDAYSYSSKSFSKPTTYPQSSSSSSAYPQYGTPHTATPAAPSSTYDNQVCPICLVNPKDMAFGCGHQTCCDCGQSLESCPICRTPITTRIKLY

SEQ ID NO: 9536 - protein, 102 aa, Zea mays
  unsure (1)..(102): unsure at all Xaa locations
  Clone ID: TF_LIB3591-068-Q6-K6-G10.pep
MHVFLQSNVLRGDSSLAKLAQLKEFSHYFRRITACGGGEXFYHSLNAGDEDDDHTCCICYNCDSDATFQPCHHRSCFGCISRHLLNNQRCFFCNAVVTSVTR

SEQ ID NO: 9537 - protein, 141 aa, Zea mays
  Clone ID: TF_ZmC12187_2.pep
KVRDCFAFLHHGSRLLGWWSIDEGSKEEQARLFYTESTGYNTFCGYPPEVVRKMPKKDLAEEVWRLQAALGEQSEITKCTKQEYERLQNEKVLCRVCYEGEICMVLLPCRHRTLCKSCAEKCKKCPICRVPIEERMPVYDV

SEQ ID NO: 9538 - protein, 393 aa, Zea mays
  unsure (1)..(393): unsure at all Xaa locations
  Clone ID: TF_ZmC22395_16.pep
FKISCSHCCLRSIPYEICPLALALLQSPSPCGPIHPAPIPRRWSCANAERRRGFTASSIRSPSVACAYASRNISYVWXRTMLNGLLILSMTGHNTVRLAILFSKVELKKQHDWVACIFPTQTAPDGYVCPSCSAPIWPPSSIKDTGSRLHTELKEAIVQTGMEKNVFGNHYVTIAKADTQTPPAFASDPLKTLSNRDDREFNSANAAKDAALPSTLHSGMYSSAVGSETTIHVDPEIVEIEGSSPVSTQFSVQDSNFIRSPSPHGPGAMTRXGANTVDRQNSEISYYADDEDGNRKKYTKRGTFRHKFLRMLLPFWSSALPTLPVTAPSKKESDALEGSRSRHQRSSRGLASFKLMSDSMRCTATSHLFIQFHGCTEKMRRCQEKVDMSMCLS

SEQ ID NO: 9539 - protein, 56 aa, Zea mays
  Clone ID: TF_ZmC89425_1.pep
EAADGVRRLGNCAHAFHARCIDRWIDLVRVTCPLCRSHLLPRRRAGLLAMARLGDG

SEQ ID NO: 9540 - protein, 93 aa, Zea mays
  unsure (1)..(93): unsure at all Xaa locations
  Clone ID: TF_700381537H1.pep
SSIIPIHSYHYGDQYDGCVSSLYQCEDVDKLRVLPCGHGYHSRCVDSWLTQTRKTCPIGNQPVHRGPGDXYQEGETQGRVEGDQVDPRDHPSS

SEQ ID NO: 9541 - protein, 44 aa, Zea mays
  Clone ID: TF_LIB3158-018-Q1-K1-F12.pep
ARQFVRALPQCQHIFHVRCIDSWLLRHASCPLCRAGVHIDHIHM

SEQ ID NO: 9542 - protein, 206 aa, Zea mays
  Clone ID: TF_ZmC435619_1.pep
MASDDEEACDYFYDDDDDAEEDAAAGLEEDSSLPTPEGRADYWAITQDTVFAAQKQDLSTVMNLLNINQHQARALLIHHRWSMDGIYDSLDMGRERMLRNSGIVLQEVNSIAAAGSMTPWRTVTCKVCFEDFSMDAVSTMDCGHCFCNDCWTEYFHAAVESGKKQIRCMEVKCSAFCDEDLVRFLLVQKYPDMAKNFNRFLLGSYL

SEQ ID NO: 9543 - protein, 70 aa, Zea mays
  Clone ID: TF_uC-zmflb73019d10b1.pep
MGLQIQYMSMQVRGLPCAHNFHVECIDQWLRLNVKCPPCRCSVFPNLDLSALNNLWSTSEPDHSSCSASN

SEQ ID NO: 9544 - protein, 72 aa, Zea mays
  unsure (1)..(72): unsure at all Xaa locations
  Clone ID: TF_21210134.pep
ERSIFGAHQSTIYDPIPSQTTGVAVLVRECAQDFQVGEKVRXLPDCWHVFHVPCIDGWLIKHGSCPLCRRKL

SEQ ID NO: 9545 - protein, 109 aa, Zea mays
  Clone ID: TF_ZmC11824_5.pep
EPPRMDEYQECSSCCLHFLSNKQLQVMIHQDYQVYSDISSTKIVWSQTGQVSFRSIHSRMQQRWKWCSHLVTERGFSSSYYIYQLVLYRLQMFSTNSNNSHPLYTNLKT

SEQ ID NO: 9546 - protein, 171 aa, Zea mays
  unsure (1)..(171): unsure at all Xaa locations
  Clone ID: TF_LIB3066-048-E2-R3A.pep
MTSPPTPLRALARQAMQSPSPPTKVGPPPLPPPPLPAVDAAVIMGVLTAVLLALFLFLIYAKHCKQRGPGERPDGLGLGFAPSSYDRCRCGLSSSTVGALPXSGSALVTSTWSAPLSATVCLGAFNAAEVLRVMSACRHAFHSECIHAWLLAHSTCSVGLRCVTGVRVHDS

SEQ ID NO: 9547 - protein, 206 aa, Zea mays
  unsure (1)..(206): unsure at all Xaa locations
  Clone ID: TF_LIB3597-002-P1-K6-C5.pep
SSCPNRCRLRRCLNLLGAVHPATSTQAWVTTNKLKLSANVRESTSGGSTNNTARVRCGGGRCFDLPQEPIVPLCGHLFCWPCIYRWLHIHTHSPESPVSTDLVEEDTLVPLYGXRGKDRVDSRXKNMPIGEINNRPTGQRPDLAPQAVATQQLCHCQVQCDSRLIGTRMHLANARWRNYAFXAAVWGLYPMLSFQXHVFPHTATYA

SEQ ID NO: 9548 - protein, 80 aa, Zea mays
  unsure (1)..(80): unsure at all Xaa locations
  Clone ID: TF_3340896.pep
GGIMIECGTNQPIEKVLAAEDAECCIXVSAYDDSAELRELPCGHHFHCTCIDKWLHINATCPLMNAVRLTMPICFNFCSV

SEQ ID NO: 9549 - protein, 191 aa, Zea mays
  Clone ID: TF_ZmC6478_1.pep
GRPCPEPIFTPSRCPNPWLRLRRRDPGGLLPSSLCLRAVPPTLLNPRRATRVQAPPGCEGGTGAGEPQSAPPHSAPSEAPSTAGAAKQASVRLAESRGGGSNQQGSTMKVKILQWHAVASWTWDAQDETCGICRMAFDGCCPDCKFPGDDCPLIWGVCNHAYHLHCILKWVNSQTSTPLCPMCRREWQFKG

SEQ ID NO: 9550 - protein, 42 aa, Zea mays
  Clone ID: TF_LIB3206-072-P1-N1-G5.pep
AKGGAFIPCGHTFCRACARELRTGRGRCPLCNATIREVLNLF

SEQ ID NO: 9551 - protein, 92 aa, Zea mays
  Clone ID: TF_ZmC240975_1.pep
MADFRVVSAQFLMVDIDPVGGLILQDFEAGETARSLPECGHTFHLPCIDVWLLRTRGRGLSRCAHFSLGCLWATVSRCACTRVPDQEQSIVG

SEQ ID NO: 9552 - protein, 226 aa, Zea mays
  Clone ID: TF_LIB4758-090-R1-K1-B1.pep
LEAGRDSPLLQTSRGLAVAAEDIEAASNAIERDAGETRESREGAREGTPNPRRRLVLGLSGWRHGECRARLRGANRRRRRRRRLLRDAATITECLHTFCRKCISEEFVNKEVCCCPVCSIDLGCAPLEKLRIDHSLQYVRSKVFPSKKRKVEDPEVTSPITSPIKTKVRSLSSLTKHAPQMSMQKCLRKRRTKASCLQNLPLHSTLRSSNITKKSVETFRVSLSSS

SEQ ID NO: 9553 - protein, 263 aa, Zea mays
  unsure (1)..(263): unsure at all Xaa locations
  Clone ID: TF_ZmC21544_5.pep
MELAEAPAPVPDEDGLDERGVALHLPRLLAGVVSGALTGLFALAGALTGAVTGAVAGRASDSGGVLRGAGLGAVAGAVLSIEVLEASRAYWCSSDRLGSHGGASSMADFIEQLLRARFVQEQFTASGYASYRWQLSISYFGQDDLYNIFGDISSEALSQESLKXLPHHMNAWLECNDRFHTEICLLLNAASGLGWHLFSSSSSNNYKQRRRPTXWLASFVLPQDIVAGKTARRLPGCFHAFHQPWVDKWLVGHGSCPVCRQRV

SEQ ID NO: 9554 - protein, 132 aa, Zea mays
  Clone ID: TF_LIB4605-011-R1-K1-H12.pep
GSETSGMANRADERGGGTNSDGGGGGSKDAGSFKCNICLDLAQDPVITLCGHLFSWPYLYERLHAHAHYKECAVSKGDVQEGKLAHLYGRTGSCAVPRARSGATVEIPIRPTEQSASTALLPDHNNHYPHQN

SEQ ID NO: 9555 - protein, 185 aa, Zea mays
  Clone ID: TF_UC-ZMROTEOSINTE105E03_FLI.pep
YTATFQRLESRPNNPAQGVAPLGSTNPSVNINDNSLNLVSRPPPYDTDPRYARVQREGLVSRREKSINLAQEESLALRRNASSSGIEHLAAQKKRNSTENEGEYKVHRSESTKSLSAKAYSSSYAVVASEDEDVCPTCLEEYTPDNPKIITKCCHHFHLGCIYEWMERSDTCPICGKEMEFCESP

SEQ ID NO: 9556 - protein, 225 aa, Zea mays
  Clone ID: TF_ZmC4212_1.pep
MGGFCCCLSAEEFDEYVYPNNPIYRQCVSLRHLFHSIFGGYTATFQRLESRPNNPAQGVAPLGSTNPSVNINDNSLNLVSRPPPYDTDPRYARVQREGLVSRREKSINLAQEESLALRRNASSSGIEHLAAQKKRNSTENEGEYKVHRSESTKSLSAKAYSSSYAVVASEDEDVCPTCLEEYTPDNPKIITKCCHHFHLGCIYEWMERSDTCPICGKEMEFCESP

SEQ ID NO: 9557 - protein, 163 aa, Zea mays
  unsure (1)..(163): unsure at all Xaa locations
  Clone ID: TF_jC-zmXLIB3526060ac08b1.pep
QVVCSLCGTEQEVCDRTFTNDLLPDIICVSPVSSWFLVRWQVRQVCINCGVCMGKYFCGLCKLFDDDVSKQQYHCNGCGICRIGGRENFFHCSXCGCCYSIALKNSHACVEGAMHHDCXICFEYLFDSTXDVSVLPCGHTIHVKCLKEMEEHXQFACPLCSKS

SEQ ID NO: 9558 - protein, 190 aa, Zea mays
  Clone ID: TF_ZmC213505_1.pep
MGFPAGYSELVLPKQLLHLLLLLGYVRRFLLWAFDAVGLGDLLDLGDDHQAPPPPQQPQPQQHRRAEFRTAMPAMVIEEALPVARFDELEARVVGGDCAVCLGGIGGGDEVRRLGNCRHAFHRACLDRWMEHDQRTCPLCRAPLVPGALWPADASDLDFSYLGAPVPSPTLLPTLLRPHELLLLAGLGGY

SEQ ID NO: 9559 - protein, 178 aa, Zea mays
  Clone ID: TF_ZmC195726_1.pep
MSTAGSGSLRPAVVEDTGRHWAPHGPVLTACVVAINVLMILLVFVFFWRYFSGKRGPSASSGGGGDGDDDDASSSASLPVASPWAWSSRRRSSKDHGPQPVDDDVASALPVYLYSSSAGGEGGKAPECAVCILELRDGDSARLLPRCGHRFHADCVGAWLRLHTTCPLCRASVVAPRA

SEQ ID NO: 9560 - protein, 444 aa, Zea mays
  unsure (1)..(444): unsure at all Xaa locations
  Clone ID: TF_ZmC22619_1.pep
MLIDGMRSVVATVSGYHGDERHRLVNLIAETGASYVGSMSRSITHLVCWRLEGKKYDIARRLGTRVVSHWWFTECLREGRRLPEDPYFXCGEEAGPVPELPSRSRKQKRRKRMKHVNTSTDRDVLNLQDNVSSVMARQCLHISSHRTSQSTSKHKGNLSRLLHNEVPIRMGERNNLTENSENDSLSDSFSEPQTSDTLCIEAQRKSSAPSSSLRRSTLDSLYEFGETSRHEPAGRTKLDNVELRETSRSLLPFDLSGQEPAFCTQEQVDKCSLGTLADNKPMEKSSNMERQPELSCVICWTDFSSTRGILPCGHRFCYSCIQGWVDCLASRGKVSTCPLCKASFTWISKVDEAGTSDQKIYSQTIPCEASTDVFVPGNVGYDFSRPTSGQGACYQCHFREPEELLLSCHVCRSQWVHSYCLDPPLTPWTCMHCRDLRMLFHRYR

SEQ ID NO: 9561 - protein, 160 aa, Zea mays
  Clone ID: TF_ZmC11815_9.pep
MMGIPLVCYCLAVPKPVIAFCRLLSAVRDAALLMLAVVGLCRFPPDGAADAGHQPGEVKARLPAVEYGQLLAEHDEQQQSGDHDCDGDAASSDCIVCLETLEAADQVRRLGNCAHAFHRACIDRWIDLGRATCPLCRSDLLPRGPGWASRLGLGRLTRVR

SEQ ID NO: 9562 - protein, 264 aa, Zea mays
  Clone ID: TF_ZmC7432_2.pep
PNQARTLEIQDADPNQRPLPALPHHTTAYRHVGARYGRGRGGGAPPGAAGEAREEAALRGGRKRARRRRPGPLRRRLSSPPPPAWLVAQNLTRELSILTESSGDQDGSNNRTVPRAEEITPAIMNLLETISGDRDLETALEESLQGIIEHPQRAPPASKEVVANLPVIAVTEEVMSRLGSETECAVCRENLVVDDKMQELPCKHLFHPLCLKPWLDENNSCPICRHELRTDDHVYESRKEREREEEEDRRGAANAVRGGEFIYI

SEQ ID NO: 9563 - protein, 234 aa, Zea mays
  Clone ID: TF_LIB5074-010-R1-XP1-A11.pep
RPGPECTRPRALHGGAASSPRPGAASAPVRPPPREPFPMLLPVFILFVLLLCFLSIFLLRDLLHFLSLWLRRRRRLRADADAASDATPDTHASHKPAGLDPAVLATFPTVRWFEETHRPASGQAECAVCLSEFAAGDAVRLLTVCRHAFHTACIDSWLGAHTTCPVCRSELDAPAATPRYGGGGRIAILVDDQGDGSAAVADTDHAESSPAKRWRAIAPLTDDIHIVPKSPSAR

SEQ ID NO: 9564 - protein, 508 aa, Zea mays
  Clone ID: TF_ZmC4578_2.pep
MSYRNMLWTHQSVNPEWEQGHVQVQPRSSYYAGTVSDSSNLGMQVAVGVPVNTVNVGICDLWNHERLPVHNSYPHASVTSRFVLPTSMYNPCMPAAAVNIYIPQTQSFGLGNVLPPSLHSQVSTGTIDENNSSFNFGDSAIGSMKRKTAVVAGNHHILHGFAGSSSSVHVPQNPVYGPWNASSQSNCLPSSAASNLPEYHNSNGWPFLEESSANASNSFTSVDACPELVPHGNNLYPACHIIQCNTWVPQTASHGIPQWGYGNVMVNPPGTVDMPNGNIQDYQAGHSSIHGPLPHFCQIPLRSMQVPQIQVPHQQFIGNNVVHGLNPSAAGLPLDPRMLAFPFNDEHTFGHQVHPPLINQANNGALRILPYQNATVMDHSRIYEAGHVIDEHRDMRLDVDNMTYEELVALQEQIGDVNTGLTESYIQENLRSTFHVPGAASISDHFCELSLENDACIICQEEYEARELIGALECGHKYHEDCIKQWLMVKNVCPICKTTALSSDRRNG

SEQ ID NO: 9565 - protein, 157 aa, Zea mays
  Clone ID: TF_LIB4740-104-A1-K1-A8.pep
MSGGNAWSPLPSHGFGSESSGMANRAGEPVARTNSDGGGGGSKDSGSFECNICLDLAQDPVVTLCGHLFCWPCLYEWLHVHAHSQECPVCKAVVEEGKLVPLYGRGGSSAVPRARSVAGVEIPSRPTGQRPSTAPQPDHNNHYPHPNPWVHGAGAPP

SEQ ID NO: 9566 - protein, 179 aa, Zea mays
  unsure (1)..(179): unsure at all Xaa locations
  Clone ID: TF_LIB4826-003-R1-N1-E5.pep
GRVPRQTAVASHALRLVPCSARPNFAAGGSKDSGSFECNICLDLAQDPVVTLCGHLFCWPCLYEWLHVHAHSQECPVCKADDEEGKLVPLYGXRGGSYAAPRARSEAGVEIPNRPTGQRPSTAPQPDHNNHYPHHNPWVNGAGAAPVANGRRGSYPLSAAIGGLIPLMSFRGPGFPQAT

SEQ ID NO: 9567 - protein, 220 aa, Zea mays
  unsure (1)..(220): unsure at all Xaa locations
  Clone ID: TF_LIB4828-091-A1-N1-E3.pep
RGRPETAVASHPLRLVPCSARPNFAAGGGSKDSGSFECNICLDLAQDPVVTLCGHLFCWPCLYEWLHVHAHSQECPVCKAVVEEGKLVPLYGRGGSSAVPRARSVAGVEIPSRPTGQRPSTAPQPDHNNHYPHQNPWFNGAGAPPVANGRWGSYTFSAAIGGLFPLLSFQVHGFPQATAYGPAAGFPYGYXHSFHGWHGHGFPRQAXQGQQVDAYLEVLL

SEQ ID NO: 9568 - protein, 246 aa, Zea mays
  Clone ID: TF_ZmC4170_1.pep
MSGGNAWSPLPSHGFGSESSGMANRAGEPVARTNSDGGGGGSKDSGSFECNICLDLAQDPVVTLCGHLFCWPCLYEWLHVHAHSQECPVCKAVVEEGKLVPLYGRGGSSAVPRARSVAGVEIPSRPTGQRPSTAPQPDHNNHYPHQNPWFNGAGAPPVANGRWGSYTFSAAIGGLFPLLSFQVHGFPQATAYGPAAGFPYGYGHSFHGWHGHGFPRQAPQGQQVDAYLKVLLLAVGVLVIASLIAF

SEQ ID NO: 9569 - protein, 247 aa, Zea mays
  Clone ID: TF_ZmC4170_2.pep
MSGGNAWSPLPSHGFESDSGGMGSRAGEPVARTNSGGGSSSKDSGSFECNICLDLAQDPVVTLCGHLFCWPCLYEWLHVHAHSQECPVCKAVVEEGKLVPLYGRGGNSTSPRARSVAGVEIPSRPTGQRPSTAPQPDHSNHYPPQNPWFMGAGAPPVAGGRWGNYTFSAAIGGLFPLLSFQVHGFPQVSAYGPAAGFPYGYGHSFHGWHGHGYGFPRQAPQGQQVDAYLKVLLLVVGVLVIASLIAF

SEQ ID NO: 9570 - protein, 218 aa, Zea mays
  Clone ID: TF_ZmC4170_3.pep
MSGGNAWSPLPSHGFESDSGGMGSRAGEPVARTNSSGGGGSSKDSGSFECNICLDLAQDPVVTLCGHLFCWPCLYEWLHVHAHSQECPVCKAVVEEGKLVPLYGRGGNSTSPRARSVAGVEIPSRPTGQRPSTAPQPDHSNHYPPQNLWFMGAGAPPVAGGRWGNYTFSAAIGGVFPLLSFQVHGFPQVSAYGAAAGFPYGYVQSFHGWHGHGYGFPR

SEQ ID NO: 9571 - protein, 275 aa, Zea mays
  unsure (1)..(275): unsure at all Xaa locations
  Clone ID: TF_ZmC4170_4.pep
PTRPPTRPPTRPPTRPVRDRANLQPFPLRPPALSLPQAGVRSTAVAPPSWRPSGDGSRIASPPPRSLLGSKDSGSFECNICLDLAQDPVVTLCGHLFCWPCLYEWLHVHAHSQECPVCKAVVEEGKLVPLYGRGGSSAVPRARSVAGVEIPSRPTGQRPSTAPQPDHNNHYPHQNPWFNGAGAPPVANGRWGSYTFSAAIGGLFPLLSFQVHGFPQATAYGPAAGFPYGYGHSFHGXWHGHGFPRQAPQGQQVDAYLKALLLAVGVLVIASLIAF

SEQ ID NO: 9572 - protein, 157 aa, Zea mays
  Clone ID: TF_ZmC4170_5.pep
MSGGNAWSPLPSHGFGSESSGMANRAGEPVARTNSDGGGGGSKDSGSFECNICLDLAQDPVVTLCGHLFCWPCLYEWLHVHAHSQECPVCKAVVEEGKLVPLYGRGGSSAAPRARSVAGVEIPSRPTGQRPSTAPQPDHNNHYPHQNPWFNGAGAPP

SEQ ID NO: 9573 - protein, 116 aa, Zea mays
  Clone ID: TF_ZmC4170_8.pep
LISASRRSDSGGMGSRAGEPVARTNSSGGGGSSKDSGSFECNICLDLAQDPVVTLCGHLFCWPCLYEWLHVHAHSQECPVCKAVVEEGKLVPLTAVVGTPLTPCRVVAGVEIPSRP

SEQ ID NO: 9574 - protein, 93 aa, Zea mays
  Clone ID: TF_ZmC1176474_1.pep
DSQDTAPTLADMFETAAAGMPAAAIAALPVTAVTESTVTDASGEPIGCPICLQDFEAGETARRLPECGHTFHLPCIDVWLLRHASCPLCRRAV

SEQ ID NO: 9575 - protein, 122 aa, Zea mays
  Clone ID: TF_ZmC588778_1.pep
MLAVTVSQVVALLSKAAGAEAERWRRRCGGGHDRSAPSPAVGYCCVCISACRDDGDDVRRLPCGHAFHRDCVDRWLARCRRTCPLCRLHVAGGPTVGFVDQQQLQLSDDLVIWFSSLFVAGL

SEQ ID NO: 9576 - protein, 466 aa, Zea mays
  Clone ID: TF_ZmC15150_3.pep
MAGWTDSTGSGGRGSGGRGFTTPRYTTNSTNDMIHGGTSGGGGGSGRWRGGRSRGWPPPQPHHRYRRVDAVHRDSAPVSLSELQAASSTSSRHRYLTRSISADKSSASGTAGSTDTKEPDDKANRSAANFECNVCFDMAAEPVVTRCGHLFCWECLYQWLHVHSHHRECPVCKGQVADDAIIPIYGRGGSAASVDNAPPRPTGARVESTRQQQQQLPIFHPPNVFEFIGLGLAAAARGEHSTEQLLLPTFSHPTVFDDDDGHEWDMDLVNNGIDPLDLITPGTQDLDMDDYDGTIDFDDDDYEYDYHLAGATLFASAGTEASNPSSSQAHAGMINIRDNILGTATSIYHQQEFGYSGVRPHNNRGRRRHRNRARASANHSGADEMVIEDTSHFYLQNGGSSNISAGAAFRPNGGWTGRRGRSNLNSNSGGGSNLNSNSGGGSNMNSNSGGGRGGIQGTRRQRTNYN

SEQ ID NO: 9577 - protein, 108 aa, Zea mays
  Clone ID: TF_ZmC3359_1.pep
AAAYEVLVAGGEGLFLKTKPPAARSAVEALPSAVVAAGQEVQGDECAVCKDGVAVGQRVKRLPCSHRYHDGCIVPWLQVRNSCPLCRFELPTDDPEYESWKAGRTDAA

SEQ ID NO: 9578 - protein, 143 aa, Zea mays
  Clone ID: TF_LIB5072-065-A1-XP1-E8.pep
MVIVLAALLFALLFALGINSLARCLIRWARRAPAAEGGGGGLQKRVLRSMPVEVYGTAAVTVADVCAICLGEFADGEKVRVLPRCAHGFHVRCVDTWLLSHDSCPTCRASVLDGAKAATPAGGGSRRQGPQGSEAAAIAVVIG

SEQ ID NO: 9579 - protein, 294 aa, Zea mays
  unsure (1)..(294): unsure at all Xaa locations
  Clone ID: TF_ZmC17955_2.pep
MSAGRQAYWCYQCRQRVRPRGREMVCPYCDSGFVAEMDDVDALMSHFVGTDPDFHRDPRFGIMEAISAVMRHGMAGMNREVDVRGRPNFFSDLEMEFGSGPWLLFRGQLPGHLTEDNGFDVFVNGRRGGGGGGGGVGXRRANIADYFVGPGLDDLIEQLTQNDRRGPPPAAQSSIDAMPTVKITQRHLSGDSHCPICKEKFEMVSEEAREMPCKHLYHSDCIVPWLEQHNSCPVCRYELPSQGSATGASCSRARSTDQSQSSSSSSSSGRTSGRQRRKDPFSFLWPFRSSSSSR

SEQ ID NO: 9580 - protein, 191 aa, Zea mays
  Clone ID: TF_ZmC22858_1.pep
MGVHARSMSWYMGSPAPGSAAEGEGQRALRSSSGGSDGSFDTNMVIILAALLFALLFAMGLNSLARCLIRWARRAPAGEDGGAGGLKKRALRSIPVEVYGACGADGAAAVAADVCAICLGEFADGEKVRVLPRCAHGFHVRCVDTWLLSHDSCPTCRGSVLDGAKAAASAPAAGGNRRQGSEAAAIAIVIG

SEQ ID NO: 9581 - protein, 125 aa, Zea mays
  unsure (1)..(125): unsure at all Xaa locations
  Clone ID: TF_LIB3228-004-P1-K1-F1.pep
ALACVIGIAVCCCLPCIIGILYAVTDQEEGASEDDVNNLSKFKFRTMSDADKLAAGIAAPVGGVMTECGXCCICLCPYEDGVELLELPCNHHFHCSCIDKWLHINATCPLCKFNIVKSNLHREEV

SEQ ID NO: 9582 - protein, 401 aa, Zea mays
  Clone ID: TF_ZmC5544_1.pep
MEQATGVSGPEHIIDIPREIGPPASVSRSAGRENHEESNPVDRPSTRALVPALQAPSAIGAVPITGHTSGTRRNDNYVRRHRSPLNSGLWISIEVIVNFSQIVAAIVVLCVSRKEHPQAPLLEWVIGYTVGCFATLPHLYWRYIHRNIVNGEHESSHTPQGSAHNNSNEATHAASASERRRNAARNAVLANPRINALFDHFKMALDCFFAVWFVVGNVWIFGGRSSAADAPNLYRLCIVFLTFSCIGYAMPFILCAMICCCLPCIISVMGFREDTNNTRGASSESINALPTYKFKIKKRRHGSGSETEGQEGGILAAGTDKERSLSAEDAVCCICLAKYAHNDELRELPCAHCFHKDCVDKWLKINALCPLCKSEIVSSSGTSDARQSDQNTVPVQEIEMH

SEQ ID NO: 9583 - protein, 200 aa, Zea mays
  unsure (1)..(200): unsure at all Xaa locations
  Clone ID: TF_LIB4732-093-Q1-K1-A9.pep
MDWCLCCIRVYTLSIANSLYLGVTGILVYVLARSHSRTTSGIVVASVFLVLWVSIGAVIYASLCFAFFPWAALENARLCCVRCTAGWLRRPSGGGGSALPQYAARSRSHAMNELPGEPTVRAGEARVAAAADIPAYELRDDAWQGQPDGSSDCAVCLGEMVKRLPVCLHMFHQQCVDKWLNNNSTCPVCXXASCSRRCRR

SEQ ID NO: 9584 - protein, 397 aa, Zea mays
  Clone ID: TF_ZmC348_1.pep
MDAAAAAAAQMERHSSAAAHLERHSSAAAFVEGGVQDGCDDTCSICLETFSDSDPSAVTSCKHEFHLQCILEWCQRSSQCPMCWQAISMKDPTSQELLEAVEEERNDVQENHARTTTVFRHPLLGDFEVPVDADDAEIEERIMQHLAAAAAIRRSHRHARREGRRSSRAAAAHGHGHPQPQTQVLFFPSAGEATPGGSGSPSPHPRQEHAASSVVSPPPLPAVASAEGTDADSTASVGGAVGPDDSVSRSQSSPVNHDEAGPSADAQSFSDTIKSRLQSAYGRYKDSITKSTRGWKERWFAQSSAMSNLGSEMRREVGAGIAAVSRMIEKQLETRPDGSGTAPSPATASSPAHAHPGSDASSQGQGAAVPATPAAALNNATPAAAAALNDASSSSTA

SEQ ID NO: 9585 - protein, 245 aa, Zea mays
  unsure (1)..(245): unsure at all Xaa locations
  Clone ID: TF_ZmC5151_3.pep
DRHDTTDTMSTTTTKASDPGSAWFGSGARTRSAAGISHNARLVTTAVAAFVSVLGLALFLHLYVCHVRRRNRRRAAAVLPTTTXPRXXXAAPKRGLDPAAVAALPTVLYXDAGGADDGAECTICLGAVQEGELVRALPACGHVFHVPCVDTWFASSSSCPVCRAEVEPPPPPALSSSALFVQAEKVVQDAVKEEAGSSTPERGIGACASLMKMLSRERPAPRRPHADAGDLDDLERQQHSVAVNN

SEQ ID NO: 9586 - protein, 261 aa, Zea mays
  Clone ID: TF_ZmC17955_3.pep
MSAGRQAYWCYQCRQRVRPRGREMVCPYCDSGFVAEMDDVDALMSHFVGTDPDFHRDPRFGIMEAISAVMRHGMAGMNREFDVRGRPNFFSDLEMEFGSGPWLLFRGQLPGHLTEDNGFDVFVNGRRGGGGGMRRANIADYFVGPGLDDLIEQLTQNDRRGPPPAAQSSIDAMPTVKITQRHLSGDSHCPICKEKFEMGSEAREMPCKHLYHSDCIVPWLEQHNSCPVCRYELPPQGSATGASCSRARSTDQSQSSSSSSS

SEQ ID NO: 9587 - protein, 306 aa, Zea mays
  Clone ID: TF_ZmC42210_1.pep
VCPPSSICGCSEPASFPALIWSGSSISGMASSPVSYWCYSCSRFVRVSPSTVVCPECDGGFLEQFTQPPPRGGGGSGRRGTMNPVIVLRGGSLSGFELYYDDGAGEGLRPLPGDVQHLLMGSGFHRLLDQFSRLEAAAPRPPASKAAVESMPSVTVAGGGAHCAVCQEAFEPGAAGREMPCKHVYHQDCILPWLSLRNSCPVCRQELPAAATPDAEADAGLTIWRLPRGGFAVGRFAGGPREQLPVVYTELDGGFSNGVGPRRVTWPEGDGQVDGGEGRIRRLLRNLFGCFGHGSWPASSSQSRSG

SEQ ID NO: 9588 - protein, 226 aa, Zea mays
  Clone ID: TF_ZmC9753_2.pep
MDTDTDTTTSTGSRLHPAAGARAGVRSLAARGAESLVTCVFATVGTVLGAITGGLIGLATETGVLRGTGVGGITGALVSMEVVESLWRSDEPAIWSVVYVLDVIWSLLTGRLVREKVDPAVLSAVESQMSAADTPALHGDHADIFDTGGTNGMARVAMDALPVVRFTERSNVDANGDLIACSVCLQEFQAGDSARSLPVCRHTFHLPCIDGWLLRHASCPLCRRAV

SEQ ID NO: 9589 - protein, 240 aa, Zea mays
  Clone ID: TF_ZmC27511_1.pep
MSIPSMSSSSPSVGSPLPPAHDGGPGPLVWRQKEQPHPQPQHPDYSFTGRVLLTAVVILAILTVVFVLIRLLLYQFVARGRGRLAVGVRRSFGSFGMRSARHGLAASALAALPVTTYRVRGADDDGPSSASGGAGTGTADCAVCLSELADGEKVRALPGCSHVFHVDCIDAWLRSRTTCPVCRAEVRPKATADTRPSPPPALIDAAGGTLVVTVVGGAAETGDAHRTSVLGSGQPAGAVG

SEQ ID NO: 9590 - protein, 165 aa, Zea mays
  Clone ID: TF_ZmC3483_1.pep
GLPWRRTSPSWLSKVKGLNFPLPDEHQSRTRQIETDEMFARRLQEQLNQQQLGSQHSEATDTTIAWTLHERDAEHARFAAREGQSNMDLQTRLAVLDSLSEAFRNCEDTHSPDSDDDDYEDQIALGVVPMNPAIYAWTALLLVIHSGVCHACTSFTKSALTGGSG

SEQ ID NO: 9591 - protein, 160 aa, Zea mays
  Clone ID: TF_LIB4756-051-R1-K1-B1.pep
MQFAMSPDNLLFFCSVTASVAASFALVSLCRHLAHRRPQQPTADGLATSSSGGSAEPEELLPLSAVAAAVPTFMYNRLVRHCGKGASWTECAVCLGTIQVGAMVKLLPACSHVYHRDCIDLWLSSRSTCPLCRCRVGPPSETGAGQETARELAQPSPPIR

SEQ ID NO: 9592 - protein, 154 aa, Zea mays
  Clone ID: TF_ZmC12693_1.pep
MGFPPVCCCAPIPKPVVAFCNLLGAIKDAVLLTLAAVGFPHDAARGSADAHQPEEVKTRLPAVEYAQLLAEQQPSPATHAACIVCLDTLEAADEVRRLGNCAHAFHRACIDRWIDLGRTTCPLCRSDLLPSPRGRAGLLGLGRLASRLTRVRVW

SEQ ID NO: 9593 - protein, 119 aa, Zea mays
  unsure (1)..(119): unsure at all Xaa locations
  Clone ID: TF_LIB3066-035-Q1-K1-F7.pep
ICCCLTCIISDLGVHEDLDMNRGATTEAINTLVAYKFQSKRVHDGDVGGDGGGALXVGTDRKRAITRLKALCCICLITFXYYEDLGELSCAHAFHTECIDKWIQMNTLCPVCKAEIMGS

SEQ ID NO: 9594 - protein, 74 aa, Zea mays
  unsure (1)..(74): unsure at all Xaa locations
  Clone ID: TF_5761830.pep
SSPSSGLGAEPTCRVCLEWLEAKXEVRRLGNCTHAFHTRCIDPWIDLGEVTCPLCRSHLLPRRRAGLLGMARLG

SEQ ID NO: 9595 - protein, 540 aa, Zea mays
  Clone ID: TF_ZmC28561_1.pep
MAGHHHNNTHASRMDHVNRFQSEAQPFGPKLFMHSRTDAANGALPSGYVGAPIRPNGIPFSSHTGQSHIQHSDAPGTMLASYSGYPLAGSSSSTYAPHNTHHLPALSYPHRSDDNFILSSHMDDRRVALKRRNPIIYPVDGVNNGSCYAGSSSNPQFPCYMPPNPIPAPEPCPPRITSNMGSSYWTDQPFGSNGGSQRNVRGRHDHNPIHLGHNPGVACATSSTHGPPHHANVIGPQSTAVPQNRAYFSIPPRVTAPGSDGNCSMVFREGTYYSAPQRTNINAPPVLAPPGSSDSLHFVHGGYAPRAAPPNSISTYPAPAFATPNNSVTVTHEPDIPCYRPAVPGYPPATSAAAAAASVHAEGAAASSRHLGHVALGSSGSARSRRLRDSYHAFRPLVIEENNLRGPATERFMMLNQLFIHESREDSDPHWDMRLDIDDMSYEELLALGERIGNVNTGLADEKLSSCVTEIPCCSSARTHDDNESARCVICLEDYKFEDSVGKLKCNHKYHADCIKKWLQVKNACPVCKASAADDGGGTE

SEQ ID NO: 9596 - protein, 246 aa, Zea mays
  Clone ID: TF_ZmC3771_1.pep
MDSVPSPSSSTRATAAPGPCCRFDALRRACARHAAAAARAAGWALGALLTCVFAVVGSLVGIFIGAFMGMSTESGMFRGAGVGAVSGAVFSIEAVESCIEIWRSSHSGKYSILYVLDIISSLFSGRIVWEKVSPALQRAVQSQMSLMSTPFIDNNDLFETGSTGGMSRALIDRIPKMRFSAASNCDKETDSSCCSVCLQDFGAQQFVRALPQCQHIFHVRCIDNWLLRHASCPLCRAGVHIDHIHM

SEQ ID NO: 9597 - protein, 260 aa, Zea mays
  Clone ID: TF_ZmC8011_1.pep
MEAGRMDQPFMAAINSQPFVEDIEPVKKASGDMPATTGSGCFECNICLDFASEPVVTFCGHLYCWPCIYEWLRPGVESAASDNSSSARRQCPVCKATLSTDTLVPLYGRGGNSKKSLDGMAIPRRPMVHRETVEQQNAQSNVNDQHYHQSMEDNSQRQPLLQAHHHPIPTGFDFIYPPAPVGRGLIHSTAGGVLGGMAEIVLPLALRGQMPASLHYTNPYHVATQNVNPRLRRHQMEIERSLHQIWFFLCVFVVLCLLLF

SEQ ID NO: 9598 - protein, 343 aa, Zea mays
  Clone ID: TF_ZmC8011_3.pep
MYFDHYWRLCLLPQPLPQKQAHLNPYRCDWRYPPAPVGRGLIHSTAGGVLGGMAEVVLPWVLRGQLPASLHYTSPYHVAAQNVNPRLMDQPFMAAINSQPFVEDIEPVKKASGDMPATTGSGCFECNICLDFASEPVVTFCGHLYCWPCIYEWLRPGVESAASDNSSSARRQCPVCKATLSTDTLVPLYGRGGNSKKSLDGMAIPRRPMVHRETVEEQQNAQSNVNDQHYHQSMEDNSQRQPLLQAHHHPIPTGFDFIYPPAPVGRGLIHSTAGGVLGGMAEIVLPLALRGQMPASLYYTNPYHAATQNVNPRLRRHQMEIERSLHQIWFFLCVFVVLCLLLF

SEQ ID NO: 9599 - protein, 806 aa, Zea mays
  Clone ID: TF_ZmC219_12.pep
MDIVVGALSGIVDALPGKLGELLEQEYALLSGVRGDVIFLKDELSSMRAAIHYCESLDHHDSQTTGWISLVREVAYDIEDWVDLFSIRVHGGAQSTSGFRAWLSRSVDKLTALPARHTIASELQGLKERVLEISRQRNRYRLGQMVGTTSQHPHDPRLSALFVDPGRLVGFDGKVEDVSKTVMDAGGSNGLRIVSIVGMAGSGKTTLANAVYRRLQADNTFQCSAFVSIGPKPDMVKTVKDMLSRLGDGHRGGEDISQLIPRVRGILEKKRYLAWIDDIWSSEQWGVIRCCFPDNSLGSRIITTSRNDALPTNHHYGSSKFVYKIGLLTDNEARELFLKKAFSSRNDCPQHLVDAFTKVLRRCAGLPLAVVSVAAKLAHKQSREEWEKHGLNLLYSSHSDGSDGLKQILHLSYSDLQPQLRSCLLYLSIFPENSEVETDRLVRRWIAEGLIAASNEDTAISSLNELIGRNLVQPLDLNHDSIPRCCRVHPVIYDFIVCMSMQDNFATVTDAQHVPINNKTVRRLSLNLKSNSKQDQPAARNETTDLSHARSVTVFGHASATPHLTDLKVVRVLDLEGCKGPVCLDGLCKLVLLRYLSLRGTDVSELPAAIGDLRCLETLDVRSTKVEELPPSIVRLQKLMHLLAGSAKLPDGMDKMKALRSLSCAATTKSSANVVEELSKHHNLRQLELYYYATETPGNEKQIKFPADGLQTVKQLCIRCTSPSVTFEPRVLPKVQALVLRFEKGRADDTIGVSGLEHLSSLKHLVLEFEQHDAGAMATVTAVRMAAEGLHLDHQYITLKVDGKKY

SEQ ID NO: 9600 - protein, 276 aa, Zea mays
  unsure (1)..(276): unsure at all Xaa locations
  Clone ID: TF_ZmC748101_1.pep
MSASPENVVAGGSGPPVAWWSAASPVGGDVVLCSVALLFVALALAFVLYXTPRPRSVAAAAARGWGAAPTSAQQHQQHGTLGRGRDATGGLDPSVLRALPVTVYEAKDDHRAGEALECAVCLAELADGEPARFLPRCAHGFHAECIDQWLRGHSTCPLCRVDVGLLPAPAPAAVLGPXPALPAPATYPTDLPTNVLFWGSQGAVTVARAAVRSGPSAPRGAPPPLVIHVRETAPAPPPPPPPREGGAAKAQGLARLSSLRRLWSRGRHDDAAAATT

SEQ ID NO: 9601 - protein, 215 aa, Zea mays
  Clone ID: TF_ZmC18438_1.pep
MSRKATQEMMCMVCLKIQPVGPFCQTPSCNRLSMAKYYCNICKFFDDERTVYHCPFCNLCRLGKGLGVDFFHCMKCNCCLGMKLTEHKCREKGLETNCPICCDFLFTSSAAVRALPCGHFMHSACFQAYTCSHYTCPICCKSLGDMAVYFGMLDALLAAEELPEEYRDRCQDILCNDCERKGRCRFHWLYHKCGSCGSYNTRVIKTDTADCSTPN

SEQ ID NO: 9602 - protein, 183 aa, Zea mays
  unsure (1)..(183): unsure at all Xaa locations
  Clone ID: TF_LIB4570-011-R1-K1-B7.pep
MSANVGESTSGVSSSDAAGGSFECNICFELPQEPIVTLCGHLFCWPCLYRWLHIHAHSPECPVYKALVEEDKLVPLYGRGKDRVDPRSKNMPEGEIPHRPTGQRPATAGNXAFSAAFGGLFPMLSFQVHGXFPDAAAYAQPAGFHYGYGHGHGHGGXHGGHMGTAQAHGRXPTGTGWGNNSSR

SEQ ID NO: 9603 - protein, 189 aa, Zea mays
  Clone ID: TF_ZmC26341_1.pep
MGFPSVCYCVILPQPLILVLQLLDFLRHAVLLCLSSLGLAAPPAADDHPAYAYAAPPPPPSDLWALQPSSLQQQQQQAAAAALAPPPTPAAIKARLPAVRYADLLGARRAPPGPAVCAVCLGALQARHRVRELGNCAHAFHKACIDKWVDKGQATCPLCRAFLLPGLSAGDGDGDGDGELASSSFPFSF

SEQ ID NO: 9604 - protein, 163 aa, Zea mays
  Clone ID: TF_ZmC26341_2.pep
MGFPSVCYCVILPQPLILVLQLLDFLRHAVLLCLSSLGLAAPPAADDHAAYAYAAALAPTTTPAAIKARLPAVRYADLLGARRAPPGPAVCAVCLGALQARHRVRELGNCAHAFHKACIDKWVDKGQATCPLCRAFLLPGLSAGDGDGDGDGELASSSFPFSF

SEQ ID NO: 9605 - protein, 494 aa, Zea mays
  Clone ID: TF_ZmC12362_1.pep
MPAQKRPLPSSASPGSDADVEEAPGADADGCGGADQRSPKVTLNGVEERDGGPLQAKDQRHDSDADDEEEGDREGGGGGDGSGSGGDDDCDSQSSQSDGVMDEFTLVKLVDVRKEVQCPICLGIIRKTRTVMECLHRFCRDCIDKSMRLGNNECPACRTHCASRRSLRDDPNYDALILALYPDIDKYEEEELAFSEEERTRNKRIQESIAETFRRQTEALVKKRSTVKATDAASTRKTRRNMRPRRRGRISSPDIAPTDFDDDDREENGDDGSKESSSVDDHSPDVRPKRSRRWPMPRRSPAKAIGNTDNSIEDNDDSGGARDFMTASPLRGEMLAWGKNGTRSQTRHGNSSGSSGRMGRSGRVAKLVDQFRNADDFDNELNLYLVLLPLDGQSVPKLEKPYLSCLPTLSVRHLCQFVALQLSRQPKEVEIYIRKSKDACLSANYTCKYETKPEQPNGLERLWEEKSLSDLYPSLATRQGDLELLYSLKAQGQG

SEQ ID NO: 9606 - protein, 174 aa, Zea mays
  Clone ID: TF_ZmC147852_1.pep
LPLGAPQRGRLLRVFHHVRQLLPHFSPTTADERRIKSLPSAQYLAGAGAGASSRGSGASRECAVCLLEFADGDELRTLPLCAHAFHADCIDVWLRAHASCPLCRAAVALPPPVPSPPQRAARRTRPSLDDLLFFHPVPQPLTAAAEIAPASPDQQLAAGARDFLLKRRTRGRTG

SEQ ID NO: 9607 - protein, 457 aa, Zea mays
  Clone ID: TF_ZmC2185_1.pep
MAAPTSDATSGGGVEGRGGRPPLPSRGACRPRLTDPEPQGGLEDDSDTEGDGGADGDSESSQSDGGGTDEFMLVKLAEIRKEVQCPICLGIIRKTRTVMECLHRFCRDCIDKSMRLGNNECPACRTHCASRRSLRDDPNYDALIAALYPDIDKYEEEEFAFSEQERIRNKKIQETIEETFRRQSDAIGKKRSMAKATATAFARKYRRTRGRVRTIPPDIAPTGSSEEESGEGNSKETIREQSSADDHSPDLRQKRCRKRSGPQGSPAGTIGSIDYSFEENDELVGGKEILATSPLQGEMLAWGKNGARSQNRHGSVGSNGRTGRSGRIAKLVDYLHTADEMDKEFQLFLLLLPVDGQTIPNLEKPYLSCRPTLSIKHLAQFVALQLSCEVEELEMYIRMDRHRVSVGSRPSSTGEAKSRPFDDLERLNEEKLVSELHPSFVSSNGDMELRYALRTRE

SEQ ID NO: 9608 - protein, 143 aa, Zea mays
  Clone ID: TF_ZmC341_33.pep
FCVALACIIGIAVCCCLPCIIAILYAVSDQEGASEDDIRQIPRYKFRRTDEPEKQDVDPMGPFGGIMIECGTNQPIEKVLAAEDAECCICLSAYDDSAELRELPCGHHFHCTCIDKWLHINATCPLCKYNIRKSSSSSGSEEV

SEQ ID NO: 9609 - protein, 382 aa, Zea mays
  Clone ID: TF_ZmC341_57.pep
MATPRSPSPSAAARLDSAPLLGGASGGGSRRRGGALRRPSLRGAARLLRRGGRRAMREPSVLVREAAAEHLEERQADWAYSRPVVALDLLWNLAFITVAAVVLVLSRDEDSPMPLRTWVAGYALQCVVHMICVAIEYRMRHGQRGGAGAGAAPADVERGSDASSSSSDEDDRELDLHGRRTDYASIAKHLESANTMFSFIWWIIGFYWISAGGEEVIRDAPQLYWLCIVFLAFDVFFVVFCVALACIIGIAVCCCLPCIIAILYAVSDQEGASEDDIRQIPRYKFRRTDEPEKQDVDPMGPFGGIMIECGTNQPIEKVLAAEDAECCICLSAYDDSAELRELPCGHHFHCTCIDKWLHINATCPLCKYNIRKSSSSSGSEEV

SEQ ID NO: 9610 - protein, 387 aa, Zea mays
  Clone ID: TF_ZmC341_66.pep
SLTEFLSMATPRSPSPRAEAPLDSAPLLGGASGGGSRRRGGALRRPSLRGAARLLRRGGRRAMREPSVLVREAAAEHLEERQADWAYSRPVVALDLLWNLAFITVAAVVLVLSRDEDSPMPLRTWVAGYALQCVIHMVCVAIEYRMRHGQRGGAGAAPADEERGSDGSSSSSDEDDRELDRHGRRTDYASIAKHLESANTMFSFIWWIIGFYWISAGGEEVIRDAPQLYWLCIVFLAFDVFFVVFCVALACIIGIAVCCCLPCIIAILYAVSDQEGASEDDIRQIPRYKFRRTDEPEKQDVDPMGPFGGIMTECGTNQPIEKVLAAEDAECCICLSAYDDGAELRELPCGHHFHCTCIDKWLHINATCPLCKYNIRKSNSSSGSEEV

SEQ ID NO: 9611 - protein, 479 aa, Zea mays
  unsure (1)..(479): unsure at all Xaa locations
  Clone ID: TF_ZmC6308_1.pep
MTSPGGVFSAALVAEDFPWVDMEEEMGMAPDMYREVFDLAQRGTRAFRDRLFDEAISCYTKAQNLRPDPIILGNRSLTFCRLSQLLRERSAADSEYQPLNGLDPTTHAELALKDAEKILSINSNSPRPYILKAYALFLMEHYHEARETLLAGLQVDPLSHVLQTCLNDLDRNTNIAAGARRARLARIDDFECTLCFKLLYEPVTTPCGHSFCRSCLHQSMDHGNKCPMCRTVLFIGPRTCPISVTLSNIIQKASSGFWGFLSGXFKSSDLLYGDAILLVYFYLIMDVIWFGKYPFGSGFEDGERXVQMEFSDIRMVAIDSATGTVAGCGCEVEISMCETLSDMRFXLXVEGTRRFRIVRSWARVGDRVAEVEWLKDLPLPQGSQGRRELMELANGASQLARAYIRHARDTVRTARRTRHLDLEGMPGPQDPEKFSFWLANLISLRPSDRLDTLRLRDTRERISSSISLLRDSEQGCRVQ

SEQ ID NO: 9612 - protein, 177 aa, Zea mays
  Clone ID: TF_LIB4764-057-R1-K1-C6.pep
GTLEAGRHFFVLPFVPVLLFYYVVLSSEHVVMVDRCSVCLAEYEPDERLQKIPPCGHTFHINCIDHWLSTNTTCPLCRVSLLPAPKATSTGLDLEAQTAVEEESPNAHHRQEEGLVDANTPQEGEAAGGDGSSSVQVEELHGDAAEPLAVTVVAVAAPQADAEGSPSTACQTVKGKK

SEQ ID NO: 9613 - protein, 240 aa, Zea mays
  Clone ID: TF_ZmC2248_1.pep
MSCTSPDPPDYCSAESPELKLYQAFIFSVPVFFTFVLLLFFYLFYLRRRRANWQSLRMRTNNLIRGDNARLECGLKKEMREMLPVVIFKESFLIRETQCSVCLAEYEPDERLQKIPPCGHTFHINCIDHWLSTNTTCPLCRVSLLPAPKATSTGLDLEAQTVVEEESPNAHHRQEEGLVDANTPQEGEAAGGDGASSVQIEEPHRDAAEPLVVTVVAVAAPQADAEGSPSTACQTVKGKK

SEQ ID NO: 9614 - protein, 169 aa, Zea mays
  Clone ID: TF_ZmC208303_1.pep
IAVLLPTTAAAPAPKGGLDPAAIAALPTTLYRNDAAEAGAGSDECTICLGAVQDGEVVRALPACGHVFHVPCVDTWLASSSSCPVCRAEVEPPPPTAVGSARFVQEKVQDAVKQEAGSSTPDRGIGACASLIKMLSRERPAPRRPQGAYADAGDLDDLERQQYAVAVNN

SEQ ID NO: 9615 - protein, 142 aa, Zea mays
  unsure (1)..(142): unsure at all Xaa locations
  Clone ID: TF_ZmC50086_4.pep
EGAECXVCKEDFSPGEVAKQMPCKHIYHTDCIVPWLELHNSCPICRFELPTDDPDYEGRKGTNPQPAVGVAAAASGSSTAAEGQMEERQENPRVVERRFNVSLPWPFSGLGGQTSQQNGNSGGSGSNSQGNAQDGDPPSNKN

SEQ ID NO: 9616 - protein, 279 aa, Zea mays
  Clone ID: TF_ZmC628035_1.pep
MGPINGRRRRRLLLLAAVALAGAAVDAQPDYFNPKNFNPSMAIVMVVLVTAFFLLGFFSIYLRRCAGPPLGGPDDHYHVRQLGLGLGNNSYAPPPSRRMRGLDRAVLDSFPTMAYADVRAHKGALECAVCLSEFDDGDTLRLLPRCAHAFHTDCIDAWLASHVTCPVCRAILLVPDAAEPTALAAAPVTAAPDDDHAVVVDAAAAAGETEDQRLMEGGGRRAAADRQRQARAAKQQVAVPALAHHGALNFRRVAAWLRSSFTPSGRVLYSFFLQQKACT

SEQ ID NO: 9617 - protein, 186 aa, Zea mays
  Clone ID: TF_ZmC146415_1.pep
MGAGDGNGTRPKANEVTISCDEGPGHAFPFPKPHAPDPDPPQASDPANYAVAGKILLAAAGAFAGVLLALVALHLYSSTRRRRLGAGQPRLLRSLAIAGGDEDRRDGDGDGAGAPSPRGLDYAVLAAIPVVSIEAGAGAGDCAVCLAELESGEKARALPRCGHRFHVECIDAWFRGNATCPLCRAD

SEQ ID NO: 9618 - protein, 229 aa, Zea mays
  unsure (1)..(229): unsure at all Xaa locations
  Clone ID: TF_ZmC7896_6.pep
LGTSRPAGTTFFFLRTRSFVREGAPSCPHIRSSLPDTDRPLVRSPPSPIPTAMAAAAAAASSSSSSGVPIAARTCVSVGEVAVGAVATGSGDRVAADCGVCAICLDRIALQETALVKGCDHAYCVTCILRWASYKENPLCPQCKHPFEFLSVHRSLDGCLHDYLFEESVCLLLRAAWFEPLIVEAHEEALEEEEFLHQQYQYDDDEDDLDEESYYMNRXSPSIRIGNRR

SEQ ID NO: 9619 - protein, 224 aa, Zea mays
  Clone ID: TF_ZmC3507_2.pep
MKGATNMTKRERRTTKRNWSTTSASTTTSTPRAMVRERAGEGEGAEGSDYDEEFEEDEEGEPEVDPAEFEDDEAYARALQDAEEREVAARLMALAGLSDWRTVEVEHEEDHANDPQEAWQEVDPDEYSYEELVALGEVVGTENRGLSADTLGSLPSVTYKLQHVQDGNTEQCVICRVELEEGESLIALPCKHLYHPECINQWLQINKVCPMCSAEVSTSGNKEP

SEQ ID NO: 9620 - protein, 118 aa, Zea mays
  Clone ID: TF_ZmC3507_4.pep
HEEDHVNDPQEAWQEVDPDEYSYEELVALGEVVGTENRGLSADALASLPSVTYKMQSVQDGNTEQCVICRVELEEGESLIALPCKHLYHPECINQWLQINKVCPMCSAEVSTSSNKEP

SEQ ID NO: 9621 - protein, 178 aa, Zea mays
  Clone ID: TF_ZmC420590_1.pep
MSMGTPTSWLFASDNSRYSTRARLLFMGLSFAIGILTFLLYLAIWYLCSRRRQLRRRQRGELFAPGVGDTDGDHGMSADAIAALPTFVHGAEAPALDCPVCLGQVEAGEKVRRLPKCAHSFHADCVDAWLRAHSTCPMCRAAVGTAAAATATKQQAEVAAVVVVVPVPSPPAEALPPV

SEQ ID NO: 9622 - protein, 212 aa, Zea mays
  Clone ID: TF_LIB4828-050-R1-N1-D2.pep
MGSSRPAGGCPYPPNWFAKHSSLVPMETTLPMVRGNGRLLPLSLLLLAAADFTTVHGQGQQPEGPYYSRSFNPSMAIVIVVLIAAFFFLGFFSVYVRHCYGDGSSGYSASPAPGGAAARSRRQQRGLDSAVLESFPTMAYADVKAHKAGKGALECAVCLSEFDDDETLRLLPKCSHVFHPDCIDTWLASHVTCPVCREASRLIAVDAEERPD

SEQ ID NO: 9623 - protein, 257 aa, Zea mays
  Clone ID: TF_ZmC6833_1.pep
RGRLLRAVWSRQPPWHRRVRGAGGGGLTGRRDEPSSVVRGDGRRGLGLPLIRMLPVVKFTAASCDAGAGAGGVAPRISVSECAVCLSEFVERERVRLLPNCSHAFHIDCIDTWLQGSARCPFCRSDVTLPAIPSARRAPAAAAAVLPTSRRRDDALASESIVIEVRGERERWFSSSHGTTTTTPRRQPPKQPAPRCSKAAESVGDEAIDTRKTDAEFAVQPLRRSVSLDSSCGKHLYVSIQELLATQRWDDGDVGRP

SEQ ID NO: 9624 - protein, 212 aa, Zea mays
  Clone ID: TF_ZmC6833_2.pep
QRPRPRGVVKFTAASCDAGAGAGAGGVAPRISVSECAVCLSEFVERERVRLLPNCSHAFHIDCIDTWLQGSARCPFCRSDVTLPAIPSARRAPAAAAPVLPTSRRRDDALASESIVIEVRGERERWFSSSHGTTTTPRRQPPKQQPPLPRCSKAAESVGDEAIDTRKTDAEFAVQPLRRSVSLDSSCGKHLYVSIQELLATQRQVRDPSVRS

SEQ ID NO: 9625 - protein, 130 aa, Zea mays
  Clone ID: TF_ZmC3313_1.pep
RRRTASSPLRSRLSCAPSPPPSSRATSSAPRHACVVLVGAAVVCRYRKEEAWNESTCPVCLADFDDGEVVRVLPECMHYFHADCIDTWLRGSTSCPMCRAETTPTPTPSPASVRHHLELSVSLEEILVAT

SEQ ID NO: 9626 - protein, 173 aa, Zea mays
  Clone ID: TF_ZmC4566_1.pep
MHSGARKLMWGTSPDRPDDHDVVIVLASLLCALITVLGIGLVARCACARGPSAQAAAAANRGVKKSVLRRIPTVPYAACSQGEGDDADECAICLAEFEEGEPTRVLPQCGHAFHAACVDRWLRAHSSCPSCRRILSLQLPPGERCRRCGARPLDDGDAGWKPTYYSAMPPFLA

SEQ ID NO: 9627 - protein, 308 aa, Zea mays
  Clone ID: TF_ZmC364867_1.pep
MDGGRPEMRRTMTLSEQLSSTPDPAIRDFLKIPQDADVGGILHDEDSPSAVDAQGPRAGRTSGWKPLRDRLRLRRAAGAWQTPPNKPGAAAAHAPTNSGNLSNRYNYNPGEAAAAFSRTFSRAPSLRAPSLRATPTFSRVASTRLGPASSRSSSRRPATYDFRDLDERRHDADADDGGEEEDDEGEGEDDDDEGDEEDEKEEAPAAQMSLMALLEQTDSQWDDDEDEEESGGGGGARKKGEGDDDEDDGEGREEEMVHVCCVCMVRHKGAAFIPCGHTFCRLCSRELWVSRGNCPLCNGFIQEILDIF

SEQ ID NO: 9628 - protein, 157 aa, Zea mays
  Clone ID: TF_LIB5026-037-Q1-XP1-B12.pep
PAGSRESSKPQALKETQESPRDPKRGGEIEMADVGSLERMGRELKCPICLSLLTSAVSITCNHIFCNACLTESKKSASCCPVCKVPFHRREIRPAPHMDNLVAVFKSMEAAAGISVVSTQLTPAPKAAECGEYTAGKPRRSNKKKLASEKKKKKRPL

SEQ ID NO: 9629 - protein, 115 aa, Zea mays
  Clone ID: TF_LIB4744-093-A1-K1-F1.pep
MSDLLSYISKVMCIKARSEATQAGEDSGCPADECRVCLSKIRLGEATRRLPCRHVFHRDCVDRWLSSCKRTCPLCRVYVADGNKQPVAAKHTSREAQALADDLVIWFSTVLVPGF

SEQ ID NO: 9630 - protein, 111 aa, Zea mays
  Clone ID: TF_ZmC28409_2.pep
HTQGAWEDVDPDEYSYEELIALGEVVGTESKGLAADTIASLPWVTYQAQDKQDGNMEQCAICRVEFDEGESLVALPCKHPYHFECINQWLQLNKVCPMCSAEVPTFVNKQA

SEQ ID NO: 9631 - protein, 115 aa, Zea mays
  Clone ID: TF_ZmC592_1.pep
MSDLLSYISKVMCIKARSEATQAGEDGGCPADECRVCLSKIRLGEATRRLPCRHVFHRDCVDRWLSSCKRTCPLCRVYVADGNKQPVAAKHTSREAQALADDLVIWFSTVLVPGF

SEQ ID NO: 9632 - protein, 115 aa, Zea mays; identical to SEQ ID NO: 9629
  Clone ID: TF_ZmC592_2.pep

SEQ ID NO: 9633 - protein, 333 aa, Zea mays
  Clone ID: TF_ZmC8390_2.pep
MAMPSSRSPAPPPTASSSYWCYMCDRFVRAAASSSSSPTSPSSSSPACPSCGGGFLEEMGAPPPRARRPRRAARRGADSRASPFNPVIVLRRSPPADADADGSSSPAAATGSSFELFYDDGAGSRGRPLPESMSDFLMGSGFERLLEQLAQMEAGGGLAARARDAPPASKAAVDSMPALRVGAAHVAADAHCAVCKEAFELGAEAREMPCAHIYHADCILPWLALRNSCPVCRHEMPADNAAPRAAAAAAADEDARVGLTIWRLPGGGFAVGRFAGGPRPDERELPVVYTEMESGFNFNSGHAPRRISWGARQAAATDRGTVRRFLRSVFACF

SEQ ID NO: 9634 - protein, 139 aa, Zea mays
  Clone ID: TF_LIB4172-009-Q1-L1-C10.pep
MEAAWRKAKRALGSSLCVHHPAVAGDREDGASERRASDALSLDTTAAAHASTPNAPAPPEAGALRRSKSGGKSTNRMCAICFDSMKPGRGQALFTAECSHMFHFHCISSSVKHGNHVCPVCRAKWKEIPFNRSLSSIVP

SEQ ID NO: 9635 - protein, 343 aa, Zea mays
  Clone ID: TF_ZmC299_2.pep
MRLGTAMPDLPCDGDGVCMVCRVASPPEVDLLTCSTCTTPWHSPCLSKPVLSGDPETDKQIRRATKRAHLSVAERLLKEFGCSICRAVIKEPLTTPCAHNFCKTCLLGAYDSQSSMRERSRGGRTLRAQKIVKTCPSCPTDICDFLENPQINREMMELIESLQRKAVEEGKMAAGDAEESGDGDSEENGGALVKGEDDSNLNEEGQDGVDADGSVKIVVEMEGAKDDKKSKMGAAEVVDVLVEDAAAKQPKKRTADEDAAAKQTKHKADAETGGKRVKSSAAVEEVDVCVTPMKRTRKSGDMHDDGNGSPAVSSGRRVTRSSVNATGADDSPARRTRSRGRAC

SEQ ID NO: 9636 - protein, 174 aa, Zea mays
  Clone ID: TF_ZmC8696_1.pep
MAAQEAAAGGGSPQVVMRWRYGDVGDSNFAVHGRAVPLLVGLLCAVVFFVALCLYLRWRCHRHAPDDPEADASSPSSAAAASLPGLDADAIRGLPVTLYRPPASPRLRGEAGDDDPAAALCSICISALVAGEKVKVLPPCGHCFHPDCVDAWLRSQPSCPLCRCLLAAAAKDAV

SEQ ID NO: 9637 - protein, 137 aa, Zea mays
  Clone ID: TF_LIB4738-004-R1-K1-A5.pep
LGIERTRTGLEPLVIAAIPTMKYNCEAFNSKDDVQCSICLGEYREKEILRIIPTCRHSFHLACLDLWLEKQTTCPICRVSLEELQAAMPSVCSISNSRPSPTPTPTQRILITQHLSVSNLLVNIPEIKIIARRRTNQ

SEQ ID NO: 9638 - protein, 321 aa, Zea mays
  Clone ID: TF_ZmC188828_1.pep
REAIAPIPRPPADWRGLGCAAAAQAHAPAAAVEAARPTADWRRLGCAAGAAPAVQAQAPRRSEEWRVRRRRNERERRKARAGGVSGGGGASAGMGVGGDVWCTPGIPFAAEASSVDCVVAPHHTVAARRRAEADRPRRERPGAPPARRVTMREHMSSSPLSSPPHHVMPFVDVDRAPSGRIRHVSGRRHSHARVEEEMMFQTRMLLGRMGIYDQYQDWRLDVDNMTYEELLDLEDRIGYVSTGLREDEIIQSLRMVKYSAFNPRHFSTEMDRRCSICQEEFEVHEETGKLSCGHSYHVHCIKQWLSRKNACPVCKTTVSKT

SEQ ID NO: 9639 - protein, 88 aa, Zea mays
  Clone ID: TF_ZmC188828_2.pep
RSRNPRVSTGLREDEIIQSLRMVKYSAFNPRHFSTEMDRRCSICQEEFEVHEETGKLSCGHSYHVHCIKQWLSRKNACPVCKTTVSKT

SEQ ID NO: 9640 - protein, 198 aa, Zea mays
  Clone ID: TF_ZmC366351_1.pep
MFGSGLNLVSAALGFGMTAAFAAFVCVRFICCRERRGDTRAPPSPDFAAELDGPIERTRTGLEPLVIAAIPTMKYNCEAFNSKDDVQCSICLGEYREKEILRIIPTCRHSFHLACLDLWLEKQTTCPICRVSLEELQAAMPSVCSIQQLPPEPDPDPDPENSDNPAPQCFQPARQHPRDQNNSQETHESVEVIIEIRR

SEQ ID NO: 9641 - protein, 310 aa, Zea mays
  Clone ID: TF_ZmC4447_6.pep
MDAGRGSSATIFPVPQVPALALLFPPPPPAAAALPSSSLSLSSSSSSRHAPSITSFPILVLTVLGILAACVLILAYYVFVIRCCLTWHRDRSASDAVSRRPQRARARVRTSTGGTPASSAEPRGLEDAVIRALPAFTYRKKPADLPPSAPAPASECAVCLGEFEEGDSVRMLPACLHVFHVGCVDAWLQGNASCPLCRARADVDAASCCRLLPPPPPEEEEDVAAIQVVVVVPGAEEDDRQGTVPQRQRETTVAPAAAAEVEGEDPPQVGGEKERRKDGDVAPRTRSFSTDGDGGEEVQSILQRNGQGLP

SEQ ID NO: 9642 - protein, 154 aa, Zea mays
  Clone ID: TF_ZmC54317_2.pep
MLMGFPVGYSETPKLLLHLLFLLDHLRRLSSWLLRLAGAADADADTDAGHPRHPCAAAQRLEEHSPALRFDSLSCGSGGGVTAPRPLPEGCCVCLGDFHAAAEVRRARGCRHVFHRACLDRWAAHGHRTCPLCRTPLLPPLPLPLPLPLPLPPS

SEQ ID NO: 9643 - protein, 249 aa, Zea mays
  Clone ID: TF_ZmC25614_1.pep
MYLLGNKSGKKKVYVDYMNVPLPYAIEENYGGRFFDDDDDLAQVLQDQEILYHLIQGSNGGGSSRTHSIPSSSYGHDRTSNAQKLSGDVNCECELQLAVDEALARELHEMESKLANTSLNDNNGRKTTSSSAFDRGNNSASRPPQVLEEDVIDPDNMTYEELQQLGEAIGTQSKGLPESVIALLPTSTYKTGIFSRKEKHDECVICCMAYKNRDRLTKLPCGHHYHQACVAKWLQINKVCPVCNKEVFS

SEQ ID NO: 9644 - protein, 101 aa, Zea mays
  Clone ID: TF_cC-zmle18900088d08a1.pep
DIDGMSYEELLALGERIGTVKTGLSDDALSTCLNRSLYMPTAPGSHEDCETKCSICQEEYLSGEDVGKMACKHYYHLSCIEHWLRQKNRCPICKSVALKTK

SEQ ID NO: 9645 - protein, 230 aa, Zea mays
  Clone ID: TF_ZmC47563_1.pep
MDLSPSSSAPSAPPVPCEWSGAGLGSAACGLACRVLCAVATCVFAAVGSLVGAVTGSMVGLATESGMLRGAGIGAISGAVFSIEVAESSRDLWHSGDSGVWTLLYMVDIISSLLSGRLVREKVGPAVQSAVQSQISAISSPFEETSDLFETGSVRGLPEAAVRRLPETVVAEDGAVDAAGQALCCSVCLQDFRVGDRARRLPGCRHLFHVPCIDCWLLRHGSCPLCRRDI

SEQ ID NO: 9646 - protein, 129 aa, Zea mays
  Clone ID: TF_ZmC47563_3.pep
VPATQERSSWSASACCKHVTDLFLPSVCRGRTQISAISSPFEETSDLFETGSVRGLPEAAVRRLPETVVAEDGAVDAAGQALCCSVCLQDFRVGDRARRLPGCRHLFHVPCIDCWLLRHGSCPLCRRDI

SEQ ID NO: 9647 - protein, 228 aa, Zea mays
  Clone ID: TF_ZmC10261_5.pep
PAFRRSLSSAAISHSTCSCVPLQHRGNSFSSHEIRNHQPGSRFRPPATLPGSSTAACASATSGSPATSGASPTAIASREGGRPMSEIRNVFDQIRQGRNARLEDLLLIDRSLIMRRANLIDRHRDMRLDVDNMSYEELLALGERIGYVNTGLSEEKILSNLKQRKYVLISLEDPPTGVEPCCICQEDYAEGEDLGRLDCGHDFHTACIKQWLVIKNVCPICKKTALDA

SEQ ID NO: 9648 - protein, 206 aa, Zea mays
  Clone ID: TF_ZmC22858_2.pep
MDRRDSSEAPGPAVNGTGGVGGAGAAAPGVVDATFDTNTVILLAALFLALLLAIALNSLARFALWCGGRAAAGGGEVAASPSVAASSCAGVRGGIKKRALRSIPVEVYVGGDAKDDEEEGAGSGDVCAICLGEFADGEKVRVLPRCGHAFHVPCVDAWLLSRGSCPTCRRPVMDAKPASASATGGRGVAQQSARRPDSDTVAVVIA

SEQ ID NO: 9649 - protein, 85 aa, Zea mays
  Clone ID: TF_ZmC2009_1.pep
MVDTPKVNTFKWIQVPPEPVKEVPKEPKLSCPICMNEITEAASTVCGHIFCQPCIKAAIKAQKKCPTCRRKLTPRQQHRVYLPSP

SEQ ID NO: 9650 - protein, 222 aa, Zea mays
  Clone ID: TF_ZmC21544_1.pep
MELAEAPAPVPDEDGLDERGVALHLPRLLAGVVSGALTGIFALAGALTGAVTGAVAGRASDSGGVLRGAGLGAVAGAVLSIEVLEASRAYWCSSDRLGSHGGASSMADFIEQLLRARFVQEQLTASGYASYRWQDDLYDIFGDISSEGLSQESLKKLPHHVVSDHQTRDLLGEILCCPICLQDIVAGETARRLPGCSHAFHQPCVDRWLVGHGSCPVCRQRV

SEQ ID NO: 9651 - protein, 230 aa, Zea mays
  Clone ID: TF_ZmC21544_2.pep
MELAEAPAPVPDEDGLDERGVALHLPRLLAGVVSGALTGLFALAGALTGAVTGAVAGRASDSGGVLRGAGLGAVAGAVLSIEVLEASRAYWCSSDRLGSHGGASSMADFIEQLLRARFVQEQFTASGYASYRWQLSISYFGQDDLYDIFGDISSEGLSQESLKKLPHHVVSDHQTRDLLGEILCCPICLQDIVAGETARRLPGCSHAFHQPCVDRWLVGHGSCPVCRQRV

SEQ ID NO: 9652 - protein, 203 aa, Zea mays
  Clone ID: TF_ZmC21544_7.pep
MALCGACVHVPRTSACKAGALTGAVTGAVAGRASDSGGVLRGAGLGAVAGAILSIEVLEASRAYWCSSDRLGSHGGASSMADFIEQLLRARFVQEQFTASGYASYRWQLSISYFGQDDLYDIFGDISSEGLSQESLKKLPHHVVSDQTRDLLGEILCCPICLQDIVAGETARRLPGCSHAFHQPCVDRWLVGHGSCPVCRQRV

SEQ ID NO: 9653 - protein, 261 aa, Zea mays
  Clone ID: TF_ZmC8011_2.pep
MEAGRMDQPCMASINSQPFVADTEPVKKASGDMPAAPTGSGCFDCNICLDFAAEPVVTLCGHLYCWPCIYEWLRPGVESTASDNGSSARRQCPVCKATLSPDTLVPLYGRGGNSKKSLDGMAIPRRPMVHREAVEQQNARSNVNDQHYHQSTGDSPQHQPLMQAHHHPVPPGFDFIYPPAPVGRGLIHSTAGGVLGGMAEVVLPWVLRGQLPASLHYTSPYHVAAQNVNPRLRRHQMEIERSLHQIWFFLFVFVLLCLLLF

SEQ ID NO: 9654 - protein, 250 aa, Zea mays
  Clone ID: TF_ZmC886_2.pep
RHPQRTHRSSPSPVVTTMGDEMSDGRRADGSYGPEYGPVPREFQHAWYPQLPSRTRRRSPWPLHHGDYPWRLSEHRFRRPPFERSSSWHPLQPPFHIHRVHGSSGSGAPLNPRHRRGDAGLTNEEFREAMDQLRKDEYRQQQKHGGGGRGNLRTGKETSEEEKVCTICLETFLPGEQVAVTPCNHTFHQGCIAPWVQGHGSCPVCRFALCERSVADEDGGGMDLDLLAMVMAMEEAFSRFRFSDSTQHYH

SEQ ID NO: 9655 - protein, 180 aa, Zea mays
  Clone ID: TF_LIB4746-060-Q1-K1-B7.pep
MATPAPAGAAMPELAPGQGREAKHGRAGGGPRQSAGARLLSLSVQAAVMAATLAVLLVFAAASALLLLVLVLAARAFRHHRVTSLDLAPSSPPPPLRAGLSPVDIRRLPSFAFPSTRGGAGDDTAAASPSCVVCLDAARGGERWRAMPACTHAFHAACVDRWVARTPVCPVCRAAVAVPI

SEQ ID NO: 9656 - protein, 392 aa, Zea mays
  Clone ID: TF_ZmC38662_1.pep
SRPAGFEPLDSNEFFEPLSIAFDTLQSTMVHGFQLFDIWQRHLMESGADFLDLQKSYKQAAGSFSEWRGKLTRDFGFAIDLISLLMSLGHYSMIFWLRGMAFHLVDAVLLLNSRALIVSFLKRIKAHIKLRKALSSLDGALPDATYDEICAYDDECAICRGPMGRAKKLSCNHLFHLACLRSWLDQGLMEGYSCPTCRRPLLLSSEGQRRSTTAEVANVQRIAEQLTMGMNQQRVPGNEHPVEQQNPSDAVWRGAGLDASWIPPWSSPVMDHPSSSSAVRSVGLTGVQMMMTQLASVTDNYGHADGTWNLWPEPMAGSSLVPSTSSISGTASASGLRLRGSAGISNGSLSEVLTMVDRVREVLPHIPDELILEDLMRTNNINATVNNLLLMQ

SEQ ID NO: 9657 - protein, 199 aa, Zea mays
  Clone ID: TF_ZmC12601_1.pep
MASANNDNREAAGILRLLMGMAAAAPASALPRGGGGGGGGGLMVVQHVILDVDGELFSGGVGGGGVPPASKAAIAALKEVKAGEGEGEGEDALGECAICLDAVEGTGKEMPCGHRFHGRCLERWLGVHGNCPVCRRELPAPAKEEEEDSAASAEGGEEERRRPRAAVVVSYLVFGGGRAEAQQEPEREEPWNIRIEDVD

SEQ ID NO: 9658 - protein, 375 aa, Zea mays
  Clone ID: TF_ZmC3294_1.pep
MATLRSPSPRGDVLLDSAPLLGGVGRRRAGALRRPSLRGAARLLRRGGRRAMREPSLLVREAAAEQLEERQADWAYSRPVVALDFLWNLAFILVSAVVLVLSHHESPSMPLRFWIAGYTAQCVVHMVCVAIEYRLRYGQLGGSPIPVDEESGSGSASSSSSDDDREHGSHSRSGDCLSIAKHLESANTMFSFVWWIIGFYWVSAGGEVLTRDAPQLYWLCIVFLAFDVFFVVFCVALACIIGIAVCCCLPCIIAILYAVSDQEGASEDDIRQIPKYKFRKMEEPEKQSVGVPGSSGGIMIECGTNQPIEKVLAAEDAECCICLSAYDDGAELRELPCGHHFHCVCIDKWLHINATCPLCKYNVRKNSSSSGSEEV

SEQ ID NO: 9659 - protein, 218 aa, Zea mays
  Clone ID: TF_ZmC3532_1.pep
MEVPPLPTASEGERRSVATGSCLPRLVSGVLSGALTGIFAVAGGLTGAFTGALAGRASDSGVLRGAGLGAFAGAVLSIEVLEASRAYWSADRSSPQSTSSMGDFIEQLLHARFVQDQYEPSAYMAYRWQVGIADNDDMFDVLEDVLSEGLSQDTLKKLPHHVVPAPIGESLSCAICLQDVISGETARKLPKCSHTFHQPCVDRWFIDHGSCPVCRQDV

SEQ ID NO: 9660 - protein, 185 aa, Zea mays
  Clone ID: TF_ZmC779404_1.pep
MEPARRLLLSDYDGAIESPLPSPPPSSATPFRPGVAVVVGILTSVFSITFLLLLYAKHCKRSAAESSGPYGSAGSGGGFGSSGNGAGGDRRNSGVDRAVVESLPVFRFGALRGQKEGLECAVCLGRFEPTEALRLLPKCRHGFHVECVDTWLDAHSTCPLCRSRVDPEDVLLLPEPPKPSTTGPP

SEQ ID NO: 9661 - protein, 203 aa, Zea mays
  Clone ID: TF_ZmC2722_1.pep
MTSPPTPLPALARQAMQSPSPPTKVGPPPLPPPPLPAVDAAVIMGVLTAVLLALFLFLIYAKHCKQRGPGERPGGLGLGFAPSSCDRCRSGLSSSAVGALPAVRFGDGDVDVGRATECAVCLGAFDAAELLRVLPACRHAFHAECIDTWLLAHSTCPVCRRRVTGGHVDDSEPEDSAATRQHGRRSADDAEVQVVVHRAWDQR

SEQ ID NO: 9662 - protein, 182 aa, Zea mays
  Clone ID: TF_ZmC54753_1.pep
MSLARYDANVLLAAVTALSAAVAFVAALHLYARCLLQRRVALAEGSPRVVALQRQRPPDGYVVEVVRIVEDASVCGQQAAGLDAKALRALPVFTLESEQANEEGGVAAELHGQCVVCLGEMEDGELGRLLPGCRHVFHVECIDTWLGVSSTCPVCRTAATPAAPSAVGVDHGGGEESIAVEC

SEQ ID NO: 9663 - protein, 201 aa, Zea mays
  Clone ID: TF_ZmC1258_1.pep
KKKKKKSTWLDLGDDIFEELGESRYFHRRRHGSIRVSQYSRSRIREHRRAVFDSGNEQSTAACPLGIHQTGRCTCDSFLVAEESSARASISRIVMLTEALFEVLDEIHRQPASLSLSMVSVQAPESVVNSLPCKSYKKLEAPQRSDDMEQCHICLNEYEDGDQIRTLPCKHEFHLQCVDKWLKEIHRVCPLCRGDVCEVAS

SEQ ID NO: 9664 - protein, 378 aa, Zea mays
  unsure (1)..(378): unsure at all Xaa locations
  Clone ID: TF_ZmC17651_1.pep
MLAGAPTGDAGPSSGAGSNPPTRPRRFPGAAQPEIMRAAEKDDSYAAHVTEACRDAFRHLFGTRVAVAYQNEIKLLGQSLYYLLTTGSGQQTLGEEYCDISQVATLHGLPPTPARRILFILYQTTVPYLAERISSRIVARSIVLNESQFDDHPESDNSSSDIAQSTTNSDIPSRSLSVSALSGFRGRVHALWQWVLQKWPSMLPYAQDFIQLAIRTNLMFFYFEGLYYHLPKRAAGIRYVFIGKPMNQRPRYQILGIFLLIQLCILGAERLRRSNISSIASSINQISSGGYPSTTGRGIPVLNEDGNIISDIRSGKAADIASHSEXPMARANAPFVSASGKILLPQPVDMFSAGIAXWSGAMRSLSAPYAELRLPIRV

SEQ ID NO: 9665 - protein, 138 aa, Zea mays
  unsure (1)..(138): unsure at all Xaa locations
  Clone ID: TF_21217091.pep
SRXXXXSTEFTCCTSFCQRLLEVSTGPPRSSREVRRTHRPAGRRGIYVVGVADRQAQSEYTHISLQERSRHQSLELLIAERARGDDPEPPVHALEVEHVRARQLPNLLLLPVLRKADAALLQLQFQTWVLQDCYASCS

SEQ ID NO: 9666 - protein, 111 aa, Zea mays
  unsure (1)..(111): unsure at all Xaa locations
  Clone ID: TF_LIB3594-030-Q6-N6-A1.pep
LHILIVVWALRRGVVLRAAESRQDEERAEGLSAEDLNELPCHAHECKAGAGAECXVCLXAFQAGDRCRVLPRCDHGFHAQCVDQWLRKSRVCPVCRAEVGGGADREGNAER

SEQ ID NO: 9667 - protein, 193 aa, Zea mays
  Clone ID: TF_ZmC188299_1.pep
HVLISGLSYHQQPAVSPGDGASAAPSDDDRDHNLTVLLTFGIFFSFTLLYLVAGVICASVVTACAVALSCCYLKARQRVALHRREALLLHAERSHGRRTEASAALVLSAIPAFAYKREGGTTGRGGDAAGWAQCVICLGLVQVGEVVRRLPVCQHLFHVECIDMWLRSHSTCPICRAAVEEPNAAGQPVPPPV

SEQ ID NO: 9668 - protein, 79 aa, Zea mays
  Clone ID: TF_LIB4740-006-R1-K1-F6.pep
MANRAGEPVARTNSDGGGGGSKDSGRFECNICLDLAQDPVVTLCGHLFCWPCLYEWLHVHAHSQECPDCKAVVEEGKLV

SEQ ID NO: 9669 - protein, 167 aa, Zea mays
  Clone ID: TF_ZmC19309_1.pep
MNSPPGDDGGGSAHGLFGSGGIRGFGYGVGVSIGILLVASTIALAIYFCTRTSMPESAAALAPPRQGGDAGRGIDEATLEAFPAVAYAEARKAAANQACCCPVCLDCYGDGDVVRVLPDCGHLFHRACVDPWLRQRPTCPVCRTSPLPSPMPTPLAEVTPLASARPS

SEQ ID NO: 9670 - protein, 276 aa, Zea mays
  Clone ID: TF_ZmC2062_1.pep
MSPRVVLLFLAALRPCAALVRLHSTTFSFTFLDAPARFGPRVSGDGICGSLRAADPAEACETIKDRGGRRGAGRKAFVLIARGNCSFEEKVRAAQQAGFDASIVYDDEEKASLYSMVGESDGIHIPAIFVSKMAGETLKKFARGEDEECCINSSMDETAGTVLVMSFVSLVVIMSVLASFLFARNCRLLRHGVDNHPPYVKKQVVEKFPCSAYSAPCSSEDNFQEACAICLEDYNNGDMLRHLPCKHEFHKICIDSWLTKWGIFCPICKLEVTLGG

SEQ ID NO: 9671 - protein, 166 aa, Zea mays
  Clone ID: TF_21209483.pep
MSLQHEEDTHRTSRTLRRFQNHTRGARATRLSSYRNALRAELATANNMISRQRNTAPINLGLRAALARYPGALHIQPNIDLNDYDALLALDENNHQHTGASESQINNLPQSVVQSNSIEDPCSVCLENPSVGDTIRHLPCFHKFHKECIDEWLRRKKLCPVCKFGD

SEQ ID NO: 9672 - protein, 391 aa, Zea mays
  Clone ID: TF_ZmC107_1.pep
MNTLFFWSIYCWRTNMSYFCYICYCRVDLSTAGTYLNKNFSDISTEQGWRTTHNHTSKLPISFMGNITSSSGWESGSSTTRSNQNHGSAGGNHSSVSGANIIVPDKIGNKTIMLGRERRKQTSTSSHIGESSSAADEPRGDLQSSKISAGPNHSSHQHNIPVINIDDISPEARPSSSGFTNRTVDPTIEAQLESDELLARQLQEQLYNESARFAPTEEIDAIVAMSLQHEEDTHRTSRTLRRFQNHTRGARATRLSSYRNALRAELATANNMISRQRNTAPINLGLRAALARYPGALHIQPNIDLNDYDALLALDENNHQHTGASESQINNLPQSVVQSNSIEDPCSVCLENPSVGDTIRHLPCFHKFHKECIDEWLRRKKLCPVCKFGIN

SEQ ID NO: 9673 - protein, 50 aa, Zea mays
  Clone ID: TF_ZmC107_2.pep
SEDPCSVCLENPSVGDTIRHLPCFHKFHKECIDEWLRRKKLCPVCKFGIN

SEQ ID NO: 9674 - protein, 127 aa, Zea mays
  Clone ID: TF_ZmC238393_1.pep
LPPVLPYAAAAARKKGLPEDCPICLDAFGEDDGVRVVPACGHLYHAPCIDRWLDVRNSCPVCRCAVASLYAADRDRGADALTAFDDDNDDQEAVLQRVVAMIEAIRDEQQREDAVARRAPAGGGGGS

SEQ ID NO: 9675 - protein, 106 aa, Zea mays
  Clone ID: TF_cC-zmpo14820003f04a1.pep
RRFGLLSDCDHSFCISCIRNWRSTSPTSGMDVNSTLRACPICRKLSYYVVPSITWYSSKEEKQEIVEGYKAKLRSIDCKHFDFGKGTCPFGSSCFYKVHNTVFGVI

SEQ ID NO: 9676 - protein, 91 aa, Zea mays
  unsure (1)..(91): unsure at all Xaa locations
  Clone ID: TF_ZmC3483_2.pep
SDDDDYEALIALDDCNHHRGASDDQIXSLPLSLIEGENCSDEPCNICLDCPSAGDSLRHLPCLHKFHKECIDRWLGMKIWCPICKLNVFSQ

SEQ ID NO: 9677 - protein, 183 aa, Zea mays
  Clone ID: TF_ZmC189769_1.pep
MSNPSFDHSYELPLRRNLLLLRDLLDLLRFIAGVILDRLGVAPCQGEVRLPGQALGGVGEHANDVDLERLLEARLWETVTRSLTAPRYRRRRVAPAQPADVQLDAEGDAEGAAVCAICLAGLEQGDFQTVVELCGCSHVLHAACIDAWVRSGDDAATCPLCRAPMLPTAWDDEQSSFGARRGD

SEQ ID NO: 9678 - protein, 286 aa, Zea mays
  Clone ID: TF_ZmC763809_1.pep
ICTHRLPILSYCSPFFLLIPACADVRQRASPGLRFLPSFRRRCRLSSPLPERGNPEEAETAGQMDFGAEQHGCEHYTRRCRIRAPCCGEVFGCRHCHNQAKNSLEVDLLDRHEIPRHEISKVICSLCNKEQDVQQNCSGCGACMGKYFCEKCNFFDDDISKKQYHCDGCGICRTGGIDNFFHCEKCGCCYSNVLKDSHHCVERAMHHNCPVCFEYLFDSTMDISVLHCGHTIHLECLNEMRVHHHFSCPVCSRSACDMTDAWQKLDQEVAATPMPEFYQKKMVWIL

SEQ ID NO: 9679 - protein, 134 aa, Zea mays
  Clone ID: TF_ZmC588778_2.pep
MMLAVTVSQVVALLSSALSGTEGGSGVAVAVGTAKAVGAEQGERWRRRCGGHDDHPASAAGYCCVCISACRDGDDVRSLPCGHAFHRDCVDRWLALCRRTCPLCRLHVGGPAVGLAEQQQQLSEDLVIWFSSLF

SEQ ID NO: 9680 - protein, 241 aa, Zea mays
  unsure (1)..(241): unsure at all Xaa locations
  Clone ID: TF_ZmC146862_1.pep
LDQDVIDALPVFLYREVVGAGAGAKEPFDCAVCLCEFAGEDRLRLLPLCGHAFHIGCIDTWLLSNSTCPLCRCALGADAAALFDEEGMWEHEDAVLPVRLGKFKNLARAAPGPVRAGAGXIVTREAGETSSSSLDARRCYSMGSYQYVLAEASLQVSVHRRHGDGHGRGGAGLRGVGVGSNRAGATEGKRIGAGSKGDSFSVSKIWQWPRNGKEKLPVLASDDSPAMNGRLPWQRPSPGDS

SEQ ID NO: 9681 - protein, 254 aa, Zea mays
  Clone ID: TF_ZmC67427_1.pep
MPPPPLPEEKPLARRKPEPKPPKPKPKGPRPIGPLPQRDGDPGGGVATSPPLLFCGDGCSGPCAYLPQCQPPPPPSPGATVRLRSSRLPTPLVALSASLLTVSAVLLLALLVHCLVARRRRRAQGAPLVHHAEAGGAQVLAGAVEQQAGEGEDEEAAGGGVHHVWYIRTKGLDERAISAIAAVVYDAKKRGAGASSDGGGSCAVCLAEFRHGETLRLLPRCAHAFHRACIDTWLRAHVNCPLCRAPVQGRRRRR

SEQ ID NO: 9682 - protein, 208 aa, Zea mays
  Clone ID: TF_ZmC13111_2.pep
MHKDMEYPRRTLLHTPFSGHPSGPSQPIDGATATDGSNFDANVVMILAVLLCALICALGLNSIVRCALRCSSRVVVGPEPNQVTRLVQSGLRRKALRAMPVLVYSPGLRINAANPTCAICLSDFEAGEHVRVLPKCNHGFHVRCIDRWLLARSTCPTCRQSLFGVPQKASGCSEASRAAEPEPAPAPAPARSVLVPLRPEGLVTHYDF

SEQ ID NO: 9683 - protein, 583 aa, Zea mays
  Clone ID: TF_ZmC25863_1.pep
MDADEAVGSSGRMDLNLYLGPPRAPRPRRSDLGSDLALSTPMPSSPSSSAASVDAPPPPPESMHPPYTHSRADLSPPPLPLEVYFPYNPEDSPVPDAHMSYMQPPELLIPGPRNMPPPDSLISGLREGIRELRYAFHPPPPPPPPPPLVRANELLGWEERPSSSTASSSFFPDTAARCGLLLEQTGSRWLRTRRFRSDLPPLSSEARPSGQDATEPVPQHEPAADANELNKVAPNGLELGAPENSSEERSKTATAFECNICFEMASEPVVTSCGHLFCWSCLYQWLNVYSSHKECPVCKGEVTEANITPIYGRGNSDAEKTVEDWKSPGPTIPPRPHGHRLESFWQQFHHIRPISRRLGEAHGILSSWRRLLDQQILGSVSRLEGPSESATQEINDIRQHDHLSGLALASRMRARRFQIEALSRPDGSSTSPPDNGLTGNNPSEILTGNNALLERLAGSNSRRLELLERLAFGIANTAGAMSDDFRRIASPNQYRGSASSSNLQNNEPAVDGARIAGAPSADQASNSSTVAVIQGDGGISESAGEPSNAGSSGSLRRRGRSNASGSLDVDGGSLQQNKRHRMN

SEQ ID NO: 9684 - protein, 192 aa, Zea mays
  unsure (1)..(192): unsure at all Xaa locations
  Clone ID: TF_LIB3354-087-Q6-K6-D6.pep
MGFPVGYSDSETLLPRVLLQALLLLGHLHRFLLWAFHAVGLGDLIDLGCNYPPPPPSASTAAAAVAAQEGRDVAAPLQHRRPEFRPVPAVRIEEALPVVRFDELAXRGARGRRXDCDCDCAVCLDGIGGGDEVRRLGNCRHAFHRACLDRWMAHGQRTCPLCRAPLVPGAAAADPWAEAPWLDAADYDVLPY

SEQ ID NO: 9685 - protein, 133 aa, Zea mays
  unsure (1)..(133): unsure at all Xaa locations
  Clone ID: TF_700169649_FLI.pep
TQELIDALPTYKFKPKRVKNWGIDHASSSEHLDEGGILGPGTKKERVVSAEDAHXVCCICLTKYGDDDELRELPCTHFFHVQCVDKWLKINAVCPLCKTEIGGVVRSFFGLPFGRRRVDRIAARGVASSRFSV

SEQ ID NO: 9686 - protein, 301 aa, Zea mays
  unsure (1)..(301): unsure at all Xaa locations
  Clone ID: TF_ZmC1904_1.pep
GWHSPLFAWIXGYTCFSCICCLPLIYWRYVHRNRHLDQEPQQPPTTYPTLTPSQSSEGRNHRTSGIVLHLGCISISCPRLSVLAYHFKTGVDCFFAVWFVVGNVWIFGGRSISSDAQDAPNMYRLCLAFLALSCVGYAIPFIMCAAICCCFPCLISVLRLQEDLGQNRGATQELIDALPTYKFKPKRVKNWGIDHASSSEHLDEGGILGPGTKKERVVSAEDAVCCICLTKYGDDDELRELPCTHFFHVQCVDKWLKINAVCPLCKTEIGGVVRSFFGLPFGRRRVDRIAARGVASSRFSV

SEQ ID NO: 9687 - protein, 415 aa, Zea mays
  Clone ID: TF_ZmC1904_2.pep
MEHASCDDVHEHAISVSHGETASTSTNHQDMYSDSDEPHQEDRPSTSTQTPSSESSPSTSPTAYSSRNLSFPRRDSIYGHGRNPWNSGLWISFEIVMYIAQVVAAIVILLFSRHEQPHAPLFAWIIGYTVGCIASLPLIYWRYVHRNRHLDQEPQQPPTTYPTLTPSQSSEGRNHRTSGIVLCLGCVTISCPRLSVLAYHFKTAVDCFFAVWFVVGNVWIFDGRSISSDAQAAPNMYRLCLAFLALSCVGYAIPFIMCAAICCCFPCLISILRLQEDLGQNRGATQELIDALPTCKFKPKRNKNWGIDHASSSEHLDEGGILGLGTKKERVVSAEDAVCCICLTKYGDDDELRELPCTHFFHVQCVDKWLKINAVCPLCKQEIGGVVRSFFGLPFGRRRVDRMAGRGVASSRFSV

SEQ ID NO: 9688 - protein, 121 aa, Zea mays
  Clone ID: TF_ZmC1904_8.pep
GRVKPKRVKNWGIDHASSSEHLDEGGILGPGTKKERVVSAEDAVCCICLTKYGDDDELRELPCTHFFHVQCVDKWLKINAVCPLCKTEIGGVVRSFFGLPFGRRRVDRIAARGVASSRFSV

SEQ ID NO: 9689 - protein, 268 aa, Zea mays
  Clone ID: TF_ZmC21265_2.pep
MATVGQSGALRRVTVHYASSPTRGAVVEVSLDDLDDELLQFVLADLLPGQEGLHQSILEGAHGSNQENYMRGAGSSAPSQEYHAQSSTAAAAAAASSRRNPGTDDAQIASDFEYATKLQQEMEGLSVDDDGDGISCVPSPSDSDDGHDHHDEEDEDEEDGNGGGDDDDDPDNMTYEQRQALVESVGSEDRGLSDELISYLQPWKYKASGFFSRKTNHDDCPICLSTFRNRETMITLPCMHHYHAACVTKWLRVNKTCPVCKYELFGPC

SEQ ID NO: 9690 - protein, 298 aa, Zea mays
  Clone ID: TF_ZmC4695_1.pep
MADFGDELFLDVGDDGFGDLSYVSFSESIELDLACPRDVFSAGFDPETLTHIPGSPISFDSDPDLRHLSPSLTCSPPFWGCLDDAASFEWEEIADAALGVGGGAGGAGGGGQGLEGDADADADVFGFLDEREMLGVMEGIDSGDDDSIFSDEPPFDFGDGDTELEGIFRSGVGWELLPVPLDEDEFEVLPGHVVEVGGAPPAALAVVERLQVVAVRGEEVVQECAVCKEGMEQGELTTGLPCGHFYHGACIGPWLAIRNTCPVCRYELPTDDPEYEKRRTRRHSAGGSTPQLGAPMQV

SEQ ID NO: 9691 - protein, 346 aa, Zea mays
  Clone ID: TF_ZmC28548_1.pep
YEPTRDCSQGLCSMYCPQWCYFVFPPPPPAFDIAGPGGGGGDDDSSGPTFSPLVIAIIGLLASAFLLVSYYTVISKYCGTFSSLRNMVFGSRRGRGRGRGGGGGGGGGGDSGAQVPWGAMPPDGLDETLINKITICKYKRGDGFVDSTDCSVCLGEFRDGESLRLLPKCSHAFHLPCIDTWLKSHSSCPLCRCNIAFVTVGVGAVSPEPEPERRAPREDRDWRRDNPELVLTVGGPSSDPVRGAPQSQSQNAVSGSGGDDGQDALARKDCPERSEEGSGNAEIKEDCALPAVRAASSLSDTHREGRMSIADVLQASLEDELTMARESGLLAGSSGRCPCHGEHSKD

SEQ ID NO: 9692 - protein, 154 aa, Zea mays
  unsure (1)..(154): unsure at all Xaa locations
  Clone ID: TF_jC-zmshLIB3569P008d01b1.pep
MLMGFPVGYSETPKLLLHLLFLLDHLRRLSSWLLRLGGATDADADTDAGHPRHPCAAAQRLEEHSPAVRFDSLPCGSGGGVMAPLPLPQGCCICLGDFHAADEVRRARSCRHVSHRACLDRWAXHGHRTCPVCRTPLLPXAAVPHPLTVPLPPS

SEQ ID NO: 9693 - protein, 241 aa, Zea mays
  unsure (1)..(241): unsure at all Xaa locations
  Clone ID: TF_ZmC502938_1.pep
MAAANVGEXTSGGSSSSGADAGGGFECNICFELPQEPIVTLCGHLFCWPCLYKWLRIHSHSPECPVCKAVVEEEKLVPLYGRGKDRVDPRSKNVPGAADIPSRPAGQRPATAPQADPNNAHFPNAANPANPWFMGGGGGGIPLANARWGNYTFSAAFGGLFPLLSFQVHGFPDATAYGQPAGFPYGYGHGHAFHGGHAGAHAHAAAAAPRHAQHQQQQADVYLKALLILVGVLVIASLVTF

SEQ ID NO: 9694 - protein, 439 aa, Zea mays
  Clone ID: TF_ZmC7715_1.pep
DSVGDLEASSTPQPNAARAAGPCCPGVYCSLTPRAATPGPRHHSSRPPRRRSGQQEQDVQSGRPGAVSLTTRGPRPIGRTALWCTGVSRPSSLTPSPATPSSILPDGAPGSRNKMSNRATHWCYACRRPIRLRGQDIVCPNCNDGFIQEISEMGGILNTYGLIEPDFEERRARRFGMMDAMSSLMRQRMEEMGRDGLFDIRGRQGTGTEYGRRPTAVPTLVFGGIPSPGVGSGDVNVVLRGGRRAGAAQPNFSSLVVGPSLEALFEQLLLQNNRQGPAPAPQSAIDSMPVVKINRRHLDDDPQCAVCKDKFEVGAEAREMPCKHLYHTDCIIPWLVQHNSCPVCRHPLPSQRSGSTSSARPSAYYNEAADPPGVTRADLEPAPRDGGRESQERRRSFSFLWPFGPSSSRSSSYQYEQNVDEPAVYDPNQIAYSEWHYDH

SEQ ID NO: 9695 - protein, 402 aa, Zea mays
  Clone ID: TF_ZmC7715_2.pep
GRGHWVPRGGTGQRPFPPRATRPIGCTALVVCTPLVTHSLPHIPFPPTALLAARNNMSNRATHWCYACRRPIRLRGQDIICPNCNDGFIQEISEMGGVLNTYGLIEPDFEERQARRFGMMDAISSLMRQRLSEIGRDSLFDIHGRQGTGTEYGRRSTAIPTLVFGGIPSPAVGSSDINVVIREGRRAGAARPNFSSLVVGPSLEALFEQLLLQNNRQGPPPAPQSAIDSMPVVKINRRHLDEDPQCAVCKDKFEVGAEAREMPCKHLYHTDCIIPWLVQHNSCPVCRHPLPSQRSGSSTSSARVPSAYYNETACPPAVARADFDPVPSAYYNETATDPPAVTRADFDPAPGNYGSESQESHDPFSFLWPFGPSSSYQYEENVDEPAVYDPNQIAYSAWHYDH

SEQ ID NO: 9696 - protein, 198 aa, Zea mays
  Clone ID: TF_ZmC2205_10.pep
MNTVSGTKRAPRRQSQDGSGDKLVVIVEASSRGVGSRRGPHTPIPGALNSPIDVEAIEDEVQAVSPSRVPLPRRNRRTRREPITVVDLEVEASREGSKRQRVEPVGRHLYPDWGARSSLQSNAVQTSKEPAKEVPEEPSFTCPICWNKMEEPSTTTCGHVFCDTCIKQAIKVQKKCPTCRKGLKMNSVHRIYLPNGSS

SEQ ID NO: 9697 - protein, 249 aa, Zea mays
  Clone ID: TF_ZmC2205_2.pep
MDKSGRGERTFASEFGRGFAPPFLNSSARSNSVPIRQVHCEVEVGGISIEESMSTASGTRRAPRRQSQDGSADKVVVIIEATSPVVGSRRGPPTPVPGAQNSPIDVEAIEDEVQAVSPSRVPPPRRDRRTRREPITVVDLEVDASQEGSKRQRVVAVDHLSPDWGARSSLQSNGVQTSKEPAKEVPEEPSFTCPICWNKMEEPSTTTCGHVFCDTCIKQAIKVQKKCPTCRKGLKMNSVHRIYLPNGSS

SEQ ID NO: 9698 - protein, 158 aa, Zea mays
  Clone ID: TF_ZmC2205_5.pep
DPNGPGSSARPPRRRGCEDEVQAVSPSRVPLPRRNRRTRREPITVVDLEVEASREGSKRQRVEPVGRHPASDWGARSSLQSNAAQTSKEPAKEVPEEPSFTCPICWNKMEEPSTTTCGHVFCDTCIKQAIKVQKKCPTCRKGLKMNSVHRIYLPNGSS

SEQ ID NO: 9699 - protein, 170 aa, Zea mays
  unsure (1)..(170): unsure at all Xaa locations
  Clone ID: TF_21214430.pep
MGYDNKPMEKSSNLERQTELSCVICWTXXXSTRGILPCGHRFCYSCIQGWSDCLASRGKVSTCPLCKASFTWISKVDEAGTLDQKVYSQTIPCEASTDXXVLGSEGYDFSGPTSGQGACYQCHFREPEELLLSCHVCRSLWVHSYCLDPPLTPWXXXXXXDLRVLFHRYR

SEQ ID NO: 9700 - protein, 152 aa, Zea mays
  Clone ID: TF_ZmC1181_1.pep
MARYRSDLQGELSSLDDSMEDPNGYLRFDVGGIEELENYFIFNDRHRGMRMDIDGMSYEELLALGERIGTVNTGLSDDALSACLNRRLYMPTASGSHEDCERKCSVCQEEYLAGEEVGEMACKHYYHLSCIDHWLRQKNWCPICKSVALKIN

SEQ ID NO: 9701 - protein, 200 aa, Zea mays
  Clone ID: TF_ZmC60888_1.pep
MMFQGTKGITLLQPSLRGQSERQQGFFTRPPAQGFFTTAARRGRTTAGFPTPCSRPGNGSFRGSAAWTWSWRRDEGALHKTWPLQTLWAGAGGLARPVVDASSGGGQTSCFQFQFQPGEREPIPVFPKPAAFVAVQEVEDGRAAPADAASDCSICLERCGAGGGLTQLRCGHVFHSACLQRWLRSRADCPYCRATVRARS

SEQ ID NO: 9702 - protein, 215 aa, Zea mays
  Clone ID: TF_ZmC11035_1.pep
MRHLQATVEHLAGVAATPPPASAGGGVHTDTFLILAAVLCFLLCVVGLAFVARCSRLCNPSSYSVDARGPVDDDDDEAAMPAPRKGVDRAALEKLPTVPFAFEDEDAQDGERPECAICLAEFAPGDEVRVLPPCAHAFHAACVDTWLLCTSTCPSCRTALVLAQAQAPPASADPLMQCCACASAQASAGPAECPVLPLPLAVVVVERGPCRTSVP

SEQ ID NO: 9703 - protein, 428 aa, Zea mays
  Clone ID: TF_ZmC1307_29.pep
MPTQKRPPPPPPPSPSPSAAPGAGSPPPSSPPLPTAEPAEKKPKLEVNGSAGAEANGNANDFGAKEGTEVEASESESEDADAAKQEFVPVKLSDVRKEVQCPICLGIIRKTRTVMECLHRFCRECIDKSMRLGNNECPACRAHCASRRSLRDDPNYDALIAALYPDIDKYEEEELAFNEEENDRNKQIQASIAEAFRKQSEVIGRKSTAKATAAAFVRRSRRNIRPNGQNTYFRGRGKASSDDVALACSEDEEDGNGESCSKEASSAEESSPEKKQKRLPKWPTPRSSPARACNDEVASDEKDDVGISRENFSTSPLRAWGKNGTRSQTRHSSFSGSNGRMVKGGRMIKLVECLRNSDDNEGERDFVASQTSHKDEEVEMYALKPSCSKPVSTNTCGPDKARLAGEERLSDLRSSFTFPNGVLVRSNT

SEQ ID NO: 9704 - protein, 374 aa, Zea mays
  Clone ID: TF_ZmC5523_1.pep
MPMRGVDFKWYDGFFLSMLATSVIIVSINWKRYRLCAHPLHIWIVVDYTTVFIDCILMIKIMITLAAGMLDLGWQQRYARFCGRIIVLSVLVLLLYPFLWVWTVIGTLWFSTARGCLPEEGQKWGFLIWLLFSYCGLACIACVAIGKWLHRRHALQQRAQQGIPVSEHGVLVDMIRVPDWAFEAVGLEMRVGQDTAYHPGLYLTDAQREAVEALIQELPKFRLKAVPTDCSECPICLEEFHVGNEVRGLPCAHNFHVECIDQWLRLNVKCPRCRCSVFPNLDLSALNNLRSTSEPDHPSASASNVTTATAATRYVRSQPAGQSYLVRLQGLLLRPVRHDSVESDGEPAVGNSRLVGTEELPSILVDDGHQLPDR

SEQ ID NO: 9705 - protein, 292 aa, Zea mays
  unsure (1)..(292): unsure at all Xaa locations
  Clone ID: TF_ZmC17955_1.pep
MSAGRQAYWCYQCRQRVRPRGREMVCPYCDSGFVAEMDDVDALMSHFVGTDPDFHRDPRFGIMDAISAAAAXRRANIDGYFVGPGLDDFIEQLTQKDRRGPPLVFRSSIPAMLTEENSXDVFVRTRRGGGGGGGSRRDPNIADYFVGPGLDDLIEQLTQNDRRGPPPAAQSSIDAMPTVKITQRHLSGDSHCPICKEKFEMGSEEAREMPCKHLYHSDCIVPWLEQHNSCPVCRYELPPQGSATGASCSRARSTDQSQSSSSSSSSGRTSGRQRRRNPFSFLWPFRSSSSSR

SEQ ID NO: 9706 - protein, 851 aa, Zea mays
  Clone ID: TF_ZmC10271_1.pep
MSTCLHVQDPRNIAMSRPLDFAVLKYKNQKLAEQLEVHKFEFCALESRFNDLKEKQRTHNKTLVLVKSYWERLIADLGIVSVCKNESSRSSCSTGNNNIRKDFLNGLLEAGATESSGSPNCQLGNDVSSEQSTTIDILQKLFLPSSGPWHVNNEFVSAALMKLPENEHSRQLHNATSDVLSKLHVVMRTVDNLHLKHRQLAANYQKQRDSSAWNRAEQKRLKEELTSVVAKLEGSKQKLAVLKAQGDNKQATPILVPTLGNKNMTAEKVRDKQTELQDLEATHKELMELISKRLEEIRRLHTERIEILNKLATFQNILTDFKSIHSSKAFQLVNDQLQKSQAELDDHQTLLEKLQVEMDTFVWRERQFNQKVDLAEIPQKVSAYCVSRIADLEKDVQKLCNEKNMLVLKLEEASREPGRNQVISEFKALVSSLPREMGAVQSELSKHKDASLQLHSLRAEVHSLSSIQTRKEQEIEEMSFRSAHAGSDISQLQSLVRELRENTQELKLFVELYKHESTDSRQLMESRDRELAEWARVHILKYSLSESKLEQRVISANEAEAISQQRLATAEAEIAELGQKLETSRRDLVKQSDILKSKHEECEAYVVEIESIGHAYEDIMSQNQQLLQQIIERDDHNTKLFMEGVKSKQSHDALHLEVRSLQRNLQHASTLMDLCNQKTIRLEDQLRGWSERLRRLSEDGMQQSISLGNYQKKLSGMHGEAPKLRQSMDVLQAKAGSNRLEIAELLIELENERFGKKRLEDDLDLMSSKANSLREKTDNSAVLQKLLHEAKEYRGILKCGICHDRQKEVVIAKCYHLFCSQCIQKPLGSRQKRCPSCGLSFGVNDVKPIYI

SEQ ID NO: 9707 - protein, 173 aa, Zea mays
  Clone ID: TF_LIB4756-071-R1-K1-H3.pep
MGGCCCCCCSARASDSDRAPVRIYHRQNPEEHAPLSSAFDGPSPTSAIVAVDTNLDTSSLDTYRAPPAPLPYDVCFTVSENPDVEKSGIKIKTDGQQAPKVDEFESCEKGAPEDKADEEDVCPICLEEYDKENPRSVTKCEHHFHLCCILEWMERSETCPVCDQITLIDGMYE

SEQ ID NO: 9708 - protein, 174 aa, Zea mays
  Clone ID: TF_ZmC19345_1.pep
MGGCCCCCCSARASDSDRAPVRIYHRQNPEEHAPLSSAFDGPSPTSAIVAVDTNLDTPSLDTYRAPPAPLPYDVCFTVSENPDVEKSGIKIKTDGQQSPKVDEFESCEKGAPEDKADEEEDVCPICLEEYDKENPRSVTKCEHHFHLCCILEWMERSETCPVCDQITLIDGMYE

SEQ ID NO: 9709 - protein, 174 aa, Zea mays
  Clone ID: TF_ZmC19345_3.pep
MGGCCCCCCSARASDSDRAPVRIYHRQNPEEHAPLSSAFDGPSPTSAIVAVDTNLDTSSLDTYRAPPAPLPYDVCFTVSENPDVEKSGIKIKTDGQQSPKVDEFESCEKGAPEDKADEEEDVCPICLEEYDKENPRSVTKCEHHFHLCCILEWMERSETCPVCDQITLIDGMYE

SEQ ID NO: 9710 - protein, 226 aa, Zea mays
  Clone ID: TF_ZmC75319_1.pep
FRSDPSHCLTRPRPGTEGSKSKGMDQAAAMSPSPRAAAGIHWEAHGRLLTACLVVLNVLLVLLVYAYFWRFFSRSRTRGGGGGGGGEDDDSADGASASSEASSPPASPKARDRREVQLAITALPVFVHSSSGVGVGVGGPAAECAICIAEFADGDQGRLLPRCRHRFHARCVDTWFRSHTTCPLCRATVLADAAPAPAETANQNQPPHHLHTDTPNGTDSSTESPV

SEQ ID NO: 9711 - protein, 457 aa, Zea mays
  Clone ID: TF_ZmC989_1.pep
MASDGHPPEPGKKEDVATTAAGPGANDLDDPQFMCCVCLDLLYKPVVISCGHMSCFWCVHKAMHIFRESHCAVCRQPYIHFPSICQLLHHLLLKLETNDYKRREKEVLEEEKRMQTYSPQIIEFLNYKTNVGSYKENRNEDSKARPPQEVPLNDSVPDEHLKKIKLEDVSCPLCMEMLYQPAVLNCGHVYCVSCLSSLNEETLKCHVCGSLHPGDFPNVCLDLDHFLEEYFPAEYELRGQKVQFKKDQCNRETSSSGTSGRKGSTRALHAEDPSNIHIGVGCDSCGVYPIRGKRYKCQDCTELIGFDLCEACYNSSSKLPGRFNQRHTPNHRMEVDNSALVHRILRHHGIPEEGPEGLMMEVVGPDAMVQILIDNQGMEEGNDEGPGEAAIEEPVGSLGSMSRLSHLFMYNPEMEDGNDEDSGEEAAIEEPVGSLGAMAPLFMYDQEMEDNEEDQAH

SEQ ID NO: 9712 - protein, 204 aa, Zea mays
  Clone ID: TF_ZmC412090_1.pep
MDMLGGAVAEEDGADDARGSSADEEEDEEDDDEEEEPEGAQLVAGDCGPSLRARVSEFAAVAGAAVERAHTSNCPVCMDPWTSQGPHRISCIPCGHVYGRSCLEKWLTLRGNQSATCPQCGKRFKHKDIINLYAQEVAVPNSELEKEISYLRREICSLKKMVVHHDKMFEEMIKRQNDGVRSKRQKVAEHSYEAANLVASTPAQ

SEQ ID NO: 9713 - protein, 60 aa, Zea mays
  Clone ID: TF_LIB3354-068-Q6-N6-B2.pep
GPKYECCICLCPYEDGVELRELPCNHHFHCSCIDKWLHINATCPLCKFNIVKSNLHREEV

SEQ ID NO: 9714 - protein, 357 aa, Zea mays
  Clone ID: TF_ZmC2201_1.pep
MASTSPRRSSGGDSASPSAPLIPSPPTSPASGPSGGPLGRLTSLRGAARFIRRTGSRRLMREPSVAVRETAAEHLEERQTDWAYSKPVVVLDMLWNLAFVAVAAAVLAASVGERPTVPLRVWIVGYVLQCLLHVLSVTVEYRRRRRNADQEGAGDEDLKLSIVKHLESANTMFSFIWWILGFYWVSAGGQALSHDAPQLYWLTIVFLAFDVFFVVFCVALACVIGIAVCCCLPCIIAILYAVTDQQEGASEDDINNLSKFKFQTMSDADKLAAGIAAPVGGVMTECGTNPPVEHILSAEDAECCICLCPYEDGVELRELPCNHHFHCSCIDKWLHINATCPLCKFDIIKSNRDIEEV

SEQ ID NO: 9715 - protein, 87 aa, Zea mays
  unsure (1)..(87): unsure at all Xaa locations
  Clone ID: TF_ZmC2201_3.pep
IAAPVGGVMTECGTNPPXVERWHDILSAEDAECCICLCPYEDGVELRELPCNHHFHCSCIDKWLHINATCPLCKFNIVKSNLHREEV

SEQ ID NO: 9716 - protein, 205 aa, Zea mays
  Clone ID: TF_ZmC9720_2.pep
MAMAPQGQAEHGQVHVHDHQLGHRPEPNSRHPDPGAAATSSIATNRWGPYSGAGDFASNMAVILAALLTALALALALNAAVRYLLSRSRRARRGRAGSSSGERDRDSDANISDPEKLAVEAPPPPPPPPPALVYSAAGTKLAGAAAECAICLAEFADGDTVRVMPVCGPGFHARCIELWLAGGRRSSCPTCRAPAGAAAATPSSS

SEQ ID NO: 9717 - protein, 498 aa, Zea mays
  Clone ID: TF_ZmC514_2.pep
MACPRGRTPFPLCFFLMICLMAQLGASNVVLMANNTTLSLDDVEATFTPAVEGSGVSGVLYAVEPKDACSPLRAKAIQGSVSPFALIIRGGCQFDDKIRNAQNAGFKAAVVYNNEDNDILVSMAGSSLGVQIYAVFISKASGEELKKYSGQTDAELWIIPTYENSAWPIMAISFVSLLAMSAILVACFFARRHQIRRDRARLPRAQESHGMSSQLVKAIPSLIFTKVQEDNCTSATCAICLEDYSVGGTRRVLPCRHKFHAACVDLWLTSWRTFCPVCKRDASAGTSDPPVSESTPLLSSSATRLPESTVLASLRSTAAASPPRTISRHPLLRSISRNYSVSGSSILRTPDSRFDANSSICTSGSNLDLANVPSPWSGTWHRASAHSLCRGYLSPPIGIRNTSAHVSRSANGSPSRYVGSSRMSHGSSGQQHPHLRHCTLSGPSLFTMVPQSPQQNQLQHGGYSETNLSAAASAQSFRQLYLQHCPDSDTSSQSLPGC

SEQ ID NO: 9718 - protein, 161 aa, Zea mays
  Clone ID: TF_LIB5120-011-A1-PF1-G11.pep
MARILVEAPAGSGSPEDSINSDMILILAGLLCALVCVLGLGLVARCACSWRWATESGRAQPGAAKAANRGVKKEVLRSLPTVTYVSDSGKAAAEGGADECAVCLAEFEGGQAVRVLPQCGHAFHAACVDTWLRAHSSCPSCRRVLAVDLPPAERCRRCGAR

SEQ ID NO: 9719 - protein, 195 aa, Zea mays
  Clone ID: TF_ZmC128844_1.pep
MSGQSSSSYGDTDPGTDRAYSTTSSSIRWGPHGRGMTACLVVVNVVLVALVYLYFWRVFSRRSAASPSAANPTDHDDDASSTSTPPSPLSSQDQHGRIVASLPTFVVRSGSGAGAECAVCIAELRDGDEGRALPRCGHRFHAACVDAWLRRRHTTCPLCRASVVVAAEEVGPTKGSGVTDTTTTTVALEDMDAPV

SEQ ID NO: 9720 - protein, 165 aa, Zea mays
  Clone ID: TF_ZmC235641_2.pep
GLATAMSFLSSLSSLGLGYSIAIALGFLVLLASLLLAFYFCFGRGGDYWAGEAATTASSSGHLSITVPRVLFVAEGSESPDADAAYSSAAVAACSPVGLDAAAIASYPKVPFSSSGATDADAMCSICLSEYRDGETLRVMPECRHGFHVACLDAWLRRSASCPVC

SEQ ID NO: 9721 - protein, 151 aa, Zea mays
  Clone ID: TF_ZmC461818_1.pep
GLALVARCACRRGGGASVSVSATTSGGRSSAQAPSGLEKAAIEALPTVSVSSSLKQASRRDAADKEECAICLAAFVEGDQLRVLPRCAHGFHAACVDTWLAAHASCPSCRATIVSVVSPLCRRCGAACCDQQEETPMAAPEPAAAGRGLHA

SEQ ID NO: 9722 - protein, 569 aa, Zea mays
  Clone ID: TF_ZmC6343_1.pep
MGPAVRSSVVIRATVVGLVLVGIALALPLAAALRPLREHVASIGAAASAGSWGDEHAFYKRDENDIGPYSWNITGTYKGSWTFAGATNGSSRFLEFVESKGDSVLELLSTPTKISGVHYVQGSVTFHDVIDNAHNGGVAQIRLEGVYIWPFRQLRMVANSGADGEPLQEEDYFLSNPYHLLRIFSSQVFQESSEEKNRRKNSLTYDMEKHCNTEIAAKVVRVSSNPNDGEHEKYRLEGLMESPAVDDDGECFSPILLNATSLNVEVYYNKAVNYTLMVTFISFLQVLLLIRQMEHSNTQSGAAKVSILMIGQQAIMDAYLCLLHLTAGILVESLFNAFATAAFFKFVVFSIFEMRYLLAIWKASRPLNSGEGWEIMRRELSVLYSRFYGILLGGILLMYELHNFLRPLLLLMYSFWVPQIVTNVIRDTRKPLHPQYILGMTVTRLAIPLYIFGCPSNFMRIEPDKKWSIAVTVFMGIQAAVLLLQHYLGSRCFIPRQILPEKYCYHRKVEDSTNQPIDCVICMTTIDLTQRTSEYMVAPCEHIFHSGCLQRWMDIKMECPTCRRSLPPA

SEQ ID NO: 9723 - protein, 272 aa, Zea mays
  Clone ID: TF_ZmC21265_1.pep
MATVGQSGALRRVTVHYANSPTGSTVAEVSFDDLDDELLLFVLADLLPGQEGLHQSILEGTYNNQENHMRGAAPSAPYGYSRPEEYRAESSTAAAAATGSRNSGMDEAQIASDFEYAKQLQQEMEDLSVDEDDNDISCVPSPSDSDDEHEHHDEEEEAEEDGDGGWNHDDPDNMTYEQGQALVESVGTEYRGLSDELISYLQPWKYKAVKASGLFSRKTNHEDCPICLSTFRNRETMITLPCRHHYHAACVTRWLKVNKTCPVCKYELFGPS

SEQ ID NO: 9724 - protein, 107 aa, Zea mays
  unsure (1)..(107): unsure at all Xaa locations
  Clone ID: TF_ZmC21265_3.pep
FVALFLVMQQXQALVESVGTEYRGLSDELISYLQPXXKYKXQSRASXGSSPRKTNHEDCPICLSTFRNRETMITLPCRHHYHAACVTRWLKVNKTCPVCKYELFGPS

SEQ ID NO: 9725 - protein, 259 aa, Zea mays
  Clone ID: TF_ZmC1320_3.pep
ISIDEAVEENEGSPRACACQIACSTSASRPSRNSALPGCAKFMASDTRKKLIQIDVSSDTVCPWCFVGKKNLEKAMEQSKGKFDFEVRWHPFFLNPDAPKEGVKKSDFFKMKFGPVQYEGAMSRMTEIFRGLGLEYDMSGLTGNTMDSHRLITLAGHQGYDKQNVLVEELFLNYHCQGKYIGDKQVLLDAARKVGIEGAEELLEDPIKGVDEVQEELKKYSSDISGVPHFVINNKYQLSGGQPPNEFTRAFEMAAKDGT

SEQ ID NO: 9726 - protein, 501 aa, Zea mays
  Clone ID: TF_ZmC3547_2.pep
MKSSRFLFLCAMFCLMARLGAANVVLMGNNLTLSFDDIEASFSPGVKGSGVSGVVYASEPLNACSPLTIKTVNGPPSPFALIIRGGCTFDEKVKNAQDAGFKAAIVYDNKNSGVLVSMAGSSSGIHIYAVFVSKASGEVLKKFSGNMDVEVWILPTFENSAWSIMAISFVSLLAMCAVLGTCFFVRRHRIRREHPRIAEDREFHGMSSQLVKAIPSLIFTKVQEDNCTSSMCAICLADYNVGEKLRVLPCRHKFHAACVDLWLTSWRTFCPICKRDARSGASEVVATEATPLLSSAARLPSFRSSVAASPPRPISRHPSSHSVSRAYSVSSTPNSPNPFISSHISSPGIRASRSITDLGNISSLHPRISHLSSTHSLVGSHLSPPISIRYWSSHVAHSGYGSPSPHVSSSYISNSGYGSSSYCYLGLGGSSHSQHGTYLRRCGESGPSLCTMVPQQLQWETNVAAGASSAKSLRQSSYLRHCGDSDASLSDMTSAQSLPRC

SEQ ID NO: 9727 - protein, 223 aa, Zea mays
  Clone ID: TF_ZmC134339_1.pep
MDAPTASSPSSSFPGTSFVVLSVSIVGILATSLLLLAYYLVLTRCGLLFFWRPGMHDDDDDVAAGPGHRRHVVVTVHDEPPRRSGMEEAAIRRIPTFRYRHGSTRLVLAAEAKQAACAVCLADFRDGERLRVLPPCLHAFHIDCIDAWLQSAASCPLCRAAVSDPAALALRCHHLDVPLPRAATDDVAVDVVSSSPTPTSADAAGETEAVPSHETAHRNSSCR

SEQ ID NO: 9728 - protein, 386 aa, Zea mays
  Clone ID: TF_ZmC50086_1.pep
MSTPAAAYYAAAARKQYFCYQCNRTVLIAASAAAAGELSCPECHGDFLEEVTVPAPTFIPLPFPFPFAPTTIPAASTTPAPAPAAGSGGSPSLSSSSSSAATSPSQPNDISSILNSFLGLGEQPIRVGGSASRAAAGTATPENEPEPFDPVMFFQNYIHSLVEGGANIQVLLDDASVTLGSGPGLGRIGGASFGDYFVGPGLEQLIEQLAENDPNRYGTPPAAKSVLSSLPDVLVTHAMVAAAEGAECAVCKEDFSPGEVAKQMPCKHIYHTDCIVPWLELHNSCPICRFELPTDDPDYEGRKGTNPQPAVGVAAAASGSSTAAEGQMEERQENPRVVERRFNVSLPWPFSGLGGQTSQQDGNSGGSGSNSQGSGSQDGGPPSSKN

SEQ ID NO: 9729 - protein, 141 aa, Zea mays
  unsure (1)..(141): unsure at all Xaa locations
  Clone ID: TF_LIB4572-004-R1-K1-H2.pep
MDEKATMESKLSSAAAFVXGGVQDACDDACSICLDAFCDSNPSTMTKCKHDYHLQCILEWCQRSSQCPMCWQHISMKDPMSQELLEAVEQERNIRANPSRNTXAVFHHSNAGXDFEIPVXADDAELERRIIQHLAAAAAVR

SEQ ID NO: 9730 - protein, 121 aa, Zea mays
  unsure (1)..(121): unsure at all Xaa locations
  Clone ID: TF_ZmC3546_7.pep
MDEKATMESKLSSAAAFVEGGVQDACDDACSICLDAFCDSNPSTMTKCKHDYHLQCILEWCQRSSQCPMCWQHISMEDPMSQELLEAVETERNIRANPSRNTAGFHHQMLGEFEIPVXADD

SEQ ID NO: 9731 - protein, 122 aa, Zea mays
  unsure (1)..(122): unsure at all Xaa locations
  Clone ID: TF_LIB5116-055-A1-PF1-C1.pep
MAANVGESAAVGGSSSDAAGGSFECNICFELPQEPIVTLCGHLFCWPCLYRWLHMHANTPECPVCKAIVEEDKLVPXYGRGKDRVDPRSKNTPGVDIPQRPAGQRPATAQQADPNNNFGNAH

SEQ ID NO: 9732 - protein, 502 aa, Zea mays
  Clone ID: TF_ZmC12547_1.pep
MSDQQRHYGSYELLPAHPDLRCLVCTRPFTLDAEVTDSLEALAICRECKTTVLSDSNRDDTPRANRQRRWRRQQSSIRGVSVFSQLINLARQQGHEADTDSPTVPRRHTSYSSTPSRSQRGHTSDDESDGLSYADSVFGEIESNISFGDEGGESDTSLDRHTMVGREIGIQLDNESYMNTDTDIDPMNAGVYQWDSDDPEDDEDEESEESGLDEGDDTMQERRQQWHDIAPSGLNEQESEGAAWTWRTVGSQDINRTDLRVDMEGREIRRLFIGNPGDYVDARQFEMLLEQFADEDNNSRRGAPPAAASSIENLSSVVISKGYEINGGVTCPVCKDDMPITTVAKQLPCMHLYHSSCILPWLNSRNTCPVCRYELPTDDSEYERSKHAAVNEGGIHGVERTHPQEVVEETYEPEVDGGSNTGGDTMNETNTHEQHTAQQPNGAHGRHRWLFIAAAPVVSLVSLALVLCFTNPAGNVRRQLCRRSQTTTTAHVDTRRSWWSMF

SEQ ID NO: 9733 - protein, 400 aa, Zea mays
  Clone ID: TF_ZmC31511_1.pep
MGNAGSNGGGPATGHRRRSSGHGHHQQAPPPPQPQETAPNRYVFAAATPYPPQYPNPNPPQYYPQYGNYYPPPPPSVPVPLPAPYDHHHRPPTAAPGEFPPPPTAHPHNYPGWAGRYPSYGPHLSMPTPYVEHQKAVTIRNDINLKKETLRIEPDEECPGRFLVAFTFDATVAGSMTVYFFAKEELNCNLTTVKEDLIKPITVSFKEGLGQKFRQPSGTGIDFSVFEESDLLKQGDMDVYPLAVKAETTLSVDHPPEGDDQKMITPNSQITQAVFERKENGDYQVRVVCQILWVNGTRYELQEIYGIGNSMEGDADANDPGKECVICLSEPRDTTVLPCRHMCMCSECAKVLRYQTTRCPICRQPVERLLEIKVNNKSEDQQQTPQSPPLPDLAPQQEGV

SEQ ID NO: 9734 - protein, 224 aa, Zea mays
  unsure (1)..(224): unsure at all Xaa locations
  Clone ID: TF_ZmC31511_4.pep
STYLFTIQRLCWDELSSIIKHVTVSFKEGLGKKFKQSSGTXIAFSVFEESDLLKQGDMDVYPLAVKAETTLYVDHPPDVGDQKIKTPNSXDHSGSQVVFEKKENGDYHVRVVCQILWVDGTRYELQEIYGIGNSVEGDADANDPGKECVICLSEPRDTTVLPCRHMCMCSECAKVLRYQTTRCPICRQPVERLLEIKVNNKSEDQQQMPQSPPLPALDPQQEEV

SEQ ID NO: 9735 - protein, 167 aa, Zea mays
  Clone ID: TF_ZmC270420_1.pep
PLSAATGEQHGAAAERALGAQRQPPSDAVRVERVAARRQRPSPYRYRRFGSSRQLGQAHRALVRWGRQRRATRPRCRSGPAPAARLVDGRRRHGRSGRNGGCGHGARDGHGGRPANGFFAARSLVLCFASARVSVPLQDVRCVRMYIAPPGGPTPRGGGDYRAYQLT

SEQ ID NO: 9736 - protein, 223 aa, Zea mays
  Clone ID: TF_ZmC888799_1.pep
MSVGQLHTRRLLSHAAAAAAASSAGPPATEVQVPAAHAHAAAPFSSLNTMVITALSLLLCGLVVVLAVHAVVRCAFRVTRRVCYGQDEPHGGGGGADALAVAASFSCQAGPRRKRGPRTGLPPWILYSREVELTGCGAAECAICLTEFVRGDRVRALPHCNHGFHVRCIDRWLAARQTCPTCRRAPFAANPSLSLPDSAEAPESVQLQARVESGAGQHQHETQ

SEQ ID NO: 9737 - protein, 119 aa, Zea mays
  unsure (1)..(119): unsure at all Xaa locations
  Clone ID: TF_ZmC3298_4.pep
VNSNSSKPAGLPFKSKDEPRIESFLQKNGNLHPKRYTYADVKRMTRSFTEKLGQGGFGPVYRGSLHDGRQVAVKMLKDTKSEGXEFMNEVASISRTCHVNIVTLTGFCLQGSKRALVYE

SEQ ID NO: 9738 - protein, 305 aa, Zea mays
  unsure (1)..(305): unsure at all Xaa locations
  Clone ID: TF_ZmC3219_3.pep
MRGWRHSPGGLEEEIRMFQTRVLLGGMNMYDRYQDWRLDVDNMTYEELLELGDKIGYVNTGLRDDEITRNLRKVKHPSFSSLRFATEMERKCSICQEEFETNEEMGRLDCGHSYHVYCIKQWLSQKNICRALPEPQRPCMSRRXTVQEQISSPFMDSPPPHLDAPFFGADLIPSGRLRRMRGYRXSPGGLEEEIMMFXTRVLLGGMNMYDRYQDWRLDVDNMTYEELVELGDRIGYVNTGLREDEIARSLRKAKHPSFGSLRFAAESNEEMGXLVCGHSYHVLCIKHGLSXKNXCPVCQTAVTRN

SEQ ID NO: 9739 - protein, 335 aa, Zea mays
  unsure (1)..(335): unsure at all Xaa locations
  Clone ID: TF_ZmC11494_1.pep
RSAEDDDRRRAAWMVLMAGMLPGVECARRRRVRQGGAGMGAEAAGGGTGRRSSFCLYAAGHGGAGNSGKRSGGVVHGHGWTLDSNAREAKERLDQKLRTKREAAIKRHHSTGSIKLGVPHRSAGADERGESSAPAMAGVQREVYSKKGVMRRLMRWSRPRWAAAEQAECAVCLDEFRAGDVLAHLRCGHRFHWACALPWLEGTSRCPFCRAAVDAXPPPPPTAPRSGRGSGLAGACPGLGRRGAPCRCRPTPATPPPWRCHARQWLVGVVMVSGDRPACACGAERRRTARRARRTRECLGSFCTLCARKGTVGAHLLVGPFGPPLPCPPPIIASK

SEQ ID NO: 9740 - protein, 159 aa, Zea mays
  unsure (1)..(159): unsure at all Xaa locations
  Clone ID: TF_ZmC11494_2.pep
PCSRHHSTGSIKLGVPHRSAGADERGESSAPAMAGVQREVYSKKGVMRRLMRWSRPRWAAAEQAECAVCLDEFRAGDVLAHLRCGHRFHWACALPWLEGTSRCPFCRAAVDAXPPPTAPRSGRGSGLAGACPWDGAGRLVAVGPRQPRHPHGVATLGSG

SEQ ID NO: 9741 - protein, 310 aa, Zea mays
  Clone ID: TF_ZmC1250_1.pep
MSSSPAALRFYCHQCDRTVSLAPPASPDADVFCPRCGGGFVEELPPNPSPAPPAAAFFAPPSFDIRHPSDLSAFFGPASPEPLAPGLFDPSNFLHDHFGGLLSGGATIQIVLEGGPPPPGLNFADYFVGSSGLEQLIQQLAENDPNRYGTPPAAKAAVASLPDVAVSADMMQADGGAQCAVCMDDFHLGAAAKQLPCKHVFHKDCIVPWLDLHSSCPVCRFELPTDDPDYNHTHQQHGDSSAPAPPSPAPAVSSPRVAERRFRISLPWPLRAAFGAAQAESSNPTDDDVPPSGSDAAGGPQSQTGYDDLD

SEQ ID NO: 9742 - protein, 120 aa, Zea mays
  Clone ID: TF_uC-zmroteosinte115a04a1.pep
VPILLCCKHVFCEDCVSEWFLWGRSCPLCRALVRPADLRSFGVGSASLFFQLLWSFRASCSWASWGAPPCAYVSCVCVCVFLLAARASCSALMRFWVGVRQPEAAVRFMCVLLCIFPFPL

SEQ ID NO: 9743 - protein, 526 aa, Zea mays
  Clone ID: TF_ZmC3083_1.pep
MVGGCASGDGAAEGTLARWRRAAAKRIGLSCASFFSYAASPSPPPSKTISHSALNAPDGEQQKMEEPTSTRVADKNLCAICLELLSTSISSDVDSGEAAAIYTAQCSHSFHFLCIASNIRHGNVSCPICRAQWSELPRDLKVPPLLHNQSDPILRILDDNIASSRVNRRSSIRAARYNDDDPVEPFTLAEHVDPCLRFVLIPAPVSAHHHVLGHYPCGRMLPLQQQCQYSGSSMLSPPQIASPSGQRRAYLSVSLAPQPAMDLVLVASPNGPHLRLLKQAMALVVFSMRAIDRLAIVTNATTATRAFPLRRMTSHAKRMALQVIEHLCCVGGTDPVGALHKGLKILEDRAHRNPSNCILHLSDHPVRNCVGGVDMNHSSIPVHQFHVGLGFGVRSGFIMHEFEELLARLLGGVIGDTQLRIGEHGGMVRLGELRGGEERRIPLDLAADCGFILVGYSYLEGGREEQLRTGEIAVGFEEKGDNGYCGMREMGLSIGGERRSCCAERRDYHDPFMARRWAKHFNVYRA

SEQ ID NO: 9744 - protein, 342 aa, Zea mays
  Clone ID: TF_ZmC24905_2.pep
MISSSHLSPSQEEGVDRKTTQDSGDTPTIAADGVQIVFFLPPTLAGWLSRSTFGSSAPLGKAMSHYTMHAAINYAALPPTSPLQLPLPYLPPPPPPPLPLPPLLSPPPPAAASSDAGFQSRISPSVLLIILILAVIFFVSGLLHLLVRFLLRPAPRDPGDAYGGDANATAFQGQLQQLFHLHDAGVDQSFIDALPVFLYGAVVGAGGKDPFDCAVCLCEFADDDRLRLLPKCSHAFHVDCIDTWLLSHSTCPLCRRSLLADFPTCGGACSPLVFVLESGSEGSVSDRHDAASSARLSFGMEQEQAGQDRKHVAAAEAAEKNDEVVVPVKLGKVRKPGHPKEP

SEQ ID NO: 9745 - protein, 145 aa, Zea mays
  Clone ID: TF_ZmC538896_1.pep
MEAYAPAGSYRPVCDTVVFVCLASASALIVFMVAVCFRNAFAANGYATAAVATNGAARATAANGRSRCGLAPSALSAIPMLAYQRGAGWAQCAICLALVRDGETVRLLPACGHLFHVECIDLWLRSHATCPLCRRGVVEAPVEKV

SEQ ID NO: 9746 - protein, 144 aa, Zea mays
  Clone ID: TF_LIB3689-243-Q1-N6-A10.pep
CNCRTGSRQGNPDEETSTRASISRIVMLAEALFEVLDEIHHQSAALSSSRSAFSSIGSVPAPREIVERLPAKVYRRPLKYHSEEAAQCYICLVEYEEGDCLRILPCHHEFHLTCVDKWLKEIHRVCPLCRGDVCRSDALIGKVS

SEQ ID NO: 9747 - protein, 321 aa, Zea mays
  Clone ID: TF_ZmC4557_1.pep
FRYNLQNYCTGCSCIVWRNLIESEDASFRSSYRRMGSHEPFEGSVRFSRTLSVGRLRDRVLRRPPFSDGLFTPSLLYDRAVWPSGNASARQDSAVMQRTNSDRSSEPRSDPSTSDMYNSSSERQASNGDLLERRSAFLERRRIRSQVRALQRLGSRFENLSGHERSCILSGQHRTGNCNCRTGSRQGNPDEETSTRASISRIVMLAEALFEVLDEIHHQSAALSSSRPSFSSIGSVPAPREIVERLPSKVYRKPLKYQSEEAAQCYICLVEYEEGDCLRILPCHHEFHLTCVDKWLKEIHRVCPLCRGDVCRSDAPIGKTS

SEQ ID NO: 9748 - protein, 169 aa, Zea mays
  Clone ID: TF_ZmC4557_3.pep
FPRGFENLSGHERSCILSGQHRTGTCNCRTGSRQGNPDEETSTRASISRIGMLAEALFEVLDEIHHQSAALSSSRPAFSSIGSGPAPREIGERLPAKVYRRPLKYHSEEAAQCYICLVEYEEGDCLRILPCHHEFHLTCVDKWLKEIHRVCPLCRGDVCRSDALIGKVS

SEQ ID NO: 9749 - protein, 225 aa, Zea mays
  unsure (1)..(225): unsure at all Xaa locations
  Clone ID: TF_ZmC28375_1.pep
AAPASGTSGSGCFDCNICLECATEPVVTLCGHLYCWPCIYEWLRHDVAEAGARSSARRQCPVCKAAVSPDALVPLYGRGGSSSAKKPLASIPRPRRPALXRARMTAAAVATTTTIGTQRPARQPGRCGTQPTPTPRSSTPSSXAPFGDRGMLHSTSTTGGMLGGMAVAVLPLVLRGQARVPGMYYPSPYHLMSPRQRRWHVEVERSLHQIWFFLCVFVVLCLLLF

SEQ ID NO: 9750 - protein, 357 aa, Zea mays
  Clone ID: TF_ZmC3609_1.pep
MEALHEEMPFDLDFHPSSPLVVTSIITGELCLFRYGPESQPERLLLLKAHKESCRAVRFVDSGKVILSGSADCSVLASDVESGKAIARLEDAHENAINRLVCLTESTIATGDDEGCIKVWDTRERSCCNSFEVHDDYISDMTYVAETNQILATSGDGTLSVNNLRRNKVRSRSEFSEDELLSLVLMKHGKKVVCGTPSGALLLYSWGYFNDCSDRFIGHTQSVDTMLKLDEDTLVSGSSDGVIRLVGILPNRIKQPLAEHSEYPIEALALSNDKKYLGSISHDKMLKLWDLEELLSGPQVANGDEPAEAGSDDSDDDSDDDVMDVDMAATSSKGSRSKKAGKGQSSSRPASDFFADL

SEQ ID NO: 9751 - protein, 160 aa, Zea mays
  unsure (1)..(160): unsure at all Xaa locations
  Clone ID: TF_ZmC36740_2.pep
RIWDNTTPVNNVDSANVVLQGGEAPRTTANTINKECIQQVHQSPGSPQVIRHEXNIDPDNMTYEELLDLGEAVGTQSRGLSQECISLLPITKYKCGFFSRKKTRRERCVICQMEYRRGNLQITLPCKHVYHASCVTRWLSINKVCPVCFAEVPGEDSQRQ

SEQ ID NO: 9752 - protein, 180 aa, Zea mays
  Clone ID: TF_ZmC348_2.pep
MDAAAAAAAQMERHSSAAAFVEGGVQDGCDDACSICLEAFSDSDPSAVTSCKHEFHLQCILEWCQRSSQCPMCWQAISMKDPTSQELLEAVEEERNDVQENHARTTTVFRHPLLGDFEVPVDADDAEIEERIMQHLAAAAAIRRSHRHARREGRRSSRVAAAHGHGHPQTQVLFFPSAGE

SEQ ID NO: 9753 - protein, 456 aa, Zea mays
  Clone ID: TF_700052368_FLI.pep
MACPRAPAVEGSGVSGVLYAVEPKDACSPLRAKAIQGSVSPFALIIRGGCQFDDKIRNAQNAGFKAAVVYNNEDNDILVSMAGSSLGVQIYAVFISKASGEELKKYSGQTDAELWIIPTYENSAWPIMAISFVSLLAMSAILVACFFARRHQIRRDRARLPRAQESHGMSSQLVKAIPSLIFTKVQEDNCTSATCAICLEDYSVGEKIRVLPCRHKFHAACVDLWLTSWRTFCPVCKRDASAGTSDPPVSESTPLLSSSATRLPESTVLASLRSTAAASPPRTISRHPLLRSISRNYSVSGSSILRTPDSRFDANSSICTSGSNLDLANVPSPWSGTWHRASAHSLCRGYLSPPIGIRNTSAHVSRSANGSPSRYVGSSRMSHGSSGQQHPHLRHCTLSGPSLFTMVPQSPQQNQLQHGGYSETNLSAAASAQSFRQLYLQHCPDSDTSSQSLPGC

SEQ ID NO: 9754 - protein, 184 aa, Zea mays
  Clone ID: TF_ZmC2018_1.pep
IRLEAVAALPTRAFAARPRGSAASDAESQCVICLEEYEERDVLRVLPHCGHDFHMACIHVWLEQNSTCPVCRISLLDNPNSEHNAPPPPPPPLPGVAVTMSSPGSPEPPGSDPCRCLFAGAGHSSRASSEAPPRHEPDQENQVASGPSVDGGANSNGMPLSEVNPTPPESNSQTVRKQQPGPCK

SEQ ID NO: 9755 - protein, 566 aa, Zea mays
  Clone ID: TF_ZmC3494_1.pep
MERYSDMRPKAEVSYLGRGSRFSSRNQSSEERTNHSSDKPGSSTRFNPTKARIGGNQGRPRYVCDSFKSPSSKVSPAGSSKFPLSKFEERRRQPFVPGFDIAESSRRKADAKQLQGSKKIAAENDSSDNLRGESEGFTTEQVVKPEGSHVVGHSGVSAYTVGSLVQTASLGSRTHRQKHKEVNLGTPGASSSTLTNRSTIPGNSTMGVRPAYGHVNGGQIHGLKNLGCSSVPDAQPSGCPSESVISRRRFEFMRKRAFDQESSSRSVNLSLGHSTPTDIRRIRMNEQSLCQQIPRSSSRSHQESAGSVRTRRPSPHATRMSVPDGRADGVLSLHESSTKDVQPAQEHLSLEEVSTESSIRPFFVEFDNNIFSSSHLRRSSTRAERGRPSSLFEESPRQMFHSLMGERDRHRHITMEGITEVLAALERIEQQAELTYDQLLMLEANLFFGAFASYDRHRDMRMDIDDMSYEELLALEERIGSVSTALSEEQFTKCLKRSIYSQVALEVNKSTVDDMKCSICQEEYAEGEEVGRLPCEHRYHVCCIGQWLGQKNWCPVCKASAVPSKG

SEQ ID NO: 9756 - protein, 186 aa, Zea mays
  Clone ID: TF_ZmC6690_21.pep
MARILLEAAAGSGPPTNSINSDMILILAGLLCALVCVLGLGLVARCACSWRWAAASRSQPAADATKAANRGVKKEVLRSLPTVTYVPDSGKAKAAAGADECAICLAEFEEGQAMRVLPQCGHAFHAACVDTWLRAHSSCPSCRRVLAAPADLPPGEPCRRCGARPGFRALWKAPAPCSAEGPTFLA

SEQ ID NO: 9757 - protein, 110 aa, Zea mays
  Clone ID: TF_ZmC1258_3.pep
LCSDGLHNSFEVLDEIHRQPASLSLSMVSVQAPESVVDSLPCKSYKKLEAPQRSDDMEQCHICLTEYEDGDQIRILPCKHEFHLQCVDKWLKEIHRVCPLCRGDVCEVAS

SEQ ID NO: 9758 - protein, 137 aa, Zea mays
  unsure (1)..(137): unsure at all Xaa locations
  Clone ID: TF_cC-zmpo14820018a08d1.pep
CAPSPPPSSRATYSAPRHACVVLVGAAVVSRPKEEAWSEXTCPVCLADFXAGEVVWVLPECMRYFHSDCIDTWMRGSSSCPMCRSETTPTPKPRTASVRPLLELSVSSRGDPRRDVSRATTGRVGGRVGGRDGRTRG

SEQ ID NO: 9759 - protein, 53 aa, Zea mays
  Clone ID: TF_ZmC10271_2.pep
CGICHDRQKEVVIAKCYHLFCNQCIQKSLGSRQKRCPSCGLSFGVNDVKPIYI

SEQ ID NO: 9760 - protein, 188 aa, Zea mays
  Clone ID: TF_ZmC669712_1.pep
MPRATASLRLQAAASSTSTATPREQQASSSSSSWPVPPPLPQQPAVSVNSDTVMILASFLCALVCVLGLALVSRCTCRPASSSTATGIPQQARPPKGLKKKAIDALPTAPFTAAASSDCAICLDEFSDGDALRVLPRCGHAFHVACVDAWLRTRATCPSCRAGIVIAHQPLMAASLSPGYLDPSVVSI

SEQ ID NO: 9761 - protein, 219 aa, Zea mays
  Clone ID: TF_ZmC20235_2.pep
MGAFCSCLQPDYSDHHGNQASSAFRNCMCLRCFTQQLINAYTVLFRAGAVHSVSPAIEATPVDSTESSFDTYRSPPRPLPYDDPRFSPPARDWLRSENPSHSPEESEPLRANEDDEEMETPSIIQKASKTNYNTKMKICSSTYGDKVPPREHGNYFSYFSPSAEDEDVCPTCLEDYDSENPRIVMQCSHHFHLGCIYEWMERSEACPVCGKKMEFDETT

SEQ ID NO: 9762 - protein, 216 aa, Zea mays
  Clone ID: TF_ZmC9757_1.pep
MLMLHPRLVSSSAVDDEDHCESCACYCAMVSCVSLLLFIVLAAAVSIPRACAIAGVMLLLLGLVGWLVPTGNGAGPAAQQQQQQGQAAADPGARRLVVHHRCACGLTDAAIAALPAAFTYYEAPAVKNGVGSEDDKQPRGSSLLCAVCLDDVRGGEMVRQLPACRHLFHVDCVDAWLRAHRTCPLCRCQLSPRNDVSTKRAAAVVGESSIDALPPV

SEQ ID NO: 9763 - protein, 189 aa, Zea mays
  Clone ID: TF_ZmC6690_23.pep
MARILVEAPAGSGSPEDSINSDMILILAGLLCALVCVLGLGLVARCACSWRWATESGRAQPGAAKAANRGVKKEVLRSLPTVTYVSDSGKAAAAAEGGADECAICLAEFEGGQAVRVLPQCGHAFHAACVDTWLRAHSSCPFCRRVLAVDLPPAERCRRCGARPGAGAGISALWKAPTRCSAEGPTFLA

SEQ ID NO: 9764 - protein, 248 aa, Zea mays
  unsure (1)..(248): unsure at all Xaa locations
  Clone ID: TF_ZmC20996_1.pep
MFHGGRPLSLRGSLKALEADIHHANTLAHAIHRAYGGACVQMRLSYSSMAPIFLNLIQWMDCSCSLSYTLPSYLGLLEVLVYKVYVDEDASISTIERRASLKEFYTIIYPFLQQLEDNLMDKDCKXQRVVCCCRRRRRXRKLVAEDDREDECGICLETCTKMVLPNCNHAMCINCYRDWYTRSQSCPFCRGSLKRVRSRDLWVLTGDDDVIDTVTLEKENVKHFLSFIDSLPLIVPDNMLLVYYDYLV

SEQ ID NO: 9765 - protein, 248 aa, Zea mays; identical to SEQ ID NO: 9764
  unsure (1)..(248): unsure at all Xaa locations
  Clone ID: TF_ZmC20996_3.pep

SEQ ID NO: 9766 - protein, 249 aa, Zea mays
  Clone ID: TF_ZmC20996_4.pep
MFHGGRPLSLRGSLKALEADIHHANTLAHAIHRAYGGACVQMRLSYSSMAPIFLNLIQWMDCSCSLSYTLPSYLGLLEVLVYKVYVDEDASISTIERRASLKEFYTIIYPFLQQLEDNLMDKDCKDKGWSAAAAAGGGGGRKLVAEDDREDECGICLETCTKMVLPNCNHAMCINCYRDWYTRSQSCPFCRGSLKRVRSRDLWVLTGDDDVIDTVTLEKENVKHFLSFIDSLPLIVPDNMLLVYYDYLV

SEQ ID NO: 9767 - protein, 410 aa, Zea mays
  Clone ID: TF_ZmC22066_1.pep
MAEAATSSSSSGSFAPRRLHDAGVVRESLPYSVLAAPPPPPLPPVQVQVAGSGGGGGGKISPAVLFIIVILALVFFISGLLHLLVRVLLKKQHRRGGRRGTASAAAPRTGVEAGGVDVALQRQLQQLFHLHDSGLDQAFIDALPVFAYRDIVVGGGGDGDKEPFDCAVCLCEFDAEDRLRLLPLCGHAFHLNCIDTWLLSNSTCPLCRGVLFVPGLMGDGNPMFDFEERLEEGRLSEDCDVGFGLPGLKASGLAQTPVVEKKVFPVRLGKFKNVGTQGAVEGGNANASVLSRDEGESSSSSLDGRRCFSMGTYQYVLGTSELRVALQPGRIRNGTGGAMMGRPPGLSSINADIMEGKKICTRNKGESFSVSKIWQWSHIKGKLPAGSDECSDAGSLPWMKRGGAADTSNL

SEQ ID NO: 9768 - protein, 208 aa, Zea mays
  Clone ID: TF_ZmC1120_3.pep
ILSRRAHPSHLSAAPLSQSVTRLLFLPSAGLILSLSLRGETGGERGKKRNRNQPVLFAWIAVLASCSETLGQFLIRNALEMIQRGENVRLESIFYGGLDIHDRHRDMRLDIDNMSYEELLALEERIGNVSTGLSEEAVIKLLKQRKFSSWRLKASLDPEPCCICQEEYVDGDDLGRLDCGHDFHAGCIKQWLVVKNVCPICKNTALKA

SEQ ID NO: 9769 - protein, 502 aa, Zea mays
  Clone ID: TF_ZmC3547_1.pep
MKSSRFLFLCAMFCLMARLGAANVVLMGNNLTLSFADIEASFSPGVKGSGVNGIVYASEPLNACSPLTIKAVKGPPSPFALIVRGGCTFDEKVKNAQDAGFKAAIVYDNENSGVLVSMAGSSSGIHIYAVFVSKASGEVLKKSSGHTDVEVWILPTFDNSAWSIMAISFISLLAMSAVLATCFFVRRHRIRRDHPRIPEAREFHGMSSQLVKAMPSLIFTKVQEDNCTSSMCAICLEDYSVGEKLRVLPCRHKFHAACVDLWLTSWRTFCPVCKRDATSGVSELPATEATPLLSSAVRLPSQPSSFRSSVAASPPRPISRHPSSHSVSRAYSVSSTPHSPNPFRSHTNLPGVIHASRSTTDLANMSSPHPRISHLSSSTHSLVGSHLSPPISIRYPLPHSRHESPSPHVSSPYISNSGYGSSSYYYLGGSSQHGSYLRRCGESGPSLSTMVPRSSQQQFQSEANVAAGASSAQSSRQSYLRRCGDSDASLSDMASAQSLPGC

SEQ ID NO: 9770 - protein, 317 aa, Zea mays
  unsure (1)..(317): unsure at all Xaa locations
  Clone ID: TF_ZmC3547_3.pep
MKSRFLVLCAIVCVMAQMGDANVVLLGNNLTLSFADIEASFSPGVKGSGVNGIVYASEPLNACSPLTIKAVKGPPSPFALIVRGGCTFDEKVXNAQDAGFKAAIVYDNENSGVLVSMAXSSSGIHIYAVFVSKASGEVXKKSSGHTDVEXTCFFVRRHRIRRDHPRIPEAREFHGMSSQLVKAMPSLIFTKVQEDNCTSSMCAICLEDYSVGEKLRVLPCRHKFHAACVDLWLTSWRTFCPVCKRDATSGVSELPATEATPLLSSAVRLPSQPSSFRSSVAASPPRPISRHPSLHSVSRAYSVSSTPHSPNPFRSHT

SEQ ID NO: 9771 - protein, 743 aa, Zea mays
  Clone ID: TF_ZmC1018_1.pep
MSISPHERTGGAYYPRPHNPSPSPQHGSDRRRHGRRSPPASVSPPGAAAEASDGGVGSSSNPVVPAIGESINAPEKVVGFIISGEENDTCTQEVGNVSECHSSEQGDSGLPVDNFGSVGSYPERPKMVGSLQADHLASGSTGLGNGTQIAARKNQTVNANHLLNFQYDPISRPQPRGPRTYLPRRQRKIKPYNKDLFIQANYKFVVLDTGNYQIDSMDPDKMLQWEDIICVRYYSPSEVQCPICLERPLCPQITSCGHIYCFPCILRYLMMGKDDYRGECWKKCPLCFMMISSKDLYTIQITQVQNVRAGDVVTFTLLSRSRNSLTPSIKSSSSESSTTDEEHYNVFSKFILTSDVELSVRDAKLDLSNWLHMADLGLVDDLEKLPFVSAALEQLEEKTKYWIDYRNYGGSPPSKDSFSPGSSFKSRNSFDVNTSQQMSEHKISLSDRDMVNGISELSMSPELSKTSGKGTISKVNEKCTTTIDSNEHDPYTFYQVSDGQHLILHPLNMRCLLNHFGGSDMLPPRITAKILELETVTQSEAIRKRYRFLSHFSLTTTFQFCEIDLSDVVSPNSLAPFLDEIKKREKQRKRAAKKEESERVKAEVAAAVQASAMRFEYTNSSQSHNDVMFSLDDFEALGNNAGPSTSPPASERKLFSDVTRLGFASAQDSPPLRLGTGDANGQSETSRDQGPLATPALSFASIISSSRAVTAADNSEMQKANGAGKKGKKATRVLLSTGGGRRY

SEQ ID NO: 9772 - protein, 253 aa, Zea mays
  Clone ID: TF_ZmC17335_1.pep
MAQRGELGRQLPLRGPLKALEADIHHANAMADAIQRNYGGACVQMRLSFSSLAPLFLYFIQWLDCGCCYALPSYLGLFHILICKVYADGDSSVSTYERRASLREFYAIIYPILQQLESSLIERDLKGKGRCKDIVSRRRMEDWKKVSGRDVEREDECGICMEACTKMVLPNCSHAMCIKCYRDWYKRSESCPFCRGSLKRIRSTDLWVLTNSNDVIDPAHLEKENVRHFYSYIDSLPLILPDSIFFFYYEYLL

SEQ ID NO: 9773 - protein, 76 aa, Zea mays
  Clone ID: TF_ZmC140839_1.pep
DALSECLKRNLYVPTTSSSNEDGDIKCIICLEEYSSGVEVAKMACEHYYHTTCIQQWLQQKNWCPICKCDASAISS

SEQ ID NO: 9774 - protein, 160 aa, Zea mays
  Clone ID: TF_ZmC11815_2.pep
MMGIPLVCYCLAVPKPVIAFCRLLSAVRDAALLMLAVVGLCRFPPDGAVDAGHQPGEVKARLPAVEYGQLLAEHDEQQQSGDHDCDGDAASSDCIVCLETLEAADEVRRLGNCAHAFHRACIDRWIDLGRATCPLCRSDLLPRAPGWASRLGLGRLTRVR

SEQ ID NO: 9775 - protein, 160 aa, Zea mays
  Clone ID: TF_ZmC11815_6.pep
MMGIPLVCYCLAVPKPVIAFCRLLSAVRDAALLMLAVVGLCRFPPDSAVDAGHQPGEVKARLPAVEYGQLLAEHDEQQQSGDHDCDGDAASSDCIVCLETLEAADEVRRLGNCAHAFHRACIDRWIDLGRATCPLCRSDLLPRAPGWASRLGLGRLTRVR

SEQ ID NO: 9776 - protein, 213 aa, Zea mays
  Clone ID: TF_ZmC27970_1.pep
GTARHGTTELQSAPAPIRTSALIRQMASPARRLLQTNSVQYPTLPAADPPSPLAVDSDVVVILAALLCALICVVGLASVARCARSRAAPAAARRGLRKKALRALPSLAYEDAVAARAADGAAEVLAECAICLSEFAPREEVRVLPQCGHAFHVACIDTWLAAHSSCPSCRRVLVVGDASSKRPPQPKRCRKCEAAMDEPSSSSGSAGDTPAGS

SEQ ID NO: 9777 - protein, 179 aa, Zea mays
  Clone ID: TF_LIB3608-056-Q6-K6-C10.pep
RLDAQKCKTSVSRSKLINSGSSSSCCLCRTGGVENFFHCDKCGCCYSNVLKDSHHCVERAMHHNCPVCFEYLFDSTKDISVLQCGHTIHLECMNEMRAHHHFSCPVCSRSACDMSATWRKLDEEVAATPMPDIYQKHMVWILCNDCSATSSVRFHVLGHKCPACSSYQHPETRAACPQI

SEQ ID NO: 9778 - protein, 211 aa, Zea mays
  Clone ID: TF_ZmC2210_2.pep
DGFGGGAARVSCSLCSKEQDVQQNCSSCGACMGKYFCKVCKFFDDDVSKGQYHCDGCGICRTGGVENFFHCDKCGCCYSNVLKDSHHCVERAMHHNCPVCFEYLFDSTKDISVLQCGHTIHLECMNEMRAHHHFSCPVCSRSACDMSATWRKLDEEVAATPMPDIYQKHMVWILCNDCSATSSVRFHVLGHKCPACSSYNTRETRAACPRI

SEQ ID NO: 9779 - protein, 210 aa, Zea mays
  Clone ID: TF_LIB5045-072-A1-K1-G9.pep
MTQGSDEGAGAAHPSWPSGADADTPVAPTAGAAAAMTLGSILTVSGILLLFVIFAFALASLQYCFESRRDRDRDARTGRPAGSSRGGMMRASRGGGVDPELLRSLPVTVYRAPPQGSDKGRQQGVVLECAVCLAELQDGEEARFLPRCGHGFHAECVDMCLASHTTCPLCRTTVTKPDASPPTPSLALPPVPPEPANYYATASLPATSVL

SEQ ID NO: 9780 - protein, 119 aa, Zea mays
  Clone ID: TF_ZmC39016_1.pep
FRLLAWNAVVYSLPFLLFLLLCCFVPAVGYALGYNMNTASVGRGASDEQLAALPRWRFKEPDVARDRERDDQECCICLAQYGEKEEVRQLPCTHVFHLKCVDRWLRIISSCPLCKQELK

SEQ ID NO: 9781 - protein, 270 aa, Zea mays
  Clone ID: TF_ZmC235641_1.pep
VLNPTTRRERGEGKERKTSITSSRRHQPPPTFTPLPTRPRFHPGHPAEAPPPCARSANAIPPLPTAMPLLSSLSNLGLGYSIAIALGFIILFASFLLAFYFCFGRGGDYWAGEAVTTASSSGHLSITVPRVLFVAEGSESPEDDAYPSSAAAAACSPVGLDAAAIASYPKVAFSSRAAEADAMCSICLSEYRDGETLRVMPECRHGFHVACLDAWLSRSASCPVCRSSPVPTPNSTPLATPLSELVPLSQYAADRRRRSFSGRLAQNHLT

SEQ ID NO: 9782 - protein, 584 aa, Zea mays
  unsure (1)..(584): unsure at all Xaa locations
  Clone ID: TF_ZmC4657_9.pep
MTVTAAAWPVCTICYEDLRPLSDQHLHCLPACGHVFHALCLEQWLEYCPGGKKKRTCPVCKQPCGAAHPPTRLYFSSTGTCPTQACSSPGSASGSADPEALAAEVARLEQKAASLGKVVEEQRQSINDLKSEAAWLREQAEAGDFMLQAAKKDKESVQILLNAKTEELSRKTSECGRLQEKSLALAKELAALKLSADMNLQEEEIMKFASLGNQGNLQNAVDVLKRSLAIRNKSYKELMVQCNVLGRSESRMQQKLEKAKEILKKLKARVQELEKELEDKENGLLRDLKSSKKFKADHIKSGNATANSAFTSSSPGYENQTNKLDEVMQDPCNDKTHFDRSKSEAGSVLNAQDNLDNKDVDVIDLEANDSVFGYEQKAQFSAKPFGTEDSTPNSENKSSLCQNDDRQSVASECTTAHATNGGPFLKHREATVKSTFMANIRAKLHIPRESPSVRTNATSSTLESETLTIDGISKQATRLASGTGPQQIHNFNSFSDDFQAPGIPGTDGARRSIGKWXGPADPSSASGSRGNLIAVGPDGRGGKVKILRDLGRPQDSKSQALWPKAQKVGGRGGQSQIHQFFGKR

SEQ ID NO: 9783 - protein, 332 aa, Zea mays
  Clone ID: TF_ZmC9505_1.pep
MIPRTSSVSSSAAAAPTAGAPPAWPSGSDAAAFQASGSSGHQQVVISNGVLLAAVIFLFMVVVFVFLLYLYAKRYLGAGNPLAAPPSSRFLFVAASPLPQRGLPASALRSLPVAVYGGGGGGPGTKSSKEALECAVCLSEVADGEKVRTLPKCGHAFHVECIDMWFHSHDTCPLCRAPVGGDLDALPREEPFGASLEFPTNVLFWGTHDEVANAGLATPPPPPPPVASAVSASSSASGRRKENLVIDIPTRPVALTTTPPFNSPLPTSRVAGSADETRSPVSARLRSLRRLLSRGKQAVVGTSYSPRGAGDVEQGLAGAEAARPPKTPPASD

SEQ ID NO: 9784 - protein, 331 aa, Zea mays
  Clone ID: TF_ZmC9623_1.pep
MADGGNCGPGGGNASAPVCSFVRKPPKNIRKRPAAPAGSDDDDDGGGGALAAARSKKGPPSSTAGKLVFSTAGASSEAPRFQYESSRTIQSTDTRATATLETETEFDRDARSIRERQLKQAEESLKKNPSAVAASASASTAGEVYKGIHGYTDYKAGFRREHTVSSEKAGGSHGPLRASAHIRLSQRFDYQPDICKDYKETGYCGYGDSCKFMHDRGDYKSGWQLEKEYEEAEKARKRRIAMGGGGESDDEAADDEDEEEALPFACFICREPFVDPVVTKCKHYFCEHCALKHHSKNKKCYVCNKPTLGIFNAAQEIRKKMAQDKKQQQQE

SEQ ID NO: 9785 - protein, 164 aa, Zea mays
  Clone ID: TF_ZmC38394_1.pep
MVVGGEDTDSDDADLNLVDALARRVGEATRRLPASRAVVDGLPEVALSDQEASHGCAVCKDGVVAGQSVLRLPCKHYFHGECIRPWLAIRNTCPVCRFQLPTGDAAEYDSPRSTTGGGVVSVAQQHSAPAQSGGAGAASGATEGAGDDAAECPGEDRAGRGTSW

SEQ ID NO: 9786 - protein, 53 aa, Zea mays
  Clone ID: TF_uC-zmroteosinte020e08a1.pep
CETKCSICQEEYLLGEDVGKMACKHYYHLSCIEHWLRQKNWCPICKSVALKIK

SEQ ID NO: 9787 - protein, 288 aa, Zea mays
  Clone ID: TF_ZmC28409_1.pep
MDGSSKRIGGGGDDMPSPDHDQNASPNVPPSAAGDGGASATAAAAPAAGRRPFTSLSQEEADLALARVLQEQERAYMMLTGGEYAISDAESYDYDEEEDGDGSDYEEEGEALDEDEQVGDAEAEGAEGDLDLDPSQYEDDGEGDVSDRLMALVGIGDWRAMEQDDAGDEEDDEDAEVHTQGAWEDVDPDEYSYEELIALGEVVGTESKGLAADTIASLPWVTYQAQDKQDGNMEQCVICRVEFDEGESLVALPCKHPYHSECINQWLQLNKVCPMCSAEVPTSVNKQA

SEQ ID NO: 9788 - protein, 357 aa, Zea mays
  Clone ID: TF_ZmC1149_45.pep
MIRLPMYAAFSLLATASAAYYAFSSREQFYPAMVYLSTSKICFVLLLNTGLVAMCVAWQLARRLFLGSLREAEVERLNEQSWREVIEILFAVTIFRQDFSVSFLAMVAALLLVKALHWLAQKRVEYIETTPSVPLLSHIRIVSFMVFLLTVDCLFLSNSLRSLIQKREASVAIFFSFEYTILATSTLSTFVKYIFYVSDMLMEGQWERKAVYTFYLELISDLVHLSLYMLFFIAIFLNYGVPLHLIRELYETFRSFRIRIADYIRYRKITSNMNERFPEATSEELDASDATCIICREEMTTAKKLLCGHLFHVHCLRSWLERQHTCPTCRAPIVPADNGRAASSRQHGAQAGVQPGT

SEQ ID NO: 9789 - protein, 359 aa, Zea mays
  Clone ID: TF_ZmC1149_78.pep
MIRLPTYAAFSLLATASAAYYAFSSREQFYPAMVYLSTSKICFVLLLNTGLVAMCVAWQLARRLFLGSLREAEVERLNEQSWREVIEILFAVTIFRQDFSVSFLAMVAALLLVKALHWLAQKRVEYIETTPSVPLLSHIRIVSFMAFLLTVDCLFLSNSLRSLIQKQEASVAIFFSFEYMILATSTVPTFVKYIFYVSDMLMEGQWEKKAVYTFYLELISDLVHLSLYMLFFIAIFLNYGVPLHLIRELYETFRNFRIRIADYVRYRKITSNMNERFPDATSEELDVSDATCIICREEMTTAKKLLCGHLFHVHCLRSWLERQHTCPTCRAPIIPADNGHAVSARQHGAPAGVQPGTAT

SEQ ID NO: 9790 - protein, 279 aa, Zea mays
  unsure (1)..(279): unsure at all Xaa locations
  Clone ID: TF_ZmC9227_1.pep
MSLYMLFFIAIFLNYGVPLHLIRELYETFRXRIRIADYVRYRKXTSNMNERFPDATSEELDVSDATCIICREEMTTAKKLLCGHLFHVHCLRSWLERQHTCPTCRAPIIPADNGHAVSARQHGAQAGVQPAAGTATPSSEGAPGENMSRHQAKLEAAAAAASLYGRSFVYPPANTLKRSVPPQPASSTPQSEASSSNHQSQKDQEMQSRNSSDGLVPLPLNADGAVGSGTSTRDLENSLQKAQENFIKSQIEMLQIQLQMVQRGAAGLSSSENTEHTED

SEQ ID NO: 9791 - protein, 159 aa, Zea mays
  Clone ID: TF_LIB4826-094-A1-N1-H5.pep
MMGIPLVCYCLAVPKPVIAFCRLLSAVRDAALLMLAVVGLCRFPPDSAVDAGHQPGEVKARLPAVEYGQLLAEHDEQQQSGDHNCDGDAASSDCIVCLETLEAADQVRRLGNCAHAFHRARIDRWIDLGRATCPLCRSDLLPRAPGWASRLGLGRLTRV

SEQ ID NO: 9792 - protein, 246 aa, Zea mays
  unsure (1)..(246): unsure at all Xaa locations
  Clone ID: TF_ZmC3771_2.pep
MDPVPAPSSSRRAAAAPGPCCRFDALRRACAGNAAAAARAAGWAIGALLTCIFAVVGSLVGIFIGAFMGMSTESGMFRGAGVGAVSGAVFSIEAVESCIEIWRSSHSGKYSILFVLDIILSLFSGRIVWEKVSPALQRAVQSQMSLMSTPFIDNSDXFETGSTGGMSRDLIDRIPKTRFSAASNCDQETDSSCCPVCLQDFGARQFVRALPQCQHIFHVRCIDSWLLRHASCPLCRAGVHIDHIHM

SEQ ID NO: 9793 - protein, 97 aa, Zea mays
  unsure (1)..(97): unsure at all Xaa locations
  Clone ID: TF_700345248_FLI.pep
ASISRIVMLTEALFEVLDEIHRQPASLSLSMVSVQAPESVVDSLPXCHICLTEYEDGDQIRTLPCKHEFHLQCVDKWLKEIHRVCPLCRGDVCEVAS

SEQ ID NO: 9794 - protein, 157 aa, Zea mays
  Clone ID: TF_UC-ZMFLB73175A10_FLI.pep
REHRRAVFDSGNEQNTAACPLGIHQIGRCTCNSFFIAEESSARASISRIVMLTEALFEVLDEIHRQPASLSLSMVSVQAPESVVDSLPCKSYKKLETPQCSDDMEQCHICLTEYEDGDQIRTLPCKHEFHLQCVDKWLKEIHRVCPLCRGDVCEVAS

SEQ ID NO: 9795 - protein, 259 aa, Zea mays
  unsure (1)..(259): unsure at all Xaa locations
  Clone ID: TF_ZmC3219_1.pep
ALRGQGRRRKRGRDKGHKREGRRGGGRVTGGIGDDVWCAPGKPXRRRVYCVNCEVARYQMVWRCGRGAEGDRSHRERPCLSRRVTVQEQISSSFMDSPPPPHLDAPLFGADLIPSGRLRRMRGWRHSPGGLEEEIRMFQTRVLLGGMNMYDRYQDWRLDVDNMTYEELLELGDKIGYVNTGLRDDEITRNLRKVKHPSFSSLRFATEMERKCSICQEEFETNEEMGRLDCGHSYHVYCIKQWLSQKNICPVCKTAVSKN

SEQ ID NO: 9796 - protein, 232 aa, Zea mays
  unsure (1)..(232): unsure at all Xaa locations
  Clone ID: TF_ZmC3219_2.pep
VTGGIGADVWCAPGIPFAAEASSVNCVVARHQMLXXXXXXXXXXXXHRERPCLSRRVTVQEQISSSFMDXXXXXXXDVALFGADLXXXXXCQGTRGSRXSAGGLEEEIRMFQTRVLLGGMNMYDRYQDWRLDVDNMTYEELLELGDKIGYVNTGLRDDEITRNLRKVKHPSFSSLRFATEMERKCSICQEEFETNEEMGRLDCGHSYHVYCIKQWLSQKNICPVCKTAVSKN

SEQ ID NO: 9797 - protein, 585 aa, Zea mays
  Clone ID: TF_ZmC4668_1.pep
MDESACRSTAPVGFLRRGSGISLRNQSNEDRSNQYNKQPGKSSNPNPVKLRFTENKEKPRYFQGTFHSSGSRASSVSSSKAPARKYCDERQKQPFLAETDIAESSNRRTEVRRLQSGKKASVFGDGHPYTQKSISEASSSSTITGGLPEEHDLGALYVSGSSGSSAHPVNPRNAALNASAHMQKDKEEMSSGRPQGAPTFVRRHTLPQSFSTGVKSPTAPGTGAQRRGLKNLGCTSISDVLPSGCSSSDSARDRRIEVTKKRTSGAGSSSRSRISEQSNFSQPRASYPGSTGPRARAAEQSASQQTARTNSRNIPDHTDSIRTRRPFTLRARERMMPGEREDSVFALHETVASIHPECGHFHMDGTPPERLGRPFYAELPHAIYSSNRQGSSSQTARRRSTSRTEESPQRMFHGMFWERDGYRGINMEGIAQALLALDRIEHDVELTYEQLLLLETNLLLSGLDLHDQHEDMRLDIDNMSYEELLALEEHIGSVTTALTEEQFTKCVNQSVYEARNSYRDVSKIAADDVKCSVCQEEYVDGEEIGTMQCEHQYHVRCIHEWLKQKNWCPICKASAIPSEMTKGDA

SEQ ID NO: 9798 - protein, 111 aa, Zea mays
  unsure (1)..(111): unsure at all Xaa locations
  Clone ID: TF_LIB4829-029-R1-N1-G3.pep
RAGAGSSVAADAXGXGXGAAECAVCLGVLGEGQMVRQLSGCKHVFHQECIDVWLATRASCPVCRGKAEPPARAEDRATAASAPPRVAAVEMLGDELELASSSTPVAAXPGR

SEQ ID NO: 9799 - protein, 311 aa, Zea mays
  Clone ID: TF_ZmC3804_1.pep
MTEAAVITRYWCHGCEKVIEEAMGEEIKCPFCGGGFIEEMAGEDSEGLQLEREWGTPPGDSEDDDDDDIAHEFEGFIRRHGRASALRRVLDSIQDDLRADRERDNSVLINAFNQALASQGSALLDADEARDGRGGSSNSNDDGLLEEYDVLGAGLSLLLQHLAENDPNRYGTPPAKREAVEALPTVQIAEAVSCSVCLDDLELGSPAKQMPCGHRFHSSCILPWLELHSSCPVCRFELPSEETKDLNEPSDVHRRTESTRENDSESGNSAWPLVPWFFSGLFSVPEPSHTDRGTLTTDQQSPSTNPNAGGN

SEQ ID NO: 9800 - protein, 242 aa, Zea mays
  Clone ID: TF_ZmC60532_1.pep
MGRSFRDSLKVLEADIQHANSIASEFRREYDGASLQMRMAYCPAAHFFLFLVQWTDCNLAGALGLLRILIYKVYADGTTTMCTHERKASIREFYAVIFPSLMQLHERINEVEDRKQKAICLERYRRRDEDPKTVVSEIDDNIEEECGICMEINVKVVLPTCSHAMCIKCYREWRSRSQSCPFCRDSLKRVNSADLWIYTDSNDIVDMATVRRENLRRLFMYIDKLPTVIPESVFDVYDSHVK

SEQ ID NO: 9801 - protein, 192 aa, Zea mays
  unsure (1)..(192): unsure at all Xaa locations
  Clone ID: TF_ZmC12601_2.pep
MASANNDDREAAGILRLLMGMAAAAAPASALPRGGGLMMVQHVILDVNGELFSGGVGGGGVPPASKAAIAALKEVKAGEGEDALGECAICLDAVEGTGKEMPCGHCFHGRCLERWLGVHGNCPVCRRELPAPAKEEEEEDSAASAEGGEEERRRPRAAVVVSYLVFXGGRAGGAAGAXEXEEPWNIRIEDVD

SEQ ID NO: 9802 - protein, 348 aa, Zea mays
  Clone ID: TF_ZmC8390_1.pep
MAMPSSPSPTRLPTASSSYWCYQCDRFVRAASPLSSPACPSCGGGFLEEMSAPPPRPAYLRRPRAHHAADSRAASPFNPVIVLRRSPPAAASFELLYDDGAGSGLRPLPETMSDFLMGSGFQRLLDQLAQIEAAGGLAAGARDAPPPASKAAVQAMPVVSVAAADAHCAVCKEAFHLGAEAREMPCAHIYHADCILPWLALRNSCPVCRHQMPTDAIPLEQEEEATVGLTIWRLPGGGFAVGRFAGGRTPEERELPVVYTEMDGAGFNSGRRPRRVSWGSRQAASTNRGTVRRFLRNVFACFGRGHASSSSRSHAVPELNDDAFSHGSRSRSTSWRLEDGHADATVQS

SEQ ID NO: 9803 - protein, 163 aa, Zea mays
  unsure (1)..(163): unsure at all Xaa locations
  Clone ID: TF_LIB3354-124-Q1-N6-A1.pep
FLKVVCCLYIDLXAKQYREEAPRAVDGAVGGSRVWLLRTVFGGGGADGDVGATEWCQEGGLDDKAMARLPRRKVGAGEALDCAVCIAEVAAGEAARVLPRCGHAFHVGCVDAWLRSHSTCPLCRCPAVDDPPAVATPVADRESPNFPTNVLFFGSQDDVSTGR

SEQ ID NO: 9804 - protein, 147 aa, Zea mays
  unsure (1)..(147): unsure at all Xaa locations
  Clone ID: TF_LIB4721-008-R1-K1-E4.pep
GHRRAVFDSGNEQGTAACPLGIHQTGRCTCDSFLVAEESSARASISRIVMLTEAXFEVLDEIHRQPASLSLSMVSVQAPESVVXSLSCKSYKKLEAPQRSDDMEQCHICLTEYEDGDQIRILSCKHEFHLQCVDKWLKEXHRVCPLC

SEQ ID NO: 9805 - protein, 272 aa, Zea mays
  Clone ID: TF_ZmC97939_1.pep
FGTRRETQLSSVSAALDHQTWASATATATAPKASEEAVSCEGSPEYRLPFSKPHVPSPPQVSDPTNYAMTGKILLAAAGAFAGVLLALVALHLYNSTRRRRLGGNQRRLFRSLAIAGGDEDRRDGDGEGAPPPHRGLDSAVLAAIPVVLIEAGADAGGGDCAVCLAELEPGEKARALPRCGHRFHIECIGAWFRGNATCPLCRADVVVVAPGAIVPAEGGALSEEVRIDVAGDAVAATPNGSTVVPVMGRLHSGRDLEKARRVFASTRFSSF

SEQ ID NO: 9806 - protein, 175 aa, Zea mays
  Clone ID: TF_ZmC3485_1.pep
MATPTTYSVRISSETHKIEAWVVSDEALARQLQEEENTRDAAADTREVAGNVPLESSSPAVEYRPAQNAAQVAREDNVDPDNMSYEQLQALGEAVGIQSRGLSDELISYLEPFRNKCTFFSRKKNSEECVICKTTYRSRQKLIRLPCSHCYHADCITRWLKINKACPVCNEEVFG

SEQ ID NO: 9807 - protein, 305 aa, Zea mays
  unsure (1)..(305): unsure at all Xaa locations
  Clone ID: TF_ZmC26130_1.pep
MSSPAPSPPAGAPSEPLLLPLPPPEFYCYQCEATVSLPEPAAPSSARLLCPLCHSDFIEENPSTPSPPPPPPPPPPPLFLSDSSSSSLSDDPDDDFDLVMDPDVVRAYLSRFAHRHHLQQIGHGPGPHGRGEPPATAASIAALPTVEVAEPTAVCAICKDDLPLASEARKLPCAHLYHSFCIVTWLGMHNSCPVCRFRIPPADDPDQAXHRRSRTRRPRGSPSASAPPHAAASASAAMRHWRLISRRRPRSSHRLLPGMELVDLPIAARLCHLSGLRTPNRIQSCRRHARGVAFLIEPEVPIIRR

SEQ ID NO: 9808 - protein, 185 aa, Zea mays
  Clone ID: TF_ZmC828795_1.pep
MAELALLSPPQRPYNNTHSVISSGSKENLPGDVITPCSRCSRKLLLAGAASFAFCLLSVAACLLLRFLLRRWCRRRRGPGLVQQEEEEAQLKLGGGGGLDAEAIALLPSSFPYHRRGNDNPEVECAVCLGVLDEGQTARQLPGCAHVFHQQCVDAWLASNASCPVCRRRTGPQAEEEAAAAPVDV

SEQ ID NO: 9809 - protein, 92 aa, Zea mays
  unsure (1)..(92): unsure at all Xaa locations
  Clone ID: TF_LIB3354-042-P1-K1-E1.pep
APVFIIIIFCYLLKPSKYIVLHTFELLGLIIPFLIQECCICLCPYEDGXELRELPCNHHFHCSCIDKWLHINATCPLCKFDIIKSNRDIEEV

SEQ ID NO: 9810 - protein, 278 aa, Zea mays
  Clone ID: TF_ZmC42210_2.pep
MDSSPVSYWCYSCSRFVRVSPSTVVCPECDGGFLEQFTQPPPRGGGGSGRRGTMNPVIVLRGGSLSGFELYYDDGAGEGLRPLPGDVQHLLMGSGFHRLLDQFSRLEAAAPRPPASKAAVESMPSVTVAGGGAHCAVCQEACRPGRAGREMPCKHVYHQDCILPWLSLRNSCPVCRQELPAAATPDAEADAGLTIWRLPRGGFAVGRFAGGPREQLPVVYTELDGGFSNGVGPRRVTWPEGDGQVDGGEGRIRRLLRNLFGCFGHGSRPASSSQSRSG

SEQ ID NO: 9811 - protein, 264 aa, Zea mays
  unsure (1)..(264): unsure at all Xaa locations
  Clone ID: TF_ZmC13117_1.pep
CGQQPDPAPRKPKLPQTNTLFPFCPSPAQHAIPPHDHSPAAAAAAAHDHHVGSERGMSFLDPLASLGLGYAIAIAFGFLVLLASVLLASYFCLRRGAASQGFGAGAGVGVGSAPPGTPPPPXSSSGHISITVPRVVFVAEDYDSPGSSSRGPAAAASPVGLDASVIASYPMVPFSKAGAGADTEVACSICLCEYKEGEMLRVMPECRHRFHLTCLDAWLRRSASCPVCRSSPIPTPVATPLSTPLSELVPLSQYAADRRRSRFG

SEQ ID NO: 9812 - protein, 154 aa, Zea mays
  Clone ID: TF_LIB4073-011-Q6-K1-C3.pep
MNSNSRGQNRRIDLVFRPRARTVQPSFFDDPDYDPLWDDDLAAAAAVFGDDDDDYLVAAPAHGSSSKRPHVAAASEEAILRLQEVTGRSRLGSAGEEQCAVCRQDFRADETLRAMPCSHAFHQHCISEWLRRNADCPLCRCRLPDEEEEDKQRR

SEQ ID NO: 9813 - protein, 236 aa, Zea mays
  unsure (1)..(236): unsure at all Xaa locations
  Clone ID: TF_ZmC13088_2.pep
CKIRAPCCGEVFGCRHCHNEAKDSLEVSVHDRHVLPRHDIKLVICSLCNKEQDVQQDCANCGACLGKYFCAKCNLFDDDXGGAENFYHCGRCGCCYATPLKDSHRCVDGAMHHNCITTXPVCMEYLFDSMKAISVLHCGHTIHLECLYEMRAHQQFSCPVCLRSACNMSDIWQKLDQQVAASPMPAIYQKKMVWILCNDCGVTSNVQFHILAHKCPGCSSYNTRQTRGDPAACSRV

SEQ ID NO: 9814 - protein, 256 aa, Zea mays
  Clone ID: TF_ZmC10261_1.pep
MLRPAVNVGTQVPEFNVSQPSTTLRGSSDVFRRSLISAGISHSRSSSIPLQHRGNSSTSHEIRNHQPGSSSRAHQQHPLRPGHSSVDRQSSGYLDLQSFMQTIASREGGRPMSEIRNVFDQIRQGRNARLEDLLLIDRSLIMRRANLIDRHRDMRLDVDNMSYEELLALGERIGYVNTGLTEEKILSNLKQWKCVLKSLDDPPTSVEPCCICQEDYVEGEDLGRLDCGHDFHTACIKQWLVIKNLCPICKKTALDT

SEQ ID NO: 9815 - protein, 299 aa, Zea mays
  Clone ID: TF_ZmC26137_1.pep
IHLIRQVPNPHPPRPNCNLPRVLQVPWPAPRSSPIPIQVSNGSHRWRSSERVRPEPSEDGHLEHAGARGQPAGVRAVQHGGVGGDPGGAGARRAAVPGPGGGGGRGAAAAGGGRDGHGRGAQPRGPVPEQVPAVALRAAPGRGLPRVPGAVRDGVGGAAAPLRPPLPPRLPRDLDRLRPRHLPAVPPPPPAPRRCRRRGAPDCLISALGIESRRSTLHLAAAVSLYRFFFLFLFVRGRERTERRLKEENGGNKAVPPFVSPKLSVVFIHSKSIIYSYEPSTQNCLWACAGVDAKTTILL

SEQ ID NO: 9816 - protein, 133 aa, Zea mays
  Clone ID: TF_LIB3245-012-P2-N1-A7.pep
QANRWPDAAAGGISLSIRILVGASFSGAYLISIYRCLGFTAKFAAAWGFGDWSQFYHCSCVEKKQDGLKADGTGKTPQNELTCSVCLEQVMVGDLLRSLPCLHQFHVNCIDPWLRQQGTCPICKHQVSDGWHA

SEQ ID NO: 9817 - protein, 121 aa, Zea mays
  Clone ID: TF_ZmC3298_15.pep
VPLSLPRPAGSRRCCSRPPLASESLARRRGGRYLAFDQKKQDGLKADGTGKTPQNELTCSVCLEQVMVGDLLRSLPCLHQFHVNCIDPWLRQQGTCPICKHQVSDGWHATGNGEEDASYMV

SEQ ID NO: 9818 - protein, 145 aa, Zea mays
  Clone ID: TF_ZmC3298_6.pep
RANRWPDAAAGGISLSIRILVGASFSGAYLISIYRCLGFTAKFAAAWGFGDWSQFYHCSCVEKKQDGLKADGTGKTPQNELTCSVCLEQVMVGDLLRSLPCLHQFHVNCIDPWLRQQGTCPICKHQVSDGWHATGNGEEDASYMV

SEQ ID NO: 9819 - protein, 120 aa, Zea mays
  Clone ID: TF_ZmC3855_1.pep
MVFVPLVIVVFERSQADVVAYALCLANIIVMVVWLSPDTGSTVSAAKSLLRLSDDEDEGSGGSSGAEDKCCVCLAGMREDQALRALPRCGHSFHDKCIGKWLKAHPTCPVCRATAVPNSS

SEQ ID NO: 9820 - protein, 196 aa, Zea mays
  unsure (1)..(196): unsure at all Xaa locations
  Clone ID: TF_LIB4764-025-R1-K1-F2.pep
MSTASGTRRAPRRQSQDGSADKVVVIIEATSPVVGSRRGPPTPVPGAQNSPIDVEAIEDEVQAVSPSRVPPPRRDRRTRREPITVVDLEVDASQEGNKRQRVVAVDHLSPDWGAGSSLQPNGVQTGKEPAKEVPKEPSFTCPICWNKMEEPSTTTCXHIFCDTCIKQAIKVQKKCPTCRKGLKMNRVHRIFLPNAS

SEQ ID NO: 9821 - protein, 198 aa, Zea mays
  Clone ID: TF_ZmC2205_4.pep
MNTVSGTKRAPRRQSQDGSGDKLVVIVEASSRGVGSRRGPHTPIPGALNSPIDVEAIEDEVQAVSPSRVPLPRRNRRTRREPITVVDLEVEASREGSKRQRVEPVGRHLYPDWGARSSLQSNGVQTGKEPAKEVPKEPSFTCPICWNKMEEPSTTTCGHIFCDTCIKQAIKVQKKCPTCRKGLKMNSVHRIFLPNASS

SEQ ID NO: 9822 - protein, 197 aa, Zea mays
  Clone ID: TF_ZmC2205_9.pep
MSTASGTRRAPRRQSQDGSADKVVVIIEATSPVVGSRRGPPTPVPGAQNSPIDVEAIEDEVQAVSPSRVPPPRRDRRTRREPITVVDLEVDASQEGNKRQRVVAVDHLSPDWGAGSSLQPNGVQTGKEPAKEVPKEPSFTCPICWNKMEEPSTTTCGHIFCDTCIKQAIKVQKKCPTCRKGLKMNSVHRIFLPNASS

SEQ ID NO: 9823 - protein, 76 aa, Zea mays
  Clone ID: TF_uC-zmroB73070d02b1.pep
AVEQSNPCAICLGAMGADGGQAMATFTAECSHTFHFHCISASVAHGHLVCPLCNAQWRELPSVRPSHPLSMPPILP

SEQ ID NO: 9824 - protein, 115 aa, Zea mays
  Clone ID: TF_ZmC36740_1.pep
VVWQDNIEPDNMTYEELLDLGEAVGTQSRGLSQERISSLPVTKYKCGFFSRKKTRRERCVICQMEYRRGNLQMTLPCKHVYHASCVTRWLGINKVCPVCFAEVPGEDPEAMSQQL

SEQ ID NO: 9825 - protein, 475 aa, Zea mays
  unsure (1)..(475): unsure at all Xaa locations
  Clone ID: TF_ZmC38633_1.pep
MDAGECSTSKPPQPSAASPSSPTVWARLVPADSACPTVEVAEDDSVVCSLVAPPCGGEEVAWCEIRRNAGDASFATIRNLSLDAIIVDGRIVKQECVGIKPGSEIVSGPQKEGHLIYTFEITEAEDHEKKNVKIVLDIENAKCSICLNLWHDVVTVAPCLHNFCNGCFSEWLRRSSSNSRDKSQSAACPQCRTTVQSVARNHRMRGLLXAILQAFSSLQRSDEEIALLESYASVKSNMVLGQQKNQSRKRRFSRSSDDTDNSDLPCPQCRNEFGGFRCSPGSVHLQCSGCGGMMPARSNISISQKCLGCDKTFCGAYWYSQGVSSSHCNLICNQDTLKSISQRHISALPDTIHGGNPYEKDITERCIQQSGKTLQVVISEWISKFDNMEIDRSRLQLNNVDAITSRTYICNHCYSKFVDFLLYWFRVSLPQNLLPRDAAERESCWYGFMCRTQHHRPDHAKKLNHVCRPTRGNQP

SEQ ID NO: 9826 - protein, 211 aa, Zea mays
  Clone ID: TF_LIB5116-043-A1-PF1-G8.pep
ISDLVHLSLYMLFFIAIFLNYGVPLHLIRELYETFRNFRIRISDYVRYRKVTSNMNERFPDATPDELDASDVTCIICREEMTTAKKLLCGHLFHVHCLRSWLQRQHTCPTCRAPIIPPDNGRAASAQQHGAQPGVQPGTGTPSSGGAPTENVNMRQLKLEAAASAASLYGRSFAYPPVNTLNRHSGPLHATPSTSQSGEASTSTGHPLEPQ

SEQ ID NO: 9827 - protein, 211 aa, Zea mays
  Clone ID: TF_ZM4578.C2.o3.fg.pep
MSSGGTPPVGLAPVDGNSGGMFSTDRIGGFGYGVGVSVGILLLITTITLASYFCTRAPVDAAGEAAAAAAAPSSSRRHGGGGGGGEGAQAHDVELGIDEDTLKGYPEVVYEKEAKAAAANKKGTTCTCCSICLDNYGDGEVLRMLPDCGHLFHRECVDPWLRYHPTCPVCRTSPVPSPMPTPLAEVTPLAMAGVIVNLGWAQALSVFSISP

SEQ ID NO: 9828 - protein, 228 aa, Zea mays
  unsure (1)..(228): unsure at all Xaa locations
  Clone ID: TF_ZmC21544_4.pep
MEVAEAPDEDGLDERGVALHLHLPRLLAGVVSGALTGLFALAGALTGAVTGAVAGRAXRQRRVLRGAGLGAVAGAVLSIEVLEASRAYWCSDRLRLGSHGASSMANFIEQLLRARFVQEQFTTSGYASYRWQVSISDFGHDDLYDIFGDISSKGLPQESLKKLPHYVVTDQTRADSFGQILSCPICLQDIVAGDTARRLPSCSHTFHQPCVDRWLVDRGSCPVCRQDV

SEQ ID NO: 9829 - protein, 142 aa, Zea mays
  unsure (1)..(142): unsure at all Xaa locations
  Clone ID: TF_uC-zmflteosinte051b01a1.pep
RLLCSDRLRLGSHGASFMAIXIEQLLRXRSVQEQFTTSGYASYRWQVSISDFGHDDLYDIFGDISSKGLPQESLKKLPPILVTDQTRADSFGQILSCPICLQDIVAGDTARRLPSCSHTFHQPCVDRWLVDRGSCPVCRQDV

SEQ ID NO: 9830 - protein, 412 aa, Zea mays
  Clone ID: TF_ZmC21204_1.pep
MDVLPVGSERESQTDSHPLLMEHAIGIPRHDVASTSTPHRDNNDGMDQLPRDSESSSGTTDASYSPNAPLARRDDNRLRRQQSLNSGFWISIELAVNLSQIIAAICVLSVSKNEHPHAPLFEWVIGYTIGCIATLPHLYWRYLQRNQLATVQGSNQNYVPDNSFESSSFTGISPPPVSEAGVVTVSNGVLRNNVVITNPRAQAFADHFKMALDCFFAVWFVVGNVWVFGGHSSAHDAPNLYRLCIAFLTFSCIGYAMPFILCALICCCLPCIISLMGFREDLDENRGATSDAINALGTYRFRSKKPRNGEANEGGGGVFAPGTDKERAVSAEDAVCCICLARYVDNDDLRLLPCGHFFHKDCVDKWLKINALCPLCKAEIDVVPRTAPPAIGFGRRDSHRRVGNDIESQRLP

SEQ ID NO: 9831 - protein, 272 aa, Zea mays
  Clone ID: TF_ZmC483_1.pep
MTSASELFTARRAARGARLSDLDLDPHADALRDQHGLGARHRRRGCRPRRQLDAAGDVRQHLHTGAPPPRRRGSYTDQILSYIDNNNLGVGDSAARRNRLDRLMFRTNERLPGAVLQAQARVLERLRGISLGSSASRPSISLDEFSASDVFRIIDFRNREARHEANRHHSSSFHPSSESDEERPTVSSTHSNRSTGLTKAAFLRLQVEIFEASKDDSREASPECSICLDGFYDGDELIRLRCGHRFHSTCLEPWARKCADCPYCRTNIRSRS

SEQ ID NO: 9832 - protein, 169 aa, Zea mays
  Clone ID: TF_LIB3354-120-Q1-K6-F6.pep
MIPRPSSRFLFVAASPLPQRGLPASVLQSLPVTVYGSPGGKDKDALECAVCLSEVGDGEKVRTLPKCSHGFHVECIDMWFHSHDTCPLCRAPVGDLDALPREEPSGAPLELPVFPTNVLFWGTHDEVTNAGLVAPPRAAPSASSSASGRRKENLVIDIPTRAVATTTTT

SEQ ID NO: 9833 - protein, 302 aa, Zea mays
  Clone ID: TF_ZmC9505_2.pep
HASAHASAPVSAGKSGVLLAAVIFLFMVVVFVFLLYLYAKRYLGANPLLAPSSPSSRFLFVAASPLPQRGLPASVLQSLPVTVYGSPGGKDKDALECAVCLSEVGDGEKVRTLPKCSHGFHVECIDMWFHSHDTCPLCRAPVGDLDALPREEPSGAPLELPVFPTNVLFWGTHDEVTNAGLVAPPRAAPSASSSASGRRKENLVIDIPTRAVATTTTTPPPANSPLPASRMPGSADEMRSPVSARLRSLRRLLSRGKQAMVGTSSSYSPRDIEQGLAGGEAAAAATARPPKTPKTPPSAHAH

SEQ ID NO: 9834 - protein, 134 aa, Zea mays
  Clone ID: TF_700577710_FLI.pep
NCCCCFVRRFMMDQLVFYESRAAAADPHRDMRLDIDNMSYEDLLALGESMGNVNTGLADEKISKCVKEVVCCSSDQTQTDQDDQDDGSCVICLEGYRDKDMLGILKCRHDFHAGCIKKWLQTKNSCPVCKAAAA

SEQ ID NO: 9835 - protein, 225 aa, Zea mays
  unsure (1)..(225): unsure at all Xaa locations
  Clone ID: TF_LIB4974-022-Q1-K1-D10.pep
MEHDAEARRGFARMGFGCKHYRRRCRIRAPCCGDVFHCRHCHNESTKDGHELDRHDVQSVICLVCDTEQPIAQVCCNCGVCMGEYFCAACNFLDDDVDKEQFHCDDCGICRVGGKENFFHCQKCGSCYSTTLRDRHCCIENSMKNNCPICYEYLFDSLRETSVLRCGHTMHLQCFHEMLKHDKFSCPICATPIFDMDKFFKXLDAEMGASYLYTGKGWVVCNDCR

SEQ ID NO: 9836 - protein, 452 aa, Zea mays
  Clone ID: TF_ZmC9878_1.pep
MDPPPVSPDRWGPSQGAGVGPSGLRRYGLNFSASSLLQAPIAALLEYSGVVQSGPALSAHHPSAGPSSPLSASEVDGLLSAAAAGDGEVSIRIQGGPGDTEATGGPDAGTSSEDLIEATAGSEVDQASAAGRGAGATDAEANGGGAGTSGNGGGDRAYQRYDVHHVARWFEQILPFSLLLLVVFIRQHLQGFFVTIWIAAVMFKSNDILRKQTALKGERKISVLIGITVIFMIHVFGVYWWYRNDDLLRPLFMLPPKDIPPFWHAIFVIMVNDTMVRQAAMAVKCMLLLYYKNCRGRNYRRQGQMLTLVEYLLLLYRALLPTSVWYRFFLNKEYGSLFSSLTTGLYLTFKLTSVVEKVQSFLAAVKALSRKDVHYGSYATAEQVLAAGDMCAICQEKMHVPVLLRCKHIFCEDCVSEWFERERTCPLCRALVKPADIRSFGDGSTSLFFQLF

SEQ ID NO: 9837 - protein, 367 aa, Zea mays
  unsure (1)..(367): unsure at all Xaa locations
  Clone ID: TF_ZmC279877_1.pep
QKKRAFYCGDVGEGCRQKFKGYDAAGTIXENYANILVLLLRVXQACDHPLLLXGHESDLGEGNSIERGKQLPKETVTNLLEKVEKGAGICSICNDPPEDAVVTTCGHVFCYQCVHERLTSDGHVCPYALCGNKLSFRSVFTPAVLKLCISPKPEFGEETSCSTAADKPSSICESSYISSKIRAAVEILNSIIKTPALTAGDTTESIPSMAPPVKAIVFSQWTGMLDLLELSLSRNGIQFRRLDGAMSLDLREKEVNGFKTDPEVRVMLMSLKAGNLGLNMVAACHVIMLDPWWNPYAEDQAVDRAHRIGQTRPVTVSRFTVKDTVEDRILALQEKKREMVESAFGEDGSRGTATKLTVEDLRYLFMV

SEQ ID NO: 9838 - protein, 267 aa, Zea mays
  unsure (1)..(267): unsure at all Xaa locations
  Clone ID: TF_ZmC18703_1.pep
AAVLSSSAEESPVKPLRLWVVGYAAQCLVHVGLVCADTRGETRGARRSAYDXRPRCAGTDSSDADSEDDERGLGRSSYTGRGESMNTLISFLXDAIGCYCLSSYGDGAELAALPCRHHFHWSRITTWCFAVFCVAVACLLGIALCCCLPCVIAILYALAGQEGASDADISVLLRYRYSDPSEDGEKGVDEGLMIPILNNSGMSTSERILLREDAECCICLSSYEDGAELSALPCNHHFHWPCITKWLRMNATCPLCKYNILKGSDSA

SEQ ID NO: 9839 - protein, 135 aa, Zea mays
  Clone ID: TF_LIB4764-042-Q2-K1-E12.pep
RLRGRSISPTSTSTTISLATGPSPTAGAGSSSGERDRDSDANISDPEKLAVEAPPPPPPPALVYSAVGTKLVGAAMECAICLAEFADGDTVRVMPVCGHGFHARCIELWLAGGRRSSCPTCRAPDGAAAATPSSS

SEQ ID NO: 9840 - protein, 440 aa, Zea mays
  Clone ID: TF_ZmC11659_1.pep
MSGANSSLPMPPPAPAASALDNVEAKISPSIVFVVAILAIVFFVCGLLHLLVRHLLRLRRRRRRAREDADSVTAFQGQLQQLFHLHDAGVDQAFIDALPVFLYRNVVGAAPGGKDPFDCAVCLCEFSPDDRLRLLPQCSHAFHLECIDTWLLSHSTCPLCRRNLLADLSPASSSPVVVVQLGSGSARDMAASAGGATHDDADGGEPSDRATPAQEMVEVKLGKFVCVEGNSDSASATATDAAGTSGDGDGGASAEEGLGQRRCHSMGSYEYVMDDRASLRVAIKPEPKKKPAASKSRRRGAMSECELGASKRGETSLRLPFPATVPKQQQQSDSDATMAKLAKDSFSVSKIWMVPSSKEDPDAAGERRTVSFRWPVRSKDEGDGRNRKSGSEADWDVEAGSGGGGNSAASSLAEERPSFARRTLLWVVGGRQQSRVGSCS

SEQ ID NO: 9841 - protein, 238 aa, Zea mays
  Clone ID: TF_ZmC22803_1.pep
RVPSLVLTARSLKQLDSAADFSRDYDGACLQMRMSYSPAAHFFLFLVQWTDCSLAGALGLLRILIYKVYVDGSTTMSTHERKASIREFYAVIFPSLMQLPKGISDVDDRRQKAACTERYRRRDEDEGKRPVSEADIEREEECGICMEMNGKVVLPSCSHAMCIKCYRQWRSRSQSCPFCRDSLKRVNSGDLWMLTDCRDVVDMATVTRENIRRLFMYVEKLPLVAPDNIFYAYDSHVK

SEQ ID NO: 9842 - protein, 250 aa, Zea mays
  unsure (1)..(250): unsure at all Xaa locations
  Clone ID: TF_ZmC22803_3.pep
RPRPRGLLQRSRSGLAQVLEADIQHANTLAAGFSRDYDGACLQMRMSYSPAAHFFLFLVQWTDCSLAGALGLLRILIYKVYVDGSTTMSTHERKASIREFYAVIFPSLMQLXQGISDVDDRRQKAACTERYRRRDEDEGKRPVSEADIEREEECGICMEMNGKVVLPSCSHAMCIKCYRQWRSRSQSCPFCRDSLKRVNSGDLWMLTDCRDVVDMATVTRENIRRLFMYVEKLPLVAPDNIFYAYDSHVK

SEQ ID NO: 9843 - protein, 120 aa, Zea mays
  unsure (1)..(120): unsure at all Xaa locations
  Clone ID: TF_LIB3069-029-Q1-K1-D11-TCA.pep
TSPKAFFXRSVINGAHYICHSGGHCPMDTYMRPMCQECGLLKCRQAAMHQECVLSEEQIRLNNLMLXEEEQAHATSLPPRAYXPPQILPQLTPEQLGMIEKLISCQHQCNPGSFSDRSSN

SEQ ID NO: 9844 - protein, 342 aa, Zea mays
  Clone ID: TF_ZmC3751_3.pep
VVNTAILLRRLLPCIVNGVGKTTGMEYPERPGQPLCEYYAKNGTCKFGSNCKFDHPRESGFVPVALNNSGFPLRLGEKECSYYMKTGHCKFGGTCKFHHPELGFLTETPGMYPPVQPSPISSPHPYPHHSNWQMGRPAVVPGSFLPGPYPPMMLPPTVMPMQGWNPYVSPMNQTTPAGGQQAVPAGPSYGLSHQEPTSAVTYGSHYAQLYSSGTSSSNIQEYVFPERPGQPECEHYMKTGTCKYGAACKYHHPQYFSGPKSNCILSPLGLPLRPGSQRCAYYAHHGFCKFGPTCKFDHPMGTPNYSLPAPSLTDLPVAPYPHTFSVTPIAPYLLPPDPRPQF

SEQ ID NO: 9845 - protein, 279 aa, Zea mays
  unsure (1)..(279): unsure at all Xaa locations
  Clone ID: TF_ZmC39160_3.pep
ATAACGFGERCRYNHPRNRXAALEFGGGAKNGAAQYFPERQGQPVCEYYLKTGTCKFGSNCKYHHPKQDGSVQSVILNNNGFPLRPGEKECSYYMKTGQCKFGSTCKFHHPEFGGIPVTPGIYPALQSASVPSPLTYASNWQMGRSPAVPGSYIPGSYTPMMISSGMVPLQGWSPYPASVNHVASGGAQQTVQAGPLYGIGHHGSSTAIAYGGTYLPYSSSAGQSSNNHQEHGFPERPGQPECQYYMRTGDCKFGTTCKYNHPRDWSTPKTNYMFSHLC

SEQ ID NO: 9846 - protein, 172 aa, Zea mays
  Clone ID: TF_ZmC2870_1.pep
MEDVLTPPPQPELAGEKRKREESSLDASIEDAPSAPASTCSAEDAAGSDVARHPMWKTSLCSFFRRRGAGAEGCSHGDSCRYAHTEEELRPRPDGTWDPTSDRAKELRKVAAEAQEEAEEEVTVDEQSLDKCLVGLPRGWTADRLKSLLQDQGISYATAWDKKGMTVGFWDF

SEQ ID NO: 9847 - protein, 419 aa, Zea mays
  unsure (1)..(419): unsure at all Xaa locations
  Clone ID: TF_ZmC493_3.pep
MDDAGRPPPHAPVAVTASASASATAAPAPPQPSATAAVDRSSPDPDALYEEGMWQQMAMDSGATMQPGSYPERPGEPDCTYYLRTGLCRFGMSCRFNHPPDRNLAIASARMKGEYPERAGQPECQYYLKTGTCKFGPTCKFHHPREKAGIAGRVQLNTSGYPLXPGHCKYANTCKFHHPELFNVVPSSRGSPIYTSVHSSASAGPQSYTGTMPSWAFPRASFIPSPRWQSPSNYAPMIVPQGLVQMPSWNSYTGQLQSPGAQQTYGSSQQGEASTGNQGMLSPYRSSSFPVPQYALQRENVFPERPDEPECQYYMKTGDCKFGAVCKFHHPRVRSLPPPDCVLSPMGLPLRPGEELCKFYSRYGICKFGANCKFDHPTVVAPMVYAYGFSASASPASASTNVPMARRLLGSPPGSGYTS

SEQ ID NO: 9848 - protein, 238 aa, Zea mays
  unsure (1)..(238): unsure at all Xaa locations
  Clone ID: TF_ZmC5498_5.pep
LGFCPPPPSIKTPAALARARHGHRTQAHRAGGRQRRGRPEARESTAGCPFGSNCHFLHNFPGGYLAVSKMTNLGGPPVPAPPGRMPMGPGGPDGPPSPALKTRLCNKYNTAEGCKWGSKCHFAHGERELGKPLQMDNSMGAPPMGPGPNGHFMPPPMPIPDMVPHSTFGASATAKISVDASLAGAIIGKSGINTKHISRVTGAKLAIRENEADPTXNIELEGTFDQIXHASAMVTELI

SEQ ID NO: 9849 - protein, 264 aa, Zea mays
  Clone ID: TF_ZmC493_7.pep
MDDAGRAPPPAPAAVTVSATAAPAPTPPSATVAADKSSLDPDALYEEGMWQQMAMNSGATMQPGSYPERPGEPDCTYYLRTGLCRFGMSCRFNHPPDRNLAIASARMKGEYPERVGQPECQYYLKTGTCKFGPTCKFHHPREKAGIAGRVQLNTLGYPLRPNEKECAYYLKTGQCKYANTCKFHHPELFDVVPSSRGSPIYTSVHSSASAGSQSYTGTMSSWTFHELLGVFWEGVFLGGVYVFFFFFFWVVFFFIKSMALPQAL

SEQ ID NO: 9850 - protein, 163 aa, Zea mays
  unsure (1)..(163): unsure at all Xaa locations
  Clone ID: TF_ZmC2222_1.pep
GKXYCDYCDKQFQDTPAARKRHLQGVQHQRARALWYDSIRHQDQHGGASSLLLPDGTLAKGICHHFVRTGTCKYGDSCRYFHPKPDGANPALAAPGPGSGPGPMVQQSDFIANQPNFVGYQGVDINSSSGKILGGHASWGNLPPSLQPPPEGGYPPLPFIDWG

SEQ ID NO: 9851 - protein, 80 aa, Zea mays
  Clone ID: TF_ZmC2222_2.pep
SPRAYATTSSARGLASMGIHVDTSIRSQMVPIQQSDFIANQPNFVGYQGVDINSSSERIVMYDKLDAYHILTSVSCHAMM

SEQ ID NO: 9852 - protein, 317 aa, Zea mays
  Clone ID: TF_ZmC35732_1.pep
DETDIAHQEVLKGSKDKRKETFAEGNTQEECKYYSTPGGCKFGKTCKYLHREGNGGKTEVEKAELNFLGLPLRPGEKECPYYMRTGSCKFATNCKFHHPDPTNASSKEPGLEHENGDVPLQNVQGSSQPSLQMWPDQRALNEQHVPFLAPAPSYSGGMVPPQGMYPSSDWSGYHQVPLNPYYPPGVPFPHFPAAHMNHPMYKAADIPGHQPPPSDEYPERPGQPECQHFVKSGFCKYRMKCRYHHPRSRQSAPPPAGLSPIGLPIKPDQPVCTYYGRYGFCKYGPACMFNHPFNFGPPVPAAGPPLPGQYPTHGNFA

SEQ ID NO: 9853 - protein, 199 aa, Zea mays
  unsure (1)..(199): unsure at all Xaa locations
  Clone ID: TF_jC-zmshLIB3587P032f11b1.pep
AGHGRKRRSREEVPDGDGERGCRRREALQSTIGCPFGEGCRFLHFVPGGYPAVAKMLNLGSPAVSAPSRTHVDHAALTGASHSASSGKTRMCTKYNTTEGCRFGDKCHFAHSERELGKPAYMPYGEPPMGGRFGGRPEPVQPAAMGPPAGNXGASATAKISVDASLAGGXIGXRGGVNTKQISRVTGVKLCIREHESSP

SEQ ID NO: 9854 - protein, 164 aa, Zea mays
  Clone ID: TF_LIB4766-083-R1-K1-H10.pep
KIVWKFSVRPELPTPNTMPLGKYYCDYCDKQFQDTPAARKRHLQGVQHQRARALWYDSIRHQDQHGGGSSLLLPDGTLAKGICHHFVRTGACKYGDSCRYFHPKPNGVNPALAAPGLGSGPAPMVQQSDIIGNQPNFVVYQGVDILHQKIHQESHCCVGARESG

SEQ ID NO: 9855 - protein, 92 aa, Zea mays
  Clone ID: TF_700424071_FLI.pep
HPFDRSAPHSKENEDTQQPVALTLAGLPRREDAEACAFYMRSGTCGFGARCKFDHPPRQRQLKKRRKYPVSGCGTMRIALLMLDAVTAMVGA

SEQ ID NO: 9856 - protein, 50 aa, Zea mays
  Clone ID: TF_ZmC292_11.pep
GRVGQQPVALTLAGLPRREDAEACAFYMRSGTCGFGARCKFDHPPRQDDV

SEQ ID NO: 9857 - protein, 326 aa, Zea mays
  Clone ID: TF_ZmC292_3.pep
SSRAAATAGGGETSVLDLPELAMDCILDQRVRAELRSMAAVCRSMRERCRGDHLWERHMTNRWGRVLGRAARDEWRTHLASASESRAAGGGGGGKRRRWLAALSCVCPVVSWMRPRADGGKSSAPVLDDSIMSWYLSVESGKFWFPAQVYNREHGHVGFMMSCYDAALSYDFHTDTFRARYPPHGRRTVVLEDGVQWDRVRAPPVDTLAHDLHTSDCLHELRPGDHIEIQWRRNKEFPYGWWYGVVGHLESCDGSEHFCRCHLSDTVVLEFNQYTPGSRWRQALVKRKEHREEGNEGDGFYGGIRKLRGNDDISKWRQLWPTDVLE

SEQ ID NO: 9858 - protein, 208 aa, Zea mays
  unsure (1)..(208): unsure at all Xaa locations
  Clone ID: TF_LIB4746-091-R1-K1-D4.pep
MDDAGRAPPPAPAAVTVSATAAPAPTPPSATVAADKSSLDPDALYEEGMWQQMAMNSGATMQPGSYPERPGEPDCTYYLRTGLCRFGMSCRFNHPPDRNLAIASARMKGEYPERVGQPECQYYLKTGTCKFGPTCKFHHPREKAGIAGRVQLNTLGYPLRPNEKECAYYLKTGQCKYANTCKFHHPXELFHVVPSSRGSPIYTSVHSS

SEQ ID NO: 9859 - protein, 67 aa, Zea mays
  Clone ID: TF_ZmC292_8.pep
QQPATLASLPRREDAEACAFYMRSGMCRFGAHCKFDHPPREEAISELQAAGKEGIEGPSLVQRDHDV

SEQ ID NO: 9860 - protein, 216 aa, Zea mays
  unsure (1)..(216): unsure at all Xaa locations
  Clone ID: TF_ZmC1553_10.pep
AGHGRKRRSREEVPDGDGERGCRRREALQSTIGCPFGEGCRFLHFVPGGYPAVAKMLNLGSPAVSAPSRTHVDHAALTGASHSASSGKTRMCTKYNTTEGCGFGDKCHFAHSERELGKPAYMPYGEPPMGGRFGGRPEPVQPAAMGPPAGNFGASATAKISVDASLAGGIIGKGGVNTKQISRVTGVKLCIRDHESSPNLKNIELEGNXDQIKQAR

SEQ ID NO: 9861 - protein, 143 aa, Zea mays
  unsure (1)..(143): unsure at all Xaa locations
  Clone ID: TF_ZmC1553_3.pep
AGHGGNRHGLKEVPAGDDERGCSRREALQSVDASLAGCIIDKGGVNTKQXTGVKLSIRDHESNPNLKNIELEGNFDQIKQASDLLRDLIATISASMPAKNPSSAVAPAGGGQGSGPGGTSSNYKTKLCENFLKLCENFQHDYV

SEQ ID NO: 9862 - protein, 389 aa, Zea mays
  Clone ID: TF_ZmC3751_2.pep
SAVQAGRPREEPAPVNGVGKTTGMEYPERPGQPLCEYYAKNGTCKFGSNCKFDHPRESGFVPVALNNSGFPLRLGEKECSYYMKTGHCKFGGTCKFHHPELGFLTETPGMYPPVQPSPISSPHPYPHHSNWQMGRPAVVPGSFLPGPYPPMMLPPTVMPMQGWNPYVSPMNQTTPAGGQQAVPAGPSYGLSHQEPTSAVTYGSHYAQLYSSSGTSSSNIQEYVFPERPGQPECEHYMKTGTCKYGAACKYHHPQYFSGPKSNCILSPLGLPLRPGSQRCAYYAHHGFCKFGPTCKFDHPMGTPNYSLPAPSLTDVPVAPYPHTFSVTPIAPYLLPPDPRPQYTLAKDPSAYPPQAPGTTYGPVGAISKVYARHTLIRSPTSGAAGMQAS

SEQ ID NO: 9863 - protein, 607 aa, Zea mays
  Clone ID: TF_ZmC5023_1.pep
MAATSPAPAPPRILLAGDAHGRLHQLFKRVKSVNQSTGPFHALLCVGQFFSPEGAAEGSPEDVTDYLEGRASVPIPTYFTGDYGPAAPRLLSKAAAGARGFAPGGIEICPNVFWLRGSNRFTLHGLSVVYLSGRKGLGGPGCYSQDDVDALRALAEEPGIDDLFLTNEWPTGVVSGSDTSNVPNQVLDPNGYDPIVAELVAEIKPRYHIAGTKGVFYSREPYVNDSAAHVTRFIGLANVGNKEKQKFIHAISPTPASVMSSADINAKPPNATLSPYVGSAKSVPIEEAPKRAAENIDSQYWRYDVKRQRHGEAGGGGLCFKFVSSGSCQRGSRCSYRHDEEAVEHYQRNVCFDFLNKGKCERGPECKFVHSLSGETALRDARPPSERRRVESSCWFCLSSPDVESHLVISIGEGYYCTLAKGPLVPNHVLMIPVEHCPSTLMMPPEAEAELGRYKIALSKYFEKQGKTAVYFEWVSPRSHHANLQAVPVPLSKADAVNKIFHLAAKKLGFEFSMVNPDGAKTARESLMSQCESKSGLFYVELPEGRILLHMVDSNEKFPVQFGREVLAGLLSMADRADWRNCKISKEEEIKLVDDFKQGFREFDPAE

SEQ ID NO: 9864 - protein, 428 aa, Zea mays
  unsure (1)..(428): unsure at all Xaa locations
  Clone ID: TF_ZmC5023_2.pep
PTGVVSGSDTSNVPNQVLDPNGYDPIVAELVAEIKPRYHIAGTKGVFYSREPYVNDSAAHVTRFIGLANVGNKEKQXSVMSSADINAKPPNATLSPYVGSAKSVPIEEAPKRAAENIDSQYWRYDVKRQRHGEAGGGGLCFKFVSSGSCQRGSRCSYRHDEEAVEHYQRNVCFDFLNKGKCERGPECKFVHSLSGETALRDARPPSERRRVESSCWFCLSSPDVESHLVISIGEGYYCTLAKGPLVPNHVLMIPVEHCPSTLMMPPEAEAELGRYKIALSKYFEKQGKTAVYFEWVSPRSHHANLQAVPVPLSKADAVNKIFHLAAKKLGFEFSMVNPDGAKTARESLMSQCESKSGLFYVELPEGRILLHMVDSNEKFPVQFGREVLAGLLSMADRADWRNCKISKEEEIKLVDDFKQGFREFDPAE

SEQ ID NO: 9865 - protein, 401 aa, Zea mays
  Clone ID: TF_ZmC202_1.pep
MDRRQELCRNFQRGSCKYGSHCRFVHASSQQQQQAKPNPFGFGLGSRQQQQQQSSFRAQFQQQQQQKPNPFGFGVQGSAAAQSRNAPGQAKPFQNKWVRDPSAPTKQQEAAQPPAAAHTSCTDPESCRQQIAEDFKNETPLWKLTCYAHLRSGPCDITGDISFEELRANAYEQGRQGHPLQSIVEGEKKLKNAKLTDFNNFLNMPRLSVSQTPSFPTVASFPEVKNNSAFGVSQNNGPPVFSSFSQIGVTTNMGPGSRTTPGVPTNTLFGQSTQPSHPTFPAPTFGRSDMKFGVSGPFGSQISQQSSGSFQGSNMSSFGNFSKPHASYQQSPSSSSHHRDIDRQSQDLLSGIVVPTSATNEAPVEDNKNENQDDSIWLKEKWSIGEIPLGEPPQRHVSHVF

SEQ ID NO: 9866 - protein, 152 aa, Zea mays
  unsure (1)..(152): unsure at all Xaa locations
  Clone ID: TF_ZmC493_13.pep
VESPRVRAIASARMKGEYPERVGQPECQYYLKTGTCKFGPTCKFHHPREKAGIAGRVQLNTLGYPLLPVCFFLPVTCPLLHMSVCFAEKESTLLLXNEKECAYYLKTGQCKYANTCKFHHPELFNVVPSSRGSPIYTSVHSSASAGPQSYTG

SEQ ID NO: 9867 - protein, 205 aa, Zea mays
  unsure (1)..(205): unsure at all Xaa locations
  Clone ID: TF_LIB4759-098-Q1-K1-E12.pep
PPPPPPPATAAPAPPQPSATAAVDRSSPDPDALYEEGMWQQMAMDSGATMQPGSYPERPGEPDCTYYLRTGLCRFGMSCRFNHPPDRNLXMKGEYPERAGQPECQYYLKTGTCKFGPTCKFHHPREKAGIAGRVQLNTSGYPLRPNEKECAYYLKTGHCKYANTCKFHHPELFNVVXLSSRGSPIYTSVHSSASAGPQSYTGTMP

SEQ ID NO: 9868 - protein, 227 aa, Zea mays
  Clone ID: TF_LIB5117-029-A1-PF1-C11.pep
RTSGPSGGLSSTRPNAARGFLSHALGVPDRPRPRPNAANSRLPTASFQRRKLAGVIYTASASPSSSSPSSSPFPEREACAGIIYSPLPRCAEPFLEWRKTRKQKMAWMSDQPCRSYIIDGSCKYGSDCLFSHGLDLFGRIEMQIRALLHVPDVYQVPVEHLPWSRPELGIMLRQVGMGWDSWSPNEFARAFHTICVVYNSYGYYAILVGECFTLPGLLTLQSKCDGC

SEQ ID NO: 9869 - protein, 214 aa, Zea mays
  Clone ID: TF_LIB3969-004-Q1-K1-E7.pep
PWVDPASASSWLHPLARRLDCSKRGCCPPHSGAMREGMRERDRGGSPDASGPPPFRGPAYKTKLCALWRGRGGCPRPNCGFAHGEAELRRPPPRASFQPRPRPGRRDYRDHEFRLRPDRRHSPHGRYSPERDIRRRSFHDKRPSSEDRGSSHSRSPIRKSERKHSKSPDGGETDSSVSVRSPDNEDRGKDERYLSSDEKNGHEDHLKQMHLDME

SEQ ID NO: 9870 - protein, 395 aa, Zea mays
  Clone ID: TF_ZmC4867_1.pep
MREGMKERDRGGSPDASGPPPFRGPAYKTKLCALWRGRGGCPRPNCGFAHGEAELRRPPPRASFQPRPRPGRRDYRDNDFRVRPERRHSPYGRFSPERDIRRRSFRDKRQRASSEDRGSSHSRSPIRKSERKHSKSPDGGKTDSSVSFRSSDNEDKGKDERYLSSDEKNGREEQLKQMHLDMEALREDKSKLEAILEKKTDEERKLCSRVEDLELQLNKEKDDFQRMTSKTKKLIKAHGRYIKAQEDLKRSQARFERLADLLASDILKPYTKEQGSIGITANDDPYNANEMSPSDQRQNHVSASRKRPISLPRSEEAKTGKRQRENGDDMIPTPENYRPEDALEHVQDSKGTDRLESFTVKKLRVGDYDDEGNIVSSSNIFADRYKGDDEEVDVD

SEQ ID NO: 9871 - protein, 472 aa, Zea mays
  Clone ID: TF_ZmC28685_1.pep
HLLLAAGASADALAFSGLRAGDLLPRANAAADRDRALRVLLKSPAASPSSSPKKSASPPPPTAAAAAPEPRKEYPPDLTLPDLKSGLFSTDEFRMYSFKVKPCSRAYSHDWTECPFVHPGENARRRDPRRFSYSCVPCPEFRKGGACRKGDNCEYAHGVFECWLHPAQYRTRLCKDEVGCARRICFFAHKPEELRAVNPSAVSVGMQPTVSSPRSSPPNGLDMGAMLNPAWPSSPASRLKTALAAGRELDLDLELLALDQYQQKLFDKVSSPRAGWGGGMGSPLPAAAPSTRAVPDYADLLGSVDPAMLSQLHALSLKQAGDMPAYSSMADTQLHMPASPMVGPNSAFGLDHSMAKAIMSSRASAFAKRSQSFIDRGGRAPAARSLMSQQPTAGAPSMLSDWGSPDGRLDWGVQGDELHKFRKSASFAFRGQSPAPAPAPAEPDVSWVNSLVKDGHAGDIFAQWPEQEQMVA

SEQ ID NO: 9872 - protein, 179 aa, Zea mays
  unsure (1)..(179): unsure at all Xaa locations
  Clone ID: TF_ZmC292_7.pep
MSTSSRPVTPAPHGLIHPLPTSAPSNRISARDDSRKVLNDEDSYPERPGEPDCPYLLSSRCKFKSKCKFNHPKEMVNALGTRTDNEXRPSEPVCSFYAKTGKCKFGAVCKFNHPKLEDIKTSSLIAKETIYRATTDAAAHIGGTDDSVPAKTHAPIAPAEAHNAKGLPIRPVCIYQMVV

SEQ ID NO: 9873 - protein, 59 aa, Zea mays
  Clone ID: TF_jC-zmX700082717a1.pep
MLEKNSFAPGAPFEDQGGGLGAKTTSKPKLCETFVKGVCPFGKGCPFAHGKNEQRKGAV

SEQ ID NO: 9874 - protein, 676 aa, Zea mays
  unsure (1)..(676): unsure at all Xaa locations
  Clone ID: TF_ZmC533_1.pep
MVDLADLEGAGEAARSHLAACGQRDRLAALLELAAADDVAGFREALAGGGGXGDAAELADGVGMWYGRSKAYEPRTPLMVAATYGSVEVVXRWLGLGXVDVNRRPGVDVATPINRREXAVRMAREMRELLLGAGACPVTPDSXDRLPADVILSPCASPDALGDLEMLLGRRRGLAVATSVPSLSSSPPLSTSPDEGXRSPHRXASSLSPITVDRAKKEYPVDPTLPDIKSRVYASDEFRMFAFKVRPCSRAYSHDWTECPFVHPGENARRRDPRKHPYTAVPCPNFRRPGGCPSGDSCEFSHGVFESWLHPSQYRTRLCKEGAACARRICFFAHDEDELRHVPHNSGAGLLSPRASSSIDMTAAAAALGLLPGSPTRHFVPPPLSPSAANNGGGAAAHWLQGSRLRSSFNARDAQADDLGSLLEWESQYLGALSLPQSSRSQPRLSTGLTIRPTAVAPSYLEEMYASDMAMSPRFTNDQGHSVFSPAHKSALLNKFHHQQKGLLSPVNTNRMYSPRGLDPSIIHSPFGGMSPRSPRTMELTSPLSVRVGAAATPRDMLDQFSSLNKHQVPSAGSPRNLNVSWGNIGTPKSKVDWGVDNDELVRLRHPVQPGNTEEEPDVSWVQSLVNHAELSGKRGEMAGMASPSTNKPELSSQDDSLDESVIASWLEQQMHLEPK

SEQ ID NO: 9875 - protein, 105 aa, Zea mays
  Clone ID: TF_LIB5116-018-A1-PF1-C7.pep
MDAGRKRAVPEGTNGGAAVKRARESESVQTGVGSKSKPCTKFFSTAGCPFGSSCHFLHNFPGGHQAVSKMTNLGGPAVSAPQGRMPMGPGVPDGPPTPSLKTRLC

SEQ ID NO: 9876 - protein, 114 aa, Zea mays
  unsure (1)..(114): unsure at all Xaa locations
  Clone ID: TF_LIB4727-020-R1-K2-C6.pep
FGGGTKNGAAQDFPERQGQPVCEYYLKTGTCKFGSNCKYHHPKQDGSVQSVILNNNGFPLRLGEKECSYYMKTXQCKFGSTCKFHHPEFGGIPVTXWIYPPLQSPSVPSPHTYA

SEQ ID NO: 9877 - protein, 91 aa, Zea mays
  Clone ID: TF_LIB3205-035-P1-N1-F9.pep
AKTHAPIAPAEAHNAKGLPIRPGEVDCSFYMKTGSCKYGSICRFNHPDRSVVDIAFMAPVQATLPFPATTKKTEEVSCIRMWYHANRTVNA

SEQ ID NO: 9878 - protein, 165 aa, Zea mays
  Clone ID: TF_LIB5116-066-A1-PF1-D7.pep
MPLGKYYCDYCDKEFQDTAAARRRHLQGAQHHRARALWYDSVRRQESHGGASPLLQPDGAILGQGVCNHFVRTGTCKFGDACRYFHPKPHAVNPAFAPSGPVPGAMGQQSNFLGTQPNFVGYQAMEGNSFSGNILRGHTSWGNLPPSLQPPPEGGYPPLPFVDWG

SEQ ID NO: 9879 - protein, 147 aa, Zea mays
  Clone ID: TF_21209055.pep
ACRYRSGIPGPAHASGQFYMKTGDCKFGAVCKFHHPRERIIPTPNCALSPLGLPLRPGEPICSFYNRYGMCKFGPNCKFDHPMGNAMYGQAPSPASEAPAPRRMLAHVPPSHPEASPDGGSGRSRRIAHSDSQQIPSGERSAEREAS

SEQ ID NO: 9880 - protein, 206 aa, Zea mays
  Clone ID: TF_LIB3587-272-Q1-K6-G8.pep
GHHGGKAVEGVFLQDQDEAVEQCTSDQLRTITDGRCSYGSSCHFNHPRLKAKLEVSSFPSEQRNHEAEFLELNRVGLPIREGARKCIYYMRNGTCRYGKKCCFNHPEQVLDVQHHTATGWDDTNLQSSPHSKKLPEHKTMDDISSGSEVLPPNILRMLLPPQNVPPSTKEKEIRIKKDPDWASASDDSDGCCSADSSNGPLCKQEH

SEQ ID NO: 9881 - protein, 245 aa, Zea mays
  Clone ID: TF_LIB5117-050-A1-PF1-C5.pep
MSGYPFYPYGRGGVGEDASAMSGYPFYPYGRGGVGDDAAARYSSYEIDLIAARYAGDPSPYPYPSASGGFDPHVGARRPADVLYHQSIMGSHSTIGQSYAFYSPNTMVKRPRLESSLPIYPQRPGEKECAFYMRTRTCKYEETCKFDHPQWVPEGGIPNWKEGTKAGESYPERPGEPNCPFFVKTGDCKFGSKCKSNHSKKKDDGTVAGPGDKESLFSGNSTLPVKPSEPCPEPLISYSTLPGEF

SEQ ID NO: 9882 - protein, 213 aa, Zea mays
  Clone ID: TF_ZmC39160_1.pep
LCYVSFLHVKKNCADHVDSAIAYGGTYLPYSSSAGQSSNNHQEHGFPERPGQPECQYYMRTGDCKFGTTCKYNHPRDWSTPKTNYMFSHLCLPLRPGAQPCAYYAQNGYCRYGVACKYDHSMGTLGYSSSALPLSDMPIAPYPIGFSVATLAPSSSSPEYISTKDPSINHVVSPVAGPAPVGAILPKGVFHHDTIMQTQTPTSAGSSSPGGGR

SEQ ID NO: 9883 - protein, 98 aa, Zea mays
  Clone ID: TF_LIB3076-015-Q1-K1-B7.pep
MPFDLSMYLLKVFCVFQVNGVGKTAVTVEYPERPGQPLCEYYAKNGTCKFGSNCKFDHPREGGFVPVTLNSGGFPLRLGEKECSYYMKTGHCKFGATC

SEQ ID NO: 9884 - protein, 220 aa, Zea mays
  Clone ID: TF_21209753.pep
MSDPFYPYYRGAFPGGDGAQPPPRYSDFEVDLIAARYAGTLLPYPSSADVGAFDSYVGARRSAEVLYHQSFMGSHSTVGQNEALYSSNTMAKRPRLESSLPIYPQRPGQKDCAFYMSTGTCKYGETCKFDHPQWVPEGGVPNWKEVLNDEDSYPERPGEPDCPYLLSSRCKFKSKCKFNHPKEMVNALGTRTDNESLIADTAILPVRPSEPVCSFYAKTG

SEQ ID NO: 9885 - protein, 301 aa, Zea mays
  Clone ID: TF_ZmC5498_3.pep
MDTGRKRTAPEGANGAGGPKRARESETTGVGSKSKPCTKFFSTAGCPFGASCHFLHNFPGGYQAVSKMTNLGGPPVPAPPGRMPMGPGGPDGPPSPAVKTRMCNKYNTAEGCKWGSKCHFAHGERELGKPLQMDNPMGPPPMGPGPNGHFMPPPMPFPDMVPPSTFGASATAKISVDASLAGAIIGKGGTNTKHISRVTGAKLAIRDNEADPNHKNIELEGTFDQIKHASAMVTELIVRISGKPPPQAKNNPGRGPGSHAGGPGSNFKTKLCENFNKGSCTFGDRCHFAHGEGELRKPAAA

SEQ ID NO: 9886 - protein, 221 aa, Zea mays
  Clone ID: TF_ZmC1553_7.pep
MDAAARKRSRPESANGGAAGGKRSRESESQQTGLSSKSKPCTKFFSTVGCPFGEGCHFAHFVPGGYQAVSKSHSLGHAAVSAPSRAPADHAASGVKTRMCTKYNTAEGCKFGDKCHFAHGERELGRPPSSYMSQESSYAPPMGGRYGGRHEPPLPASMGPPAGNFGASSTCKVSVDAALAGGIIGKGGVNTKQICRITGVKLSIRDHESNPDLKNIELEGS

SEQ ID NO: 9887 - protein, 209 aa, Zea mays
  Clone ID: TF_ZmC1784_7.pep
MAEHLASIFGTEKDRVNCPFYFKIGACRHGDRCSRLHNKPSVSPTLLLCNMYQRPDMITPGVDAQGNPIDPVKIQGDFEDFYEDIFDELSKHGEVENLHVCDNLADHLIGNVYVQFREEDQAAKALQALQGRFYSGRPIIAEFSPVTDFREATCRQFEEHNCNRGGYCNFMHVKEIGRDLRKRLYGHLHRSRRSHSRSSRSPSPYRHHA

SEQ ID NO: 9888 - protein, 322 aa, Zea mays
  Clone ID: TF_ZmC493_11.pep
RMKGEYPERVGQPECQYYLKTGTCKFGPTCKFHHPREKAGIAGRVQLNTLGYPLRPNEKECAYYLKTGQCKYANTCKFHHPELFNAVPSSRGSPIYTSVHSSASAGPQSYTGTMSSWTFPRASFIPSPRWQSPSNYAPMIVPHGLVQVPSWNSYPGQLQSPGAQQTYGSSQQGEASAGNQGMLSPYRSSSFPVPQYALQRDNVFPERPDEPECQYYMKTGDCKFGAVCKFHHPRVRSQPPPDCVLSPMGLPIRPGEELCKFYSRYGICKFGANCKFDHPTMAAPMGVYAYGFSGSASVAPASTNAPMTRRLLGSPSGSGYMS

SEQ ID NO: 9889 - protein, 444 aa, Zea mays
  Clone ID: TF_ZmC292_1.pep
MSDPFYPYYRGAFPGGDGAQPPPRYSDFEVDLIAARYAGTLLPYPSSADVGAFDSYVGARRSAEVLYHQSFMGSHSTVGQNEALYSSNTMAKRPRLESSLPIYPQRPGQKDCAFYMSTGTCKYGETCKFDHPQRVPEGGVPNWKEAPTVEDSYPERPGEPDCPYLLNSRCKFKSKCKFNHPKDMVNALGTGTNNESLIADSAVLPVRPSEPICVFYAKTGKCKFGAICKFNHPKDIKTSPLIAKETIYTATTDAADAPTEACNAKGLPIRQGEVDCSFYMKTGSCKYGSICRFNHPDRPGPAADITFMVPLVQATLPSSAPIVPAVVEPLPMIYPQRPGETVCDFYMKTGSCKYSQKCKFHHPISRFAPHSKENGDPQQPATLASLPRREDAEACAFYMRSGMCRFGAHCKFDHPPREEAISELQAAGKEGIEGPSLVQRDHDV

SEQ ID NO: 9890 - protein, 556 aa, Zea mays
  Clone ID: TF_ZmC263_1.pep
WSVWSAQEVLDKVAQETPNFGTEQDKAHCPFHLKTGACRFGLRCSRVHFYPDKSITLLMKNMYNGPGLALEQDEGLEVYEEIEQSYEEFYEDVHTEFLKFGELVNFKVCRNGSFHLRGNVYVHYKSLDSALLAYSSMNGRYFAGKQITCEFVAVTRWKAAICGEYMRSRYKTCSHGVACNFIHCFRNPGGDYEWADWDNHPPRYWIRKMVALFGPSVDEMNEKASHTPDFRSSVGSDRKKLKISSNRYVSRGSRNEDVHTRHSPQDYSHSKQERSSHNMNYEYRRHKRDSSAADKHRRQDVGDTNDRQFSTMGNDSKSHRHKHEERHRSDHGNGEKEDDSKTRPRKHCSVRRGSLEVGYSDWSPDFTGTDISKGPSGEKSTSRYDDAKGSRRGSSEYYNLERHHSTAQKQSRNEHSTTRRRRHDIEDYHDEKNDGRGESRKHNRHESNDRWVATNSDVDSDVDRYQSSSCKGTRLGRKDDDPGIEVRHQRSGRSTKDDKRRKHHSGNRWHSGTEEGTSDSSGGDLSSDSWSGRSRNSENFSAHRSKRKRSRSKESG

SEQ ID NO: 9891 - protein, 301 aa, Zea mays; identical to SEQ ID NO: 9885
  Clone ID: TF_ZmC5498_4.pep

SEQ ID NO: 9892 - protein, 115 aa, Zea mays
  Clone ID: TF_ZmC1784_5.pep
MAEHLASIFGTEKDRVNCPFYFKIGACRHGDRCSRLHNKPSISPTLLLCNMYQRPDMITPGVDAQGNPIDPERIQEDFEDFYEDIFVELSKHAEIESLHVCDNLADHMIGNVYVE

SEQ ID NO: 9893 - protein, 81 aa, Zea mays
  Clone ID: TF_ZmC1784_6.pep
MAEHLASIFGTEKDRVNCPFYFKIGACRHGDRCSRLHNKPSISPTLLLCNMYQRPDMITPGVDAQGNPIDPERIQEDFEDF

SEQ ID NO: 9894 - protein, 430 aa, Zea mays
  Clone ID: TF_ZmC493_1.pep
MDDAGRPPPHAPVAVTASASASATAAPAPPQPSATAAVDRSSPDPDALYEEGMWQQMAMDSGATMQPGSYPERPGEPDCTYYLRTGLCRFGMSCRFNHPPDRNLAIASARMKGEYPERAGQPECQYYLKTGTCKFGPTCKFHHPREKAGIAGRVQLNTSGYPLRPNEKECAYYLKTGHCKYANTCKFHHPELFNVVPSSRGSPIYTSVHSSASAGPQSYTGTMPSWAFPRASFIPSPRWQSPSNYAPMIVPQGLVQMPSWNSYTGQLQSPGAQQTYGSSQQGEASTGNQGMLSPYRSSSFPVPQYALQRENVFPERPDEPECQYYMKTGDCKFGAVCKFHHPRVRSLPPPDCVLSPMGLPLRPGEELCKFYSRYGICKFGANCKFDHPTVVAPMVYAYGFSASASPASASTNVPMARRLLGSPPGSGYTS

SEQ ID NO: 9895 - protein, 397 aa, Zea mays
  Clone ID: TF_ZmC493_5.pep
MDDAGRPPPHAPVAVTASASASATAAPAPPQPSATAAVDRSSPDPDALYEEGMWQQMAMDSGATMQPGSYPERPGEPDCTYYLRTGLCRFGMSCRFNHPPDRNLAIASARMKGEYPERAGQPECQYYLKTGTCKFGPTCKFHHPREKAGIAGRVQLNTSGYPLRPNEKECAYYLKTGHCKYANTCKFHHPELFNVVPSSRGSPIYTSVHSSASAGPQSYTGTMPSWAFPRASFIPSPRWQSPSNYAPMIVPQGLVQMPSWNSYTGQLQSPGAQQTYGSSQQGEASTGNQGMLSPYRSSSFPVPQYALQRENVFPERPDEPECQYYMKTGDCKFGAVCKFHHPRVRSLPPPDCVLSPMGLPLRPGEELCKFYSRYGICKFGANCKFDHPTVVAPMVYA

SEQ ID NO: 9896 - protein, 301 aa, Zea mays
  Clone ID: TF_ZmC5498_1.pep
MDTGRKRTAPGGANGAGGPKRARESETTGVGSKSKPCTKFFSTVGCPFGLDCHFLHNFPGGYPAVSKMINLGGPPVPAPPGRMPMGPGGPDGPPSPAVKTRMCNKYNTAEGCKWGSKCHFAHGERELGKPLQMDNPMGPPPMGPGPNGHFMPPPMPFPDMVPPSTFGASATAKISVDASLAGAIIGKGGTNTKHISRVTGAKLAIRDNEADPNHKNIELEGTFDQIKHASAMVTELIVRISGKPPPQAKNNPGRGPGSHAGGPGSNFKTKLCENFNKGSCTFGDRCHFAHGEGELRKPAAA

SEQ ID NO: 9897 - protein, 408 aa, Zea mays
  unsure (1)..(408): unsure at all Xaa locations
  Clone ID: TF_ZmC493_2.pep
MDDAGRAPPPAPAAVTVSATAAPAPTPPSATVAADKSSLDPDALYEEGMWQQMAMNSGATMQPGSYPERPGEPDCTYYLRTGLCRFGMSCRFNHPPDRNLAIASARMKGEYPERVGQPECQXKAGIAGRVQLNTLGYPLRPNEKXECAYYLKTGQCKYANTCKFHHPELFNVVPSSRGSPIYTSVHSSASAGPQSYTGTMSSWTFPRASFIPSPRWQSPSNYAPMIVPHGLVQVPSWNSYPGQLQSPGAQQTYGSSQQGEASAGNQGMLSPYRSSSFPVPQYALQRDNVFPERPDEPECQYYMKTGDCKFGAVCKFHHPRVRSQPPPDCVLSPMGLPIRPGEELCKFYSRYGICKFGANCKFDHPTMAAPMGVYAYGFSGSASVAPASTNAPMTRHLLGSPSGSGYMS

SEQ ID NO: 9898 - protein, 166 aa, Zea mays
  Clone ID: TF_ZmC3518_1.pep
GGRLADEFSGLRLAEEHTTPPPLSPLPAAPVMPKSISVRSPGYLKMIQNGKHRASKPTKGSQRVLVGMEGGVKEEEKLNGGLQFEVYNQGMLKTELCNKWEETGTCPYGNQCQFAHGIAELRPVIRHPRYKTEVCRMVLAGVVCPYGHRCHFRHSITPADLFLPRP

SEQ ID NO: 9899 - protein, 88 aa, Zea mays
  Clone ID: TF_ZmC17484_2.pep
SHETRTCQFGSACEFYHPKDRCSGRGGVIDGTDYGHDFATKSRKPGRELAIYPERPDELECSHYMKHGYCKYKMNCKFHHPRDRLPKK

SEQ ID NO: 9900 - protein, 515 aa, Zea mays
  Clone ID: TF_ZmC292_5.pep
KKSYDACSPPTSTSNSAPATDITTHAGPGGFLPSLARAETLTVEEPTMSDPYNPYYRGAFPGGDGAPPPLPPYSDFDVDLVATRYTGTPRSHPSSGPVGAFESHLGARRFAEVLYQYHQSCMGSHSTVGQSETLYSSITMAKRPRLESSLPIYPQRPGQKDCAFYMSTGTCKYGETCKFDHPQWVPEGGVPNWKEVLNDEDSYPERPGEPDCPYLLSSRCKFKSKCKFNHPKEMVNALGTRTDNESLIADTAILPVRPSEPVCSFYAKTGKCKFGAVCKFNHPKLEDIKTPSLIAKETIYRATTDAAAHIGGTDDSVPAKTHAPIAPAEAHNAKGLPIRPGEVDCSFYMKTGSCKYGSICRFNHPDRSVVDIAFMAPVQATLPFPAPIVPAVALNPAANFLQSFDFHATHVPVEPMPMIYPQRPGEIVCDFYMKTGSCKYAQNCKFHHPIDRSAPHSKENEDTQQPVALTLAGLPRREDADACAFYMRSGTCGFGARCKFDHPPRQDDVLPDPDV

SEQ ID NO: 9901 - protein, 131 aa, Zea mays
  unsure (1)..(131): unsure at all Xaa locations
  Clone ID: TF_LIB3245-496-P1-K1-C3.pep
MGRPTRPPTRPRTRGQSKARESVAMSVSPTVGGXXYNAASANGVMVQKPSNWKTRICNKWEMTGYCPFGSKCHFAHGSTELHKYGGGLVDIDGRDILSTPDSKQAGGSAKAPLESAAASTALPPHADVYHL

SEQ ID NO: 9902 - protein, 450 aa, Zea mays
  Clone ID: TF_ZmC3751_1.pep
MEPYAAAKSGGADAGTGTGLEDSMRRLGLGDDGEAGEEKLPERPGEADCAYYLRTGACGYGERCRYNHPRDRPAPVNGVGKTAVTVEYPERPGQPLCEYYAKNGTCKFGSNCKFDHPRESGFVPVALNNSGFPLRLGEKECSYYMKTGHCKFGGTCKFHHPELGFLTETPGMYPPVQPSPISSPHPYPHHSNWQMGRPAVVPGSFLPGPYPPMMLPPTVMPMQGWNPYVSPMNQTTPAGGQQAVPAGPSYGLSHQEPTSAVTYGSHYAQLYSSGTSSSNIQEYVFPERPGQPECEHYMKTGTCKYGAACKYHHPQYFSGPKSNCILSPLGLPLRPGSQRCAYYAHHGYCKFGPTCKFDHPMGTPNYSISTSSLTDVPIAPYPQSFPVTPMPSYLPSSDLRPQYTQVKDSSANPPPSPGTTYGPVGSISKVYAPHTLIRSPASAAAGMQAS

SEQ ID NO: 9903 - protein, 143 aa, Zea mays
  unsure (1)..(143): unsure at all Xaa locations
  Clone ID: TF_ZmC1553_4.pep
AGHGGNRHGLKEVLAGDDERGCSRREALQSLDASLAGGIIDKGGVNTKQXTSVKLSIRDHESNHNLKNIELEGNFDQIKQASDLLRDLIATISASMPAKNPSSAVAPAGGGRGSGPGGTSSNYKTKLCENFLKLCENFQHDYV

SEQ ID NO: 9904 - protein, 122 aa, Zea mays
  Clone ID: TF_ZmC493_4.pep
DNVFPERPDEPECQYYMKTGDCKFGAVCKFHHPRVRSQPPPDCVLSPMGLPIRPGEELCKFYSRYGICKFGANCKFDHPTMAAPMGVYAYGFSGSASVAPASTNAPMTRHLLGSPSGSGYMS

SEQ ID NO: 9905 - protein, 263 aa, Zea mays
  unsure (1)..(263): unsure at all Xaa locations
  Clone ID: TF_ZmC214_2.pep
MDYTNAIHIIPPMASDARTNAAASPGEDPDIWATEKDYRQWSADQGYNDRNPSSRAGSEQPPPGKKAHGGGGSSDSGGGGSTSKSXAIGKMFFKTKLCCKFRAGTCPYVTNCNFAHGMEELCKPPPNWQEIVATHEDATTKQGEEHQIPIMTSRSVIAGDDGGGGRAYKGRHCKKFYTEEGCPYGDTCTFLHDEQSKARESVAISLLPTIGGGGYNAASASGSMAQNSSNWKTRICNKWEMTGYCPFGSKCHFAHGSTVIPNL

SEQ ID NO: 9906 - protein, 301 aa, Zea mays
  Clone ID: TF_ZmC5498_2.pep
MDTGRKRTAPEGANGAGGPKRARESETTGVGSKSKPCTKFFSTAGCPFGASCHFLHNFPGGYQAVSKMTNLGGPPVPAPPGRMPMGPGGPDGPPSPAVKTRMCNKYNTAEGCKWGSKCHFAHGERELGKPLQMDNPMGAPPMGPGPNGHFMPPPMPFPDMVPPSTFGASATAKISVDASLAGAIIGKSGINTKHISRVTGAKLAIRDNEADPNHKNIELEGTFDQIKHASAMVTELIVRISGKVPPQAKNNPGRGPGSHAGGPASNFKTKLCENFNKGSCTFGDRCHFAHGESELRKPAAA

SEQ ID NO: 9907 - protein, 443 aa, Zea mays
  Clone ID: TF_ZmC1969_1.pep
MAAPSGGGGGGAGEGSSSAAAAATIGVHGVDQVAEAMWQMNLEEAMELGPYPERVGEPDCSYYMRTGMCRFGMTCKFNHPADRKLAVAAARMKGEYPQRIGQPECQYYLKTGTCKFGATCKFHHPREKAAMATRVQLNELGYPLRPNEKECAYYLRTGQCKFGSTCKFHHSQPSTMMVAVRGSVYSPGQSATSPGQHAYQGAVTSWPLSRSASFIASPRWPGHSSYAQVIVPPGLVQVPGWSPYTAQIGSSSSEDQQRTPGAAQYYTGSRQSGTSIGDQGMFSSYQAGSVPVGLYAVQRENLFPERPDQPECQFYMKTGDCKFGAVCKFHHPRERIIPTPNCALSPLGLPLRPGEPICSFYNRYGMCKFGPNCKFDHPMGNAMYGQAPSPASEAPAPRRMLAHVPPSHPEASPDGGSGRSRRIAHSDSQQIPSGERSAEREAS

SEQ ID NO: 9908 - protein, 40 aa, Zea mays
  unsure (1)..(40): unsure at all Xaa locations
  Clone ID: TF_700570940H1.pep
DDFACKYGDKCQFAHSIHVVRSLSRHPKYXTELCRTFQST

SEQ ID NO: 9909 - protein, 123 aa, Zea mays
  unsure (1)..(123): unsure at all Xaa locations
  Clone ID: TF_LIB3959-023-Q1-N6-F11.pep
RKPRASNXXTNRSSRVYKGNGGDKRSEEPKEHRTAGGVELEVYNQGMLKTELCNKWEETGACPYGDQCQFAHGVAELRPVIRHPRYKTQVCRMVLAGEVCPYGHRCHFRHTLTPAERLHLPRP

SEQ ID NO: 9910 - protein, 206 aa, Zea mays
  unsure (1)..(206): unsure at all Xaa locations
  Clone ID: TF_LIB5116-061-A1-PF1-B7.pep
MDAAARKRSRPESANGGSAGGKRSRESESQQTGLSSKSKPCTKFFSTVGCPFGEGCHFAHFVPGGYQAVSKSHSLGHAAVSAASRAPADHAASGVKARMCTKYNTAEGCKFGDKCHFAHGERELGRPPSSYMSQESSXMXPPMGGRXGGRHEPPPPASMGPPAGNFGASSTCKVSVDAALAGGIIGKGGVNTKQICRITGVKLSIR

SEQ ID NO: 9911 - protein, 343 aa, Zea mays
  Clone ID: TF_ZmC214_1.pep
FPSLFSLLRRVRAGSKVGFGPQSSCLWGQRRRWTTPTPSTSSRTPRAPTPGPTRRRPRAPTPASGPPRTTTAIGKMFFKTKLCCKFRAGTCPYVTNCNFAHGMEELRKPPPNWQEIVAAHEEATEQREEHQIPIMTSGSVVAGDGGGGSGGGSQGGRAFKGRHCKKFYTEEGCPYGDTCTFLHDEQSKARESVAISLSPTVGGGGYNAASANGVMVQKPSNWKTRICNKWEMTGYCPFGSKCHFAHGSTELHKYGGGLVDIDGRDILSTPDSKQAGGSAKAPLESAAASTALPPHADVYHLGIQSQRSAIASQRSGQLQRPIQKWKGPDKISRIYGDWIDENE

SEQ ID NO: 9912 - protein, 359 aa, Zea mays
  Clone ID: TF_ZmC214_3.pep
MDYTNAIHIIPDAAGPDAWANAASAAGADASIWATEDDYRQWSAEPGYGDRNPSSRAGSEQPPPGKKARGGGGGSDSGGGGSTSKSRAIGKMFFKTKLCCKFRAGTCPYVTNCNFAHGMEELRKPPPNWQEIVAAHEEATEQREEHQIPIMTSGSVVAGDGGGGSGGGSQGGRAFKGRHCKKFYTEEGCPYGDTCTFLHDEQSKARESVAISLSPTVGGGGYNAASANGVMVQKPSNWKTRICNKWEMTGYCPFGSKCHFAHGSTELHKYGGGLVDIDGRDILSTPDSKQAGGSAKAPLESAAASTALPPHADVYHLGIQSQRSAIASQRSGQLQRPIQKWKGPDKISRIYGDWIDENE

SEQ ID NO: 9913 - protein, 338 aa, Zea mays
  Clone ID: TF_ZmC1969_2.pep
QYYLKTGTCKFGATCKFHHPREKAAMATRVQLNELGYPLRLNEKECAYYLRTGQCKFGSTCKFHHPQPSTMMVAVRGSVYSPGQSATSPGHHAYQGAVTSWPLSRSASFIASPRWPGHSSYAQVIVPPGLVQVPGWSPYAAQIGSSSSDDQQRTPGAAQYYTGSRQSGTPGIGDRGMFSSYQAGSVPVGLYAVQTENVFPERPDQPECQFYMKTGDCKFGSVCKFHHPRERIIPTPNCALSPLGLPLRPGEPICSFYNRYGMCKFGPNCKFHHPMGNPMYGHASSPTSEAQTSRRMLAHVPSHPEVSPDSGSGRSRRIVHSDSQQIPSVERITEREAS

SEQ ID NO: 9914 - protein, 200 aa, Zea mays
  Clone ID: TF_ZmC258661_1.pep
IRHEGTITDGNDVEDQEVHREKVGLSEGYPQKPGKLNCRFYMSTGRCSYGSSCHFNHPRLKAKLEVSSFPSEQRNHEAEFLELNRVGLPIREGARKCIYYMRNGTCRYGKKCCFNHPEQVLDVQHHTATGWDDTNLQSSPHSKKLPEHKTMDDISSGSEVLPPNILRMLLPPQNVPPSTKEKEIRIKKDPDWASASDDSD

SEQ ID NO: 9915 - protein, 208 aa, Zea mays
  Clone ID: TF_ZmC218_39.pep
MAEHLASIFGTEKDRVNCPFYFKIGACRHGDRCSRLHNRPTTSPTIVLANMYQRPDMITPGVDAQGVAIAPEKMQEHFEDFYEDIYEELSKFGEVETLNVCDNLADHMIGNVYVQFREEEQAVAAHNALQGRFYSGRPIIVEYSPVTDFREATCRQFEENSCNRGGYCNFMHVKQIGRELRRKLYGGRSRRSHGRSRSPSPQHRRDNP

SEQ ID NO: 9916 - protein, 307 aa, Zea mays
  Clone ID: TF_ZmC218_81.pep
MAEHLASIFGTEKDRVNCPFYFKIGACRHGDRCSRLHNRPTISPTLVLANMYQRPDMITPGVDAQGQPIDPEKMQEHFEDFYEDIYEELGKFGEIENLNVCDNLADHMIGNVYVQFREEEQAAAAYNALQGRFYSGRPIIVEYSPVTDFREATCRQFEENSCNRGGYCNFMHVKQIGRDLRRKLYGRSASRRYHGRSRSRSPPPQRRGHRDRDDYHHRDRDDYRGGGGGGRGRGSRYDRYDDGAGRGGRHDRYDDGAGRGGRHDRYDDGGRRRHGSPPRRARSPVRESSEERRAKIEQWNREREGKQ

SEQ ID NO: 9917 - protein, 307 aa, Zea mays
  Clone ID: TF_ZmC218_83.pep
MAEHLASIFGTEKDRVNCPFYFKIGACRHGDRCSRLHNRPTISPTLVLANMYQRPDMITPGVDAQGQPIDPEKMQEHFEDFYEDIYEELGKFGEIENLNVCDNLADHMIGNVYVQFREEEQAAAAYNALQGRFYSGRPIIVEYSPVTDFREATCRQFEENSCNRGGYCNFMHVKQIGRDLRRKLYGRSASRRYHGRSRSRSPPPQRRGHRDRDDYHHRDRDDYRGGGGGGRGRGSRYDRYDDGAGRGGRHARYDDGAGRGGRHDRYDDGGRRRHGSPSRRARSPVRESSEERRAKIEQWNREREGKQ

SEQ ID NO: 9918 - protein, 305 aa, Zea mays
  Clone ID: TF_ZmC218_85.pep
MAEHLASIFGTEKDRVNCPFYFKIGACRHGDRCSRLHNRPTISPTLVLANMYQRPDMITPGVDAQGQPIDPEKMQEHFEDFYEDIYEELGKFGEIENLNVCDNLADHMIGNVYVQFREEEQAAAAYNALQGRFYSGRPIIVEYSPVTDFREATCRQFEENSCNRGGYCNFMHVKQIGRDLRRKLYGRSASRRYHARSRSPPPQRRGYREDYHHRDRDEYRGGGGGGGGRGRGSRHDRYDDGAGRGGRHDRYDDGAGRGGRYERYDDGGRRRHGSPPRRGRSPVRESSEERRAKIEQWNRERESKQ

SEQ ID NO: 9919 - protein, 307 aa, Zea mays
  Clone ID: TF_ZmC218_87.pep
MAEHLASIFGTEKDRVNCPFYFKIGACRHGDRCSRLHNRPTISPTLVLANMYQRPDMITPGVDAQGQPIDPEKMQEHFEDFYEDIYEELGKFGEIENLNVCDNLADHMIGNVYVQFREEEQAAAAYNALQGRFYSGRPIIVEYSPVTDFREATCRQFEENSCNRGGYCNFMHVKQIGRDLRRKLYGRSASRRYHGRSRSRSPPPQRRGHRDRDDYHHRDRDDYRGGGGGGRGRGSRYDRYDDGAGRGGRHGRYDDGAGRGGRHDRYDDGGRRRHGSPSRRARSPVRESSEERRAKIEQWNREREGKQ

SEQ ID NO: 9920 - protein, 299 aa, Zea mays
  Clone ID: TF_ZmC218_93.pep
MAEHLASIFGTEKDRVNCPFYFKIGACRHGDRCSRLHNRPTISPTLVLANMYQRPDMITPGVDAQGQPIDPEKMQEHFEDFYEDIYEELGKFGEIENLNVCDNLADHMIGNVYVQFREEEQAAAAYNALQGRFYSGRPIIVEYSPVTDFREATCRQFEENSCNRGGYCNFMHVKQIGRDLRRKLYGRSASRRYHGRSRSRSPPPQRRGHRDRDDYRGGGGGGRGRGSRYDRYDDGAGRGGRHDRYDDGAGRGGRHDRYDDGGRRRHGSPPRRARSPVRESSEERRAKIEQWNREREGKQ

SEQ ID NO: 9921 - protein, 183 aa, Zea mays
  unsure (1)..(183): unsure at all Xaa locations
  Clone ID: TF_ZmC218_25.pep
MAEHLASIFGTEKDRVNCPFYFKIGACRHGDRCSRLHNRPTISPTLVLANMYQRPDITPGVDAQGQPIDPEKXRSRSPPPQRRGHRDRDDYHHRDRDDYRGGGGGGRGRGSRYDRYDDGAGRGGRHARYDDGAGRGGRHDRYDDGGRRRHGSPSRRARSPVRESSEERRAKIEQWNREREGKQ

SEQ ID NO: 9922 - protein, 287 aa, Zea mays
  unsure (1)..(287): unsure at all Xaa locations
  Clone ID: TF_ZmC1784_1.pep
MAEHLASIFGTEKDRVNCPFYFKIGACRHGDRCSRLHNKPSISPTLLLCNMYQRPDMITPGVDAQGNPIDPERIQEDFEDFYEDIFVELSKHGEIESLHVCDNLADHMIGNVYVEFREEEQAARALQALQGRYYSGRPIIAEFSPVTDFREATCRQFEEHSCNRGGYCNFMHVKQVGRDLRRKLFGHLHRSLRSHSRGSRSPSPYRRRGSSSRSRDRDDYPTTXYYYYRSGSGSRRSSERHRSHDSDGSRRRRGRSRSRSRSPVREGSEERRAKIEQWNREREAAQV

SEQ ID NO: 9923 - protein, 287 aa, Zea mays
  Clone ID: TF_ZmC1784_2.pep
MAEHLASIFGTEKDRVNCPFYFKIGACRHGDRCSRLHNKPSISPTLLLCNMYQRPDMITPGVDAQGNPIDPERIQEDFEDFYEDIFVELSKHGEIESLHVCDNLADHMIGNVYVEFREEEQAARALQALQGRYYSGRPIIAEFSPVTDFREATCRQFEEHSCNRGGYCNFMHVKQVGRDLRRKLFGHLHRSLRSHSRGSRSPSPYRRRGSSSRSRDRDDYHDYYYHYYRSGSGSRRSSERHRSHDSDGSRRRRGRSRSRSRSPVREGSEERRAKIEQWNREREAAQV

SEQ ID NO: 9924 - protein, 286 aa, Zea mays
  Clone ID: TF_ZmC1784_3.pep
MAEHLASIFGTEKDRVNCPFYFKIGACRHGDRCSRLHNKPSISPTLLLCNMYQRPDMITPGVDAQGNPIDPERIQEDFEDFYEDIFVELSKHGEIESLHVCDNLADHMIGNVYVEFREEEQAARALQALQGRYYSGRPIIAEFSPVTDFREATCRQFEEHSCNRGGYCNFMHVKQVGRDLRRKLFGHLHRSLRSHSRGSRSPSPYRRRGSSSRSRDRDDYHDYYYHYRSGSGSRRSSERHRSHDSDGSRRRRGRSRSRSRSPVREGSEERRAKIEQWNREREAAQV

SEQ ID NO: 9925 - protein, 284 aa, Zea mays
  Clone ID: TF_ZmC1784_4.pep
MAEHLASIFGTEKDRVNCPFYFKIGACRHGDRCSRLHNKPSISPTLLLCNMYQRPDMITPGVDAQGNPIDPERIQEDFEDFYEDIFVELSKHGEIESLHVCDNLADHMIGNVYVEFREEEQAARALQALQGRYYSGRPIIAEFSPVTDFREATCRQFEEHSCNRGGYCNFMHVKQVGRDLRRKLFGHLHRSLRSHSRGSRSPSPYRRRGSSSRSRDRDDYYYHYYRSGSGSRRSSERHRSHDSDGSRRRRGRSRSRSRSPVREGSEERRAKIEQWNREREAAQV

SEQ ID NO: 9926 - protein, 303 aa, Zea mays
  Clone ID: TF_ZmC17484_1.pep
KKDPDWASASDDSDGGCSAETADGPLCKQEHEDYPERPECPFLLRFGNCKFASSCQYYHPKDKFSSTYHPEDKFQSRYHQKEKSSRHHPKKEPALSGELMVYPDRPSEPDCPFYVKTGSCKFGANCKFHHPKDITPNMQGPASPKRSVAAKEHHAAARATLQDQMYQQQKFPERPGQPDCRYYMQFGKCKFQSACIFNHSKDILSSGWHPAECPFYMKTRTCQFGSACEFYHPKDRCSGRGGVIDGTDYGHDFATKSRNVLQELAIYPERPDELECSHYMKHGYCKYKMNCKFHHPRDRLPKK

SEQ ID NO: 9927 - protein, 319 aa, Zea mays
  Clone ID: TF_ZmC493_6.pep
MSCRFNHPPDRNLAIASARMKGEYPERAGQPECQYYLKTGTCKFGPTCKFHHPREKAGIAGRVQLNTSGYPLRPNEKECAYYLKTGHCKYANTCKFHHPELFNVVPSSRGSPIYTSVHSSASAGPQSYTGTMPSWAFPRASFIPSPRWQSPSNYAPMIVPQGLVQMQSWNSYTGQLQSPGAQQTYGSSQQGEASTGNQGMLSPYRPSSFPVPQYALQRENVFPERPDEPECQYYMKTGDCKFGAVCKFHHPRGEELCKFYSRYGICKFGANCKFDHPTVVAPMVYAYGFSASASPASASTNVPMARRLLGSPPGSGYTS

SEQ ID NO: 9928 - protein, 235 aa, Zea mays
  unsure (1)..(235): unsure at all Xaa locations
  Clone ID: TF_ZmC491307_1.pep
MAEHLASIFGTEKDRVNCPFYFKIGACRHGDRCSRIHNRPTISPTIVLMNMYQRPDMITPGVDAQGQPIDPRKMQEHFEDFYEDIFEELSKFGEIETLNVCDNLSDHMIGNVYVQFREEDQAAAAHTALQGRFYSGRLIIVDFSPVTDFREATCRQYEENTCTRGGHCNFMHVKQIGKDLRKKLFGRYRRSQRGRSRSPSPHHXRERHDRDDYRGRDDFRRGGGGGGGGREGWEQ

SEQ ID NO: 9929 - protein, 235 aa, Zea mays
  Clone ID: TF_ZmC11235_3.pep
MEPPHAEQAVAAVAAGGEGGTASPGTGLEGPVLRRGLDGGGEGEDGELGAGQEADARLPERPGEADCGYYLRTGACGFGERCRYNHPRDRGGTEFGGGTKNGAAQDFPERQGQPVCEYYLKTGTCKFGSNCKYHHPKQDGSVQSVILNNNGFPLRLGEKECSYYMKTGQCKFGSTCKFHHPEFGGIPVTPGIYPPLQSPSVPSPHTYAPNWQMGRSPAVPGSYIPGSYTPMMISS

SEQ ID NO: 9930 - protein, 548 aa, Zea mays
  Clone ID: TF_ZmC4916_435.pep
MDTHRPPHFDGTNFPYYSARMACYLEAIDLGVWRVTRDGMKPLKNPEKPTTSEEKEIHLNARAKNCLYESLSMDIFNQVFTLKTANEIWLKLHELHDGTSNVREQKHCLVLNEYNSFAMKDDELVRYMYSRLNLIINELNSIGINKLGDADIVRKIISLLPQQRYGSIITILHNMEDLSNMTPTIVEDLLFNIDRKKQRKRGCFACGEKGHFRDNCPNMVKPKKERSKGKALTSVRTWNDSSSEDEPPRTRSHRSSSRSSRSSHKCLMARGNKSIPSSSDESSSDDEGEGKPSVDELAEAVEFFQDVCTKQKAQLKTLKNKLVSSQNDYKGLLEKFETFANLNSELSTKIELLECSAPSTATDDSLIKKNEKLKAKLASSQEAIENLLEKMEILSIHNNELTTKLENIGSTPAASLVEIPEIIKKDASTSCFDLIDDSNPCNQVVVENIVVETCSDEVAKENEQLKQEVARLGKALYDKKGKAKQIRPPQDNTIAGVNKPVEGETVICRLCNMEGHKSFQCKAMTGDKQRQKLKQKPSSKISTPTSKR

SEQ ID NO: 9931 - protein, 92 aa, Zea mays
  Clone ID: TF_LIB3245-047-P1-N1-A3.pep
GFLVLNCPMGKRKKPCLVCGLFGHNAKQCKQVDCFICKKGGHMAKDCPDKHKRNDHQSTLCIRCGETGHDMFGCANDYPPDDIEQIRCYACN

SEQ ID NO: 9932 - protein, 446 aa, Zea mays
  Clone ID: TF_ZmC11229_1.pep
FNFHSARSRNLEVLGRRNVPVDLVYKFAPDLIMLDAYETVESWMMARNRLNPGKLIPAMMRYVSEPHAKNETHEVIKYLEFCVKDLNNVDPGVHNLLLSLYAKKEDESQLLQFLDTKFGKGQTNGPDFFYDPKYALRLCLQEKRMRACVRIYSMMSMHAEAVALALKVDLELAKAEADKVEDDEELRKKLWLKVAKHVIEQEKGVKRENIKKAIEFLSETNNLLKIEDILPFFPDFVLIDDFKEEICKSLKDYNSQIEQLKQEMDDATRGADNIRSDIGALAQRYTVIDREQDCGVCRRKILTVGGLHQVGRSYTSVGHMAPFYVFPCGHAFHANCLIGHVTRCSNQVQAERILDLQKRLSLMDRKAAKDNGASVNGEPITSTTPVDKLRSQLDDAVASECPFCGDLMIKEISQPFILPQESDEKASWEIKPQPTPQKILPMTMSI

SEQ ID NO: 9933 - protein, 1292 aa, Zea mays
  Clone ID: TF_ZM3615.C3.o3.fg.pep
MSTQRDHVDPILEDIPVTSSGEEVDPKVLDLAMKIAERMFLKMKEEDAKKKAEEEESRRKAEEDKCKGKFDYNDDLVDLLVSKVLSKVCISPPKEKSPEMMQEVHRNAQAVSIIKGSLCSEEYRKVQGREDARDIWNILKMSHEGDPKAKRHRVEAFESELARYDWIKGESLQSLFDRLMVLVNKIRVLGSEDWSDSKVTRLFMRAYKEKDKSLARMIRDRDDYEDMTPHQLFAKIQQHESEEAPIKTRDSHALITNEQDTPKKNKDHKAKKVVETSSDEDSSSDEDTTMFIKTFKKFVRKNDKFQRKGKKRACYECGQTGHFIADCPNKKEQEAKKEYKKDKFKKGGKTKGHFKKKKYGQAQIGEEWNSDEESSSSEEEEVVANVAIQSTSSSQLFTNLQDDYYTPTCLMAKGDKDALESSILSLNVQNQELQLQLENCKNINASSLLIESKSSSSNNTFCKHCAKCHASCCLTNHARKKSPQVKVKEILKRCSSNDGLKKIEPKYKSLKPNNGRRGLGFNSSKENPSTVHKGWRSPKFIEGTTLYDALGRIHSSNDKSTQVKVYSSGGSSWVLDSGCTNHMTGEEDMFHSLQLTQEAQEIVFGDSGKSKILRREDSSVAFTGRLKGKLYLVDFTTSRVTPETCLVAKSDRGWLWRRRLAHVGMRNLAKLQKDGHIIGLTNVVFEKDRVCGACQVGKQHGVPHQSKNVVTTKKPLELLHMDLFGPMAYISIGGSKYGLVIVDDFSRFTWVFFLSDKGETQETLKKFMRRAQNEFEVKIKKVRSDNGTEFKNTGVEEFLGEEGIKHEFSVPYTLQQNGVVERKNRTLIEAARTMLDEYKTPDNFWAEAVNTTCHAINRLYLHKIYKKTAYELLTGNKPKIDYFRVFDCKCFILNKKVKSSKFAPRVDEGFLLGYASNAHEYRVFNNTTGLVEIAIDVTFDESNGSQGHVSNGTAGNEEPPCEAIKRLAIGEVRPQEKDDDEGTLWMTNEVFDVGAKVVGDKSSTQANPSTSSHPNLEENHQPQRMPTVVEDEHESIDGVVALDQVDDEEEQIQRQPSVPHPRVHHTIQRDHPVDNILGSIRRGVTTRSRLANFCEFYSFVSSLEPLKVEEALGDPDWIIAMQEELNNFTRNEVWSLVPRPKQNVIGTKWVFWNKQDEHGVVTRNKARLVAQGYAQVEGLDFGETYAPVARLESIRILIAYATNHDFKLYQMDVKSAFLNGPLQERVYVEQPPGFEDPRKPNHVYLLHKALYGLKQAPRAWYDCLKDFLIKNGFTIVSGTIIRGTLKTPNLSW

SEQ ID NO: 9934 - protein, 1276 aa, Zea mays
  Clone ID: TF_ZM3973.C7.o2.fg.pep
MSTQRDHVDPLLEEIPVTSSGEEVDPKVLDLAMKIAEKMFLKMKEEDARKKAEEEESRRKAEEDKCKGTFDYNDDLVDLLVSKVLSKVSLNTKGSSTKSRGNDFSKVQFDYSRNYIPNFSSAPLGKLPTLSELNYEEWADKMKSHLIGVHPSLWEIVHVGMYKPAQGEEMTPKMMQEVHRNAQAVSIIKGSLCPEEYRKVQGREDARDIWNILRMSHEGDPKAKRHRVEALESELARYDWTKGESLQSLFDRLMVLVNKIRVLGSEDWSDSKVTRLFMRAYKEKDKSLARMIRDRDDYEDMTPHQLFAKIQQHESEEAPIKTRDSHALITNEQDNLKKSKDHNAKKVVETSSDEDSSSDEDTAMFIKTFKKFVRKNDKFQRKGKKRACYECGQTGHFIADCPNKKEQEAKKEYKKDKFKRGGKTKGYFKKKKYGQAHIGEEWNSDDESSSSEEEEVVANVAIQSTSSAQLFTNLQDDSYTPTCLMAKGDKVTLFSNDFSNDDDDDQIAMKNKMIKEFGLNGYNVITKLMEKLDKRKATLDAQEDLLVLEKERNLELQELIHNKDKEVINMKTSIDNLANEKNALESSMLSLNIQNQELQVQLENCKNINASCLVLESKSRLNDNSCKHCAKYHASCCLTNHARKNSPQVKVKEIFKRCSSNDGLKKVEPKYKSLKPNNGRRGLGFNSSKENPSTVHKGWRSPKFIEGTTLYDALGRIHSSNDKSPQVYSSGGSSWVLDSGCTNHMTGEKDMFHTLQLTQEAQEIVFGDSGKSKVIGIGKIPISDQQSLSNVLLVDSLSYNLLSVSQLCGMGYNCLFSDVDVKILRREDSSVAFTGRLKGKLYLVDFTTSKVTPETCLVAKSDKGWLWHRRLAHVGMRNLAKLQKDNHIIGLTNVVFEKDRVCGACQAGKQHGVPHQSKNVVTTKRPLELLHMDLFGHVAYISIGGSKYGLVIVDDFSRFTWVFFLSDKGETQEILKKFMRRAQNEFELKIKKVRSDNGTEFKNTGVEEFLGEEGIKHEFSVPYTPQQNGVVERKNRTLIEAARTMLDEYKTPDNFWAEAVNTACHAINRLYLHKIYKKTAYELLTGNKPKVDYFRVFGCKCFILNKKVKSSKFASRVDEGFLLGYASNAHGYRVFNNSTGLVEIAIDVTFDESNGSQGHVSNDTAGNEELPCDAIKKLAIGEVRPQERDDEEGTLWMTNEVVDVGARVVSDNVSTQANPSTSSHPSLEQNHQRMPTVVEDEQENIDGEVPLDQITDEEEQIQRHPSVPHPRVHHTI

SEQ ID NO: 9935 - protein, 1503 aa, Zea mays
  unsure (1)..(1503): unsure at all Xaa locations
  Clone ID: TF_ZM4272.C4.o2.fg.pep
MSTQRDHVDPLLEEIPITSSGEEVDPKFLDLAMKIAEKMFLKMKEEDANKKVLSKVSLNTEGSSTKSKGNEFSKVQFDYSRNFIPNFSSAPLGKLPTLSELNYDEWADKMKSHLIDVHPSLWEIVNVGMYKPAQGEEMTPEMMQEVHRNAQAVSIIKGSLCPEEYRKVQGREDARDIWNILKMSHEGDPKAKRHRVEALESELARYDWTKGEPLQSLFDRLMVLVNKIRVLGSEDWSDSKVTRLFMRAYKEKDKSLAWMIRDRDDYEDMTSHQLFAKIQQHEFKEAPIKTRDSHTLITNEQDTPKKNKDHKAKKVKFVRKNDKFQRKGKKRACYECGQTGHFIADCPNKKEQEAKKEYKKDKFKKGGKTKGYFKKKKYGQAHIGEEWNSDEESSSSEEEEVVANVAIQSTSSSQLFTNLQDDSYTPTCLMAKGDKVTLFSNDFPNDDDDEQIAMKNKMIKEFGLNGYNVITKLMEKLDKRKATLDAQEDLLILEKERNLELQELLLNKDEMLDVLTKEDALESSMLSLNVQNKELQVQLENCKNINASSLVIESKSSSSNNTFCKHCAKYHASCCLTNHARKNSPQVKVKEILKRCFSNDGLKKVEPKYKSLKPNNGRRGLGFNSSKENPSTVHKGWRSPKFIEGTTLYDALGRIHSSNDKSTQVKVYSSGGSSWVLDSGCTNHMTGEEDMFHSLQLTQEAQEIVFGDSGKSKMIGIGKIPISDQQSLSNILLVDSLSYNLMSVSQLCGMGYNCLFFDVDVKILRREDSSVAFTGRLKGKLYLVDFTTSKVTPETCLVAKSDKGWLWHRRLAHVGMRILAKLQKDNHIIGLTNVVFEKDRVCGACQAGKQHGVPHQSKNVVTTKRPLELLHMDLFGPVAYISIGGSETQEILKKFMRRAQNEFELKIKQVRSDNGTEFKNTGVEEFLGEEGIKHEFSVPYTPQQNGVVERKNRTLIEAARTMLDEYKTPDNFWAEAVNTACHAINRLYLHKIYKKTAYELLTGNKPKVDYFRVFGCKCFILNKKVKSSKFAPRVDEGFLLGYASNAHGYRVFNNTTGLVEIAIDVTFDESNGSQGHVSNGTAGNEELPCEAIKKLAIGEVRPQEKDDEEGTLWMTNEVVDVGAKVVGDKSSTQANPSTSTHPSLEENHQSQRMPTVVEDEHESVNGEVPLDQVNDEEEQIQRQASVPHPRVHHTIQRDHSVDNILGSIRRGVTTRSCLANFCEFYSFVSSLEPLKVEEALGDPDWIIAMQEELNNFTRNEVWSLVQRPKQNVIGTKWVFRNKQDEHGVVTRNKARLVAQGYTQVEGLDFGETYALVARLESIRILIAYATNHDFKLYQMDVKSAFLNGPLQERVYVEQPPGFEDPKKPNHVYLLHKALYGLKQAPRAXLKYFLGFQVKQLKEGTFLCQTKYTQXFGMEKAKHAKTPMSSNGHLDLNEEDYAGCKVDRKSTTGTCQFLGRSLVSWSSKKQNCVALSTAEAEYIAAGACCAQLLWMKQNLRDFGC

SEQ ID NO: 9936 - protein, 1569 aa, Zea mays
  Clone ID: TF_ZM4333.C6.o1.fg.pep
MSTQRDHVDPLLEEIPVTSSGEEVDPKVLDLAMKIAERMFLKMKEEDAKKKAEEEESRRKAEEDKGKGTFDYNDDLVDLLVSKVLSKVSLNTEGSSTKSKGNEFSKVQFDYSRNYIPNFSSAPLGKLPTLSELNYDEWADKMKSHLIGVHPSLWEIVNVGMYKPAQGEEMTPEMMQEVHRNAQAVSIIKGSLCPEEYRKVQGREDARDIWNILKMSHEGDPKAKRHRVEALESELARYDWTKGESLQSLFDQLMVLVNKIRVLGSEDWSDSKVTRLFMRAYKEKDKSLARMIRDRDDYEDMTPHQLFAKIQQHESEEAPIKIRDSHALITNEQYNPKKNKDHKAKKVVETSSDEDSSSDEDTTMFIKTFKKFVRKNDKFQRKGKKRACYECGQTGHFIADCPNKKEQEAKKEYKKDKFKKGGKTKGYFKKKKYGQAHIGEEWNSDEESSSSEEEEVVANVAIQSTSSAQLFTNLQDDSYTPTCLMAKGDKNVITKLMEKLDKRKATLDAQEDLLILEKERNLELQELIHNKDEMLDVLTKEVSLVKITIENKDKEVINMKTSIANLANEKNALETSMLSLNVQNQELQVQLENCKNINASSLVIESKSSSSNDNSCKHCAKYHASCCLTNHARKNSPQVKVKGILKRCSSNDGLKKVEPKYKSLKPNNGRRGLGFNSSKENPSTVHKGWRSPKFIEGTTLYDALGRIHSSNDKSPQVKVYSSGGSSWVLDSGCTNHMTGEEDMFHSLQLTQEAQEIVFGDSGKSKVIGIGKIPISDQQSLSNVLLVDSLSYNLLSVSQLCGMGYNCLFSDVDVKILRREDSSVAFTGRLKGKLYLVDFTTSKVTPETCLVAKSDKGWLWHRRLAHVGMRNLAKLQKDNHIIGLTNVVFEKDRVCGACQAGKQHGVPHQSKNVVTTKRPLELLHMDLFGPVAYISIGGSKYGLVIVDDFSRFTWVFFLSDKGETQGILKKFMRRAQNEFELKIKKVRSDNGTEFKNTGVEEFLGEEGIKHEFSVPYTPQQNGVVERKNRTLIEAARTMLDEYKTPHNFWAEAVNTACLAINRLYLHKIYKKTAYELLTGNKPKVDYFRVFGCKCFILNKKVKSSKFAPRVDEGFLLGYASNAHGYRVFNNTTGLVEIAIDVTFDESNGSQGHVSNDTAGNEELPCEAIKKLAIGEVRPQEKDDEEGTFWMINEVVDVGAKVVSDKVSTQANPSTSSHPSHEENHQRMPTVVEDEHESIDGEVPLDQVNDEEEQIQRQPSVPHPRVHHTIQRDHLVDNILGSIRRGVTTRSRLANFCEFYSFVSSLEPLKVEEALGDPYWIIAMQEELNNFTRNEVWSLVQKPKQNVIGTKWVFRNKQDEHGMVTRNKARLVAQGYTQVEGLDFGETYAPVARLESIRILIAYATNHDFKLYQMDVKSAFLNGPLQERVYVEQPPGFEDPKKPNHVYLLHKALYGLKQAPRAWYDCLKDFLIKNGFTIGKADSTLFTRKVDNELFVCQIYVDDIIFGSTNENFCEEFSKVMTNRFGMSMMGELKYFLGFQVKQLKEGTFLCQTKYTQDMLKKFGMEKAKHA

SEQ ID NO: 9937 - protein, 436 aa, Zea mays
  unsure (1)..(436): unsure at all Xaa locations
  Clone ID: TF_ZM4642.C3.o3.fg.pep
VDPLLEEIPVTSSGEEVDPKVLDRXLAMKIAERMFLKMKEEDAKKKAEEEESRRKAEEDKGKGTFDYNDDLVDLLVSKVLSKVSLNTKGSSTKSKGNDFSKVQFDYSRNYIPNFSSAPLGKLPTLSELNYDEWVDKMKSHLIGVHPSLWEIVNVGMYKPAQGEEMTPEMMQEVHRNAQAVSIIKGSLCPEEYRKVQGREDACDIWNILKMSHEGDPKAKRHRVEALESELARYDWTKGESLQSLFDRLMVLVNKIRVLGSEDWSDSKVTRLFMRAYKEKDKSLARMIRDRDDYEDMTPHQLFAKIQQHESEEAPIKTRDSHALITNEQDNLKKSKDHKAKKVVETSSDEDSSSDEDTAMFIKTFKKFVRKNDKFQRKGKKRACYECGQTGHFIADCPNKKEQEAKKEYKNDKFKKGGKTKGYFKKKKYGQAHIGEE

SEQ ID NO: 9938 - protein, 1929 aa, Zea mays
  Clone ID: TF_ZM4678.C6.o7.fg.pep
MSTQRDHVDPILEDIPVTSSGEEVDPKVLDLAMKIAERMFLKMKEEDAKKKAEEEESRRKAEEDKGKGKFDYNDDLVDFLVSKVLSKVSLNTEESSTKSKGNEFSKVQFDYSRNFIPNFSSAPLGKLPTLSELNYDEWADKMKSHLIGVHPSLWEIVNVGMYKPAQGEEMTPEMMQEVHRNAQAVSIIKGSLCPEEYRKVQGRDDARDIWNILKMSHEGDPKAKRHRVEALESELARYDWIKGESLQSLFDRLMVLVNKIRVLGSEDWSDSKVTRLFMRAYKEKDKSLARMIRDRDDYEDMTPHQLFAKIQQHESEEAPIKSRDSHALITNEQDNPKKNKDHKAKKVVETSSDEDSSSDEDTTMFIKTFKKFVSKNDKFQRKGKKRACYECGQTGHFIADCPNKKEQEAKKEYKKDKFKKGGKTKGHFKKKKYGQAHIGEEWNSDEESSSSEEEEVEFGLNGYNVIIKLMEKLDKRKATLDAQEDLLILEKERNLELQGLLLNKDEMLDALTKEVSLVKITIEDKEKEVINMKTSIASLANEKDALESSILSLNVHNQELQVQLENCKNIKASSLLIESKSISSNNTFCKHCAKYHASCCLTNHARKKSPQVKVKEILKRCSSNDGLKKIEPKYKSLKPNNGRRGLGFNSSKENPSIVHKGWRSPKFIEGTTLYDALGRIHSSNDKSPQVYSSGGSSWVLDSGCTNHMTGEKDMFHTLQLTQEAQEIVFGDSGKSKVIGIGKIPISDQQSLSNVLLVDSLSYNLLSVSQLCGMGYNCLFSDVDVKILRREDSSVAFTGRLKGKLYLVDFTTSKVTPETCLVAKSDNGWLWHRRLAHVGMRNLAKLQKDNHIIGLTNVVFEKDRVCGACQAGKQHGVPHQSKNVVTTKRPLELLHMDLFGPVAYISIGGSKYGLVIVDDFSRFTWVFFLSDKGENQEILKKFMRRAQNEFELKIKKVRSDNGTEFKNTGVEEFLGEEGIKHEFSVPYTPQQNGVVERKNRTLIEAARTMLDEYKTPDNFWAEAVNTACHAINRLYLHKIYKKTAYELLTGNKPKVDYFRVFGCKCFILNKKVKSSKFAPRVDEGFLLGYASNAHGYRVFNNTTGLVEIAIDVTFDESNGSQGHVSNDTAGNEEPPCEAIKKLAIGEVRPQERDFEEGTLWMTNEIVDVGARVVSDKVSTQANPSTSSHPSHEENHQRMPTVVEDEQESTDGEVPLDQVIDEEEQIQRHPSMPHPRVHQSIQRDHPVDNILGSIRRGPLKVEEALGDPDWIIAMQEELNNFTRNEVWSLVQRPKQNVIGTKWVFRNKQDEHGVVTRNKARLVAQGYTQVEGLDFGETYAPVARLESIRILIAYATNHDFKLYQMDVKSAFLNGPLQERVYVEQPPGFEDQKKPNHVYLLHKALYGLKQAPRAWYDCLKEFLIKNGFTIGKADSTLFTRKVDNELFVCQVYVDDIIFGSTNEKFCEEFSKVMTNRFEMSMMGELKYFLGFQVKQLKEGTFLCQTKYTQDMLKKFGMEKAKHAKTPMSSNGHLDLNEEEAEYIAAGACCAQLLWMKQTLRDFGCLSPAIFSVAQHLFDRSQQLCMQKLFPLSRMTVLPKGGNQMNVLGESRVFFLLLAPNSLARINVFDMIWEEIVRASWSPLKGCVHAPFIMKMIEVVTQTHFEKPVKHSRYVPYWVDSSNPAARTKRAPSRSGGPASSTEPPRQPPHHPSSSPPAAASRPSPGRGSPMPRARGRGRGRGRGMGARLVHGVATFFSMCRNISADVHEVARRQRETDDNLRCQASSMGMPFVPRSPDVPLHPPPPEINEWHQQAYGVPFMSADDEDEEVYVDDREEFAPPPYHGDPGQSSSHPPPPYPGPGPIPGDPRPSGSGYHHHPPPSPDHRTSSASVFSAADEPPRDSTFEEDAMRTFFPDYTSYPPSYPPSYPPPGGY

SEQ ID NO: 9939 - protein, 702 aa, Zea mays
  unsure (1)..(702): unsure at all Xaa locations
  Clone ID: TF_ZM4938.C1.o1.fg.pep
MDTHRPPHFDGTNFPYYSARMACYLEAVDLGVWRVTRDGMKPLKNPEKPTTSEEKEIHLNARAKNCLYESLSMDIFNQVFTLKTANEIWLKLHELHDGTSNVREQKHCLVLNEYNSFAMKDDELVRDMYSRLNLIINELNSIGINKLGDADIVRKIISLLPQQRYGSIITILHNMEDLSNMTPTIVIGKIAAFEMSRKMSQGEEPTSSKPYAFACDERKGKKKAPTPSSSSEEEEEEESDDDEDNQPCTSXRGRRNNSMRRKGXRMIRKINLMGCFTCGEKGHFRDNCPNMAKPKKVRSKGKALTSVTTWDDSSSNKSIPSSSDESSSDDEGEGKPSVDELAEAIEFFQDVCTKKKAQLKTLKNKLVSSQNDYKSLLEKFETFANLNSELSTKIELLESSASSTATDDSLIKKNEKLKAKLASSQEAIENLLEKMEILSIHNNELTTKLENIGSTPAASLVEIPEIIKKDASTSCFDLIDDSNPCNQVVVENIVVETCTDEVAKENEQLKQEVARLGKALYDKKGKAKQIQPPQDNTTAGVNKPVEGETVICRLCHMEGHKSFQCKAMTGDKQRQKLKPSSKISNTYIKKVNKKDATPYLIKKKKNGKVIAIQANKQANKGKGAKRIWVPKEIISTMKSTKKVWIPKGKRVDRRSSGNLETWQSWDVYHGVHHIGLSLLPSGLVKTLDPNFPPMTKIYVSII

SEQ ID NO: 9940 - protein, 413 aa, Zea mays
  Clone ID: TF_ZmC119_1158.pep
MNPPNPPPGGVDPLIAAQMRMMQQMADTMADMRAQMQQERQEMRQEREDARREMHQEREEIRQERRVQQQQLQQQLQQQQQQQQVPLPPPPPPVPPRDKHREFMSHKPPTFSNSTDPLQADDWLKSIEKMLNIAQCSDREKVLYASGRLAGPAADWWDAYCAAHAAVDTITWAEFSTQFRNYHIPAGLMKIKRKEFLSLKQGSMSVSEYRDKFIQLSRYAPRDVEDDEQKQELFLDGLIGPLQYQLVSHTFPSFQRLLDKAIVVENKRSIFGEKRKAANQGQAGSSSRPRYTTTPSTPASGSSGQQTQQAPTAPPKASTSAGPVASNTSTNRACFKCGQPGHYANYCPNRAAYTTPAPMKQGQASAGKSQPISVNRGQAYHAEVETEPGELEIQEEEPVEEEIVGEEVNEQQE

SEQ ID NO: 9941 - protein, 189 aa, Zea mays
  Clone ID: TF_ZmC483969_1.pep
PTYCDDLLAMPCSSTIDYYYSSLSCETNLLKENNKLKNKVKNLSNMFERWHKSEVTHDLIMKNQRRYDDKSGLGFNKSNIKGGQFKLKGNKIFHFMCYKCHEMGHLAKACPNKRKLKLKKEEWRLKHDQCFKCHTWGHLTSMCPTKKLVNPQVKPQPKSRVEQKKNPQKQIKINHEYNGDVGKPRRERI

SEQ ID NO: 9942 - protein, 1316 aa, Zea mays
  Clone ID: TF_ZmC4916_441.pep
MDPKGKGMVVDNNEKESIFNEPKNDKSTDLGSSHKRKDGKKKKTRRIKEIVYYDSDESSSSQKDDDNDYRKTVNSNFSFDYSRIPHSSNSHLLSIPLGKPPHFDGEDYGFWSHKMRSHLFSLHPSIWEIVENGMKFDSSDSPMFINEQIHKNAQATTVLLASLCRDEYNKVSGLDNAKQIWDTLKISHEGNDITMLTKMELVEGELGRFAMIRGEEPTQTYNRLKTLINKIRSYGSTRWTDHDVVRLLLRSFTILDPHLVNNIRENPRYIKMSPEEVLGKFVSGRMMIKEARYVDDALNGPTNEPQPLALKATRSKEALPSKVAQIEATGLNDEEMALIIKRFKSVLKGHKGQPSKTKTKGKRSCFKCGKIGHFIANCPENESDQEHGSKREKKKNYKKAKGEAHLGKEWDSDCSSSDSDNEGLAATAFNKSSLFPNERHTCLMAKEKKVCTRDGTTYDSSSDDESSDEEIDYSSLFKGLDRNKIDKINELIDALNEKDKLLEKQEDLLYEEHDKFVEAQRSHALEVKRNEMLSCELSSCHETISKFRSINDDMNAKLEIANKSNSCEEHVAICTRCKDFDINACSEHLVSISKLNDELASLNAQLKTSKNEFDKLKFARDAYTIGRHPSIKDGLGNKREAKNLTSHKAPISAKEKGKAPMASSVQKNHAFMYHDRRQPRNAYRSCNAYNVFDSHDMVASSSSYMHDRNVGRRNVIHNMPRKNVVNVPRKVNGPSTIYCALNASFAICRKDRKIVARKLGAKCKGDKTCIWVPKDICTNLVGPNKSWVYASGGSSWIIDSGCTNHMTGEKKMFTSYVKNKDSQDSIIFGDGNQGKDKSETQGTLKRFLRRAQNEFELNVKKIRSDNGSEFKNLQVEEFLEEEGIKHEFSAPYTPQQNGVVERKNRTSTGWLYQMDVKSAFLNGPIKEEVYVEQPPGFEDERYPDHVCKLSKALYGLKQAPRAWYECLRDFLIANTFKVGKADPTLFTKTCDGDLFVCQIYVDDIIFGSTNQKSCEEFSRVMTQKFEMSMMGELNYFLGFQAKQLKDGTFISQTKYTQDLLKRFGMKDAKPAKTPMGTDGHTDLNKGGKSIDQKAYRSMIGSLLYLCASRPDIMLSVCMCARFQSDPKECHLVAVKRILRYLVATPCFGLWYPKGSTFDLVGYSDSNYAGCKVDRKSTSGTCQFLGRSLVSWNSKKQISVALSTAEAEYVAAGQCCAQLLWMRQTLRDFGYNLSKVPLLCDNESAIRMAENPVEHSRTKHIDIRHHFLRDHQQKGDIEVFHVSTENQLADIFTKPLDEKTFCRLRSELNVLDSRNLD

SEQ ID NO: 9943 - protein, 1813 aa, Zea mays
  Clone ID: TF_ZmC4916_445.pep
MDPKGKGMVINDKEKETFVNELNNDKPTDSGSGHKRKDGRKKKTRRIKEIVYYDSDESSSSQKDDDNDYRKTVNSNFSFDYSRIPPSSNSHLLSLPLGKPPHFDGEDYGFWSHKMRSHLFSLHPSIWEIVENGMKFDSSDSPMFINEQIHKNAQATTVLLASLCRDEYNKVSGLDNTKQIWDILKISHEGIDITMLTKMELVEGELARFAMIRGEDPTQPYNWLKTLINKIRSYGSTRWTAHDVVHLLLRSFTILDPHLVNNIRENLRYTKMSPEEVLGKFVSGRMMIKEARYVDDALNGPINEPQPLALKATRSKEALPSKVAQIEAAGLNDEEMALIIKRFKSVLKGHKGQPSKTKTKGKRSCFKCGKIGHFIANCPENESDQEHGSKREKKKNYKKAKGEAHLGKEWDSDCSSSDSDNEGLAAIAFNKSSLFPNERHTCLMAKEKKVCTRDGTTYDSSSDDESSDDDEIDYSCLFKGLDRNKIDKINELIDALNEKDKLVEKQEDLLYEEHDKFVEAQRSHALEVKRNEMLSRELSSCHETISKLRSINDDMNAKLEIASKSTSCVENAITCTRCKDINLDAYSEHLACISKLNEEVASLNAQLKTSKSDFEKLKFARDAYTVGRHPSIKDGLGFKREAKNLTSHKTPIPAKEKGKAPMASSVQKNHAFMYHDRRQTRNAYRNYNAYDDFDSHAMFASSSSYMHGRNMSRRNATHHVPRKNIIHAPRKVVNEHSTIYCALNASFAICRKDRKIVARKLGAKCKGDKTCIWVPKDICTNLVGPNMSWVYASGGSSWIIDSGCTNHMTGEKKMFTSYVKNKDSQDSIIFGDGNQGKVKGLDVSVFRRSDGSLAFKGVLDGKLYLVDFAKEEAGLDACLIAKTSMGWLWHRRLAHVGMKNLHKLLKGEHVIGLTNVQFEKDRPCAACQAGKQVGGAHHSKNVMTTSRPLELLHMDLFGPVAYLSIGGSKYGLVIVDDFSRFTWVFFLQDKSETQGTLKRFLRRAQNEFELKVKKIRSDNGSEFKNLQVEEFLEEEGIKHEFSAPYTPQQNGVVERKNMTLIDMARTMLGEFKTPERFWSEAVNTACHAINRVYLHRLLKKTSYELLTSNKPNVSYFRVFGSKCYILVKKGRNSKFAPKAVEGFLLGYDSNTKAYRVFNKSSGLVEISSDVVFDETNSSPREQVVDCDDVDEEDVPTAAIRTMAIGEVRPQEQDERDQPSSSTMVHPPTQDDEQVHQQEAGDQGGAQDDHVMEEEAQPAPPTQVRAMIQRDHPVDQILGDISKGVTTRSRLVNFCEHYSFVSSIEPFRVEEALLDPDWVLAMQEELNNFKRNEVWTLVPRPKQNVVGTKWVFRNKQDEHGVVTRNKARLVAKGYAQVAGLDFEETFAPVARLESIRILLAYAAHHSFRLYQMDVKSAFLNGPIKEEVYVEQPPGFEDERYPDHVCKLSKALYGLKQAPRAWYECLRDFLIVNAFKVGKADPTLFTKTCDGDLFVCQIYVDDIIFGSTNQKSCEEFSRVMTQKFEMSMMGELNYFLGFQVKQLKDGTFISQTKYTQDLLKRFGMKDAKPAKTPMGTDGHTDLNKGGKSVDQKAYRSMIGSLLYLCASRPDIMLSVCMCARFQSDPKECHLVAVKRILRYLVATPCFGLWYPKGSTFDLVGYSDSDYAGCKVDRKSTSGTCQFLGRSLVSWNSKKQTSVALSTAEAEYVAAGQCCAQLFWMRQTLRDFGYNLSKVPLLCDNESAIRMAENPVEHSRTKHIDIRHHFLRDHQQKGDIEVFHVSTENQLADIFTKPLDEKTFCRLRSELNVLDSRNLD

SEQ ID NO: 9944 - protein, 516 aa, Zea mays
  Clone ID: TF_ZM5003.C1.o14.fg.pep
MDPKGKGMVINDKEKESFINEPKDDKPSDSGSSHKKKDGKKKRCIKKIVYYDDSDESSSSQKDEDDYEKKKTIWDTLKISHEGNDVTMLTKMELVEGELGRFAMIRGEEPTQTYNRLKTLVNKIRSYGSTRWTDHDVVRLMLRSFTVLDPHLVNNIRENPRYTKMSPEEILGKFVSGRMMIKEARYVDDALNGPIHEPQAIALKATSSREVLPSKVAQIEAAGLNKDEMALIIKRFKTTLKGRKEHPNKSKTKGKRSCFKCGKIGHFIANCPENDSDQEQEKKREKKKAYKKAKGEAHLGKEWDSDCSSSESDNEGLAASAFNKLSLFPNEHHTCLMAKEKKVYASGGSSWIIDSGCTNHMTGEKKMFTSYVKNKVSQDSIIFSDGNQGKDKSETQGTLKRFLRRAQNEFELKVKKIRSDNGSEFKNLQVEEYLEEEGIKHEFSAPYTPQQNGVVERKNRTLIDMARTMLGEFKTPERFWSEAVNTACHAINRVYLHRLLKKTSYELLNGVFGIGS

SEQ ID NO: 9945 - protein, 1512 aa, Zea mays
  Clone ID: TF_ZmC119_1409.pep
MVNTRRGGGIDLPPNRHTRRIFRQPQPQPVEMDPPPPPPPAGVDPLVAAQMRMMQQMADTMTDMRAQMQQERQEMRQEREDIRRELRQEREEIRQERRAQQQQLQQQMQQQQQQVPLPPPPPPVPPRDKHREFMSHKPPTFASSPDPLDADDWLKSVEKMLNIAQCTDREKVLYASGRLTGPAADWWDSYTAAHDAADTITWAEFSTQFRNYHIPAGLMKIKKKEFLSLKQGSMTVSEYRDKFIQLSRYAPDEVAEDERKQEHFIEGLNGPLQYALVAHTFPSFQRLLDKALAIEHKRVQLGDLKRKAISQGQGSSSVRPRYSSPQGTPARTGGGQRPIQQSPLRTPPPRQATPTGTPTKFSGQSPGTTCYKCGKTGHYANVCPQRIATTPVQNRQQTPGSSKGYSIARVNQVSVDDTPDGGDLVIGMFYVNAIPATILFDSGATHSFMSARYANTNEIPLLNMRKPMIVITPKGPVEANQMTRRLTLTIMGREFGATAIILESSSIDLILGMSWLRKAKAVIACGRGTVELTTAKGERFQVNIAVTSSSMRAMFFMPEEFVGNNIRVVRDFPDVFPEELPGMPPDREVEFVIDLLPGTAPISKRPYRMSVEELKELKKQLTELQEAGYIRPSSSPWGAPVLFVQKKDGSQRMCVDYRSLNDVTVKNKYPLPRIEDLFDQMRGARVFSKIDLRSGYHQMRIRPSDIPKTAFSTRYGLYEFTVMSFGLTNAPAYFMNLMNKVFMEYLDRFVVVFIDDILIYSKNESDHEQHLRLVLQKLRDNQLYAKFSKCEFWIDKVPFLGHIISNGGIAVDPAKVKEIMEWRVPTTVTEIRSFLGLAGYYRRFIEGFSKIAKPMTSLLEKGREFKWDEKCQESFDQLKERLMSPPILIMPDLQKGFDIYCDACGQGLGCVLMQEGHVIAYASRQLRKHELNYPTHDLELAAVVHALKIWRHYIMGTKCQVYTDHKSLKYIFTQKDLNLRQRRWLELIKDYDLEIHYHPGKANLLPDELAKDFERLNLGIVTHTEGVTIELEPTLEQEIRKGQVGDAKIQEIKDLITEGRVPEFTEDEQGTIWFKDRICVLEIDSLRETILKEAHDSDYSIHPGSTKMYQDLKQKYWWYGLKRDVAAHVAKCDVCQRVKAEHQRPAGLLHPLKIPEWKWEKIGMDFTVGLPRTPAGYDSIWVIVDRLTKVAHFIPVRTNYTGAKLAELYMTRIVCLHGVPKKIVSDRGSQFTSRFWKKLHESLDTKLNFSSAYHPQTDGQTERTNQVLEDMLRACALKHGGSWEKSLPYAEFSYNNSYQASLKMSPFEALYGRKCRTPLYWDQTGERQFFGPELIQEAEEQVQMIRENSRIAQSRQKSYADNRRRLLEFKEGDHVYLKVSPLRGMRRFKVKGKLSPRFIGPFLILKRVGEVAYQLELPNHLSDVHDVFHVSQLKKCLRVPEEQLPMEDLSVQDDLTYAEYPIKILDTLTRVTRNKVIKMCKVQWSHHGEDEATWEREEELRIDFPHLFPRSS

SEQ ID NO: 9946 - protein, 1111 aa, Zea mays
  unsure (1)..(1111): unsure at all Xaa locations
  Clone ID: TF_ZM4410.C4.o3.fg.pep
MDTKGKGMVINDKEKESFINEPKDDKPTDSGSSQKKKDGKKKRRIKKIVYYYSDESSSSQKDDEYEEKKKTVNSNFSFNYSCIPHNSNAHLLSIPLATTVLLASLCREEYNKVSGLDNAKKIWDTLKISHEGNDATMLTKMELVEGELGRFAMIRGEELTQTYNRLKTLVNKIRSYGSTRWTDHDVVHQDDARGNTRKVRXGRMMIKEARYVDDALNGPMPIYEPQTVALKATSSREALPSKVAQVEVAGLNEDEMALIIKRFKTVLKGRKEHPNKSKTKGKRSCFKCGKIGHFIANCPNNDSDQEQGKSGKWEKKKTYKKAKGEAHLGKEWDSDCSSSDSDNEGLTASSFNKSALFPNEHHTCLMAKEKKVHTRSLDRTKIDKINELYDALNEKNRLLEKQEDLLYEEHDKFVSAQNSLALEVKRNEMLSCELSTCHESISSLKSINVDLNTKLEIANKSSSCVEHVVICNRCKDFNVDACSEHLISISKLNGEVASLNAQLKTSKNDFDKLKFARDAYTIGRHPSIKDGLGFKREAKNLTSQRAPISNKEKGKAPMANSSQKNHAFIYDRKISRNVHHYRSCNAYDSNAMFASSSSFVHGRDMPRINVVHVYASGGSSWIMDSGCTNHMTGEKKMFTSYVKNKDSQDSIIFGDGNQGKVKGLGKIAISFEHSISNVFLVDSLGKNVMTTSRPLELLHMDLFGPIAYLSIGGSKYGLVIVDDFSRFTWVFFLQDKSETQGTLKRFLRRAQNEFELKVKKIRSDNGSEFKNLQVEEYLEEEGIKHEFSAPYTPQQNGVVERKNKTLLDMARTMLGEFKTPERFWSEAVNTACHAINRVYLHRLLKKTSYELLTGNKPNVSYFCVFGSKCYILVKKGRNSKFAPKAVEGFLLGYDSNTKAYRVFNKSSGLVEVSSDVVFDETNGSPREQVDLNDVDEDDVPTVAIRNMAIVDVRPQEQTEQDQPSSSTMVHPPTQSDEQQNVVGTKWVFCNKQDEHGVVTRNKARLVAKGYAQVAGLDFEETFAPVARLESIHILLAYAAHHSFRLFQMDVKSAFLNDPIKKEVYVEQPHGFEDERYPDHVCKLSKALYGLKQAPRAWYECLRDFLIANAFK

SEQ ID NO: 9947 - protein, 388 aa, Zea mays
  Clone ID: TF_ZM4796.C5.o1.fg.pep
MDPKGKGIVINDKEKESFINEPKDDKPTDSGSSHKKKEGKKKRRIKKIVYYDDSDESSSSQKDNDDNDYEKKKTVNSNFSFDYSRMPHSSNAHLLSIPLASLCRDEYHKVSGMDNAKQIWDTLKISHEGNDVTMLTKMELVEGKLGRFAMIRGEEPTQMYNRLKTLVNKIRSYGSTQWTDHDVVRLMLSSFTVLDPHLVNNIRENPRYTKMTPEEILGKFVSGRMMIKEARYVDDALNGPIHEPQTVALKATRSKEVLPSKVAQVKAAELNKEEMALIIKRFKTTLKGRKEHPNKNKTKGKRSCFKCGKIGHFIANCPNNDSDQEQENKREKKKAYKKAKGEAHLGKKWDSDCSSSDSDNEGLAVSAFNKLSLFPNEHHTCLMAKEKK

SEQ ID NO: 9948 - protein, 310 aa, Zea mays
  Clone ID: TF_ZmC10764_2.pep
MEGKEEGRIFVGGLSWQTDERKLQDAFGRFGKVVDVQIMLERHTNRHRGFGFVTFEDRRAVDSAIKEMRGQELDGRTISVNKAEPKMNTDDTRFDNGGGRDYRGGRGDGPPPGNCYECGRPGHWVRDCPSAAGGRSGRFPSKFSGGGRGDRFSGSDRFSDRYMDDRYDGGRYGYRDQVDARDKYAGGRDRYANDRYSAGGDHFDGDRYGGGPDRYAPNGYGRERERSYERDGVRGGGGYDRNDSRGGGSYDRDGPRGGKGGGYVRDGPRGGVADRYGGGGPARYDGGSYRDRPGPYDRPSRGGGRFDDRH

SEQ ID NO: 9949 - protein, 184 aa, Zea mays
  Clone ID: TF_ZmC7043_1.pep
MARLYIGNLDPRVTARELEDEFRTFGVLRSVWVARKPPGFAFIDFDDKRDAEDAIRDLDGKNGWRVELSRNASGGRGGRDRHGGSESKCYECGETGHFARECRLRIGSGGLGSGRRRSRSRSRSRSPRYRRSPSYGRRSYSPAARSPRRRSVSPARGRSYSRSPQHKGAREESPYDNGYRRSRS

SEQ ID NO: 9950 - protein, 184 aa, Zea mays; identical to SEQ ID NO: 9949
  Clone ID: TF_ZmC7043_2.pep

SEQ ID NO: 9951 - protein, 190 aa, Zea mays
  Clone ID: TF_ZmC7043_3.pep
MARLYIGNLDPRVTARELEDEFRTFGVLRSVWVARKPPGFAFIDFDDKRDAEDAIRDLDDFYGSVGKNGWRVELSRNASGGRGGRDRHGGSESKCYECGETGHFARECRLRIGSGGLGSGRRRSRSRSRSRSPRYRRSPSYGRRSYSPAARSPRRRSVSPARGRSYSRSPQHKGAREESPYDNGYRRSRS

SEQ ID NO: 9952 - protein, 184 aa, Zea mays; identical to SEQ ID NO: 9949
  Clone ID: TF_ZmC7043_4.pep

SEQ ID NO: 9953 - protein, 184 aa, Zea mays; identical to SEQ ID NO: 9949
  Clone ID: TF_ZmC7043_5.pep

SEQ ID NO: 9954 - protein, 197 aa, Zea mays
  Clone ID: TF_ZM4454.C1.o3.fg.pep
MDYHLHTVSAPSSHQFQETKGKHGKSQEITSRKACYLCGREGHYFRNYLEKSSLPDTSEIKLSQSLDMEYEQKCVETFINIVKNNKRYRKTFGYMSSPPQPQAKAPKNMDTQTEESSQTQLYEIQTPNHPSFPIGQAKLTRKELNARGACFYCKNEEHIIHECPKKRLDRLKKKTVKQDPNNNPEDQPVISTMMKIG

SEQ ID NO: 9955 - protein, 1216 aa, Zea mays
  unsure (1)..(1216): unsure at all Xaa locations
  Clone ID: TF_ZM4992.C2.o1.fg.pep
MSGDHAKREIETGDKPASLGKAPSRESGNKAKEGSPPSIKLHRSGDKKKKMKKVVYYETDSSSPSTSSSEASIASKRHERKKYSKMPLCYPRISKRTPLLSVPLGKPPYFDGEDYCMWSDKMRHHLTSLHASIWDIVEFGAQEYNKVQELKSAKEIWDVLKTAHEGDEVTKITKHETIEGELGRFVLNKGEEPQAMYNRLKTLVNQVRNLGSTKWDDHEMVKVILRSLVFRNPTQVQLIRGDPRYMLMSLEEQRRGEDYKPRSKRVCYKCGKPGHFIAKCTNSSDSDRGDDKKGNKREKKRYYKKKGGDAHVCREWDSDESSTDSSSDEDDTNIVVNKGLLFSNVGHKCFMAKDDKKKEVEKCENLTKELNICNDSIISLRNENASLNAKIDELNVCNDTISSLRTENDNLISKIKELSVCKDSISCLRNDNAILHAKIEELNVCKPSTSTVEHVSICTRCRDINVEAIDDHLAIIKQQNDHIAKLTAKINEHELENEKFKFARSMLYNGRRHGIKDGIGFQQGSNVKLNAPKRLSNFVKGKAPMVQDNEGYILYPANYPEHKIRRIHARKPHNVSHHAFMYKNEASSSRHSTRVKMPKKKTPAVSNESNISFKTFDASYVFTNKSDKVVAKYVGGKHKGSKTCVWVPKEKPQTQETLKGFLRRAQNEFGLRIKKIRSDNGTEFKNSQIEGFLEEEGIKHEFSSPYTPQQNGVVERKNRTLLDMARTMLDEYKTLDRFWAEAINTACYSINRLYLHQILKKTSYELLTGRKSKFAPKAVEGFLLGYDSNTRAYRVFNKSTRLVEVSYDIVFDETNGSQVEQSPYKHKINRHLPIKHLHQLKMRNRXQDNKDEDQEDEPPQEEDNDQGGDEENEDKEDDQEIXVKDRHTQESTKQFNEITPSTASLVTFIRGVEDALRDSDWVLAMQEELNNFTRNEVWYSVPRLNPNVVGTKWVFRNKQDEHGVVTRNKAQLVAKARLELIRILLAYATYHGFKLYQMDVKSAFLNGPIKEEVYIEQPPRFEYGEYPNHVYKLSKALYGLKQAPRGWYECLRDFLITNGFKVGKADPILFTKIVAKDLFKIEMSMMGELKYFLGFQIKQLQEGTFICQTKYIQDILKKFGMKDGKPIKTPMGTNGHLDLDTGGKPVDQKVYRSMIGSLLYLCASQPDIMLSVCMCARFQANPKEVHLRAVKRIMRYLVYTPKFGLWYPKGSTFDLI

SEQ ID NO: 9956 - protein, 224 aa, Zea mays
  Clone ID: TF_ZmC210941_1.pep
CLFQMAGRARRGQNECIPPPPPPPPTMQELMAQQNEILRQLAQRQPPPQHYGGGDHHQRPPAAATYQEFLSTQPPLFTRAEDPLDADVWLRVVESKFPLLTGVCSDVAKVCFATQQLRGPARTWWIHFLAMQPVDHAVEWGEFKAAFRGHHIPAGIMDRKLNEFLALTQGNRTVLHYTQAFNDLCQYVGYLADTDEKKRDRFRRASVLSSATVSIQSGPIAIMS

SEQ ID NO: 9957 - protein, 285 aa, Zea mays
  Clone ID: TF_ZmC4527_1.pep
AEIIRDYKTGDSLCYAFIEFDTKEACERAYFKMDNCLIDDRRIHVDFSQSVSKLWGQFRQSKRNAKKDGCFKCGAPDHLARDCDQDGEQKNKGPSYVLKDENTQRGGNHRRSYDLVFDEDEADCSEERDHENGHRRKNRRIDDRKSELPPRGGRDRNSHERTHSDEKGSKHGKDDRNRGDRKHDDYHSYSRSGDRSSGRNDDRDYSKRHDRSRSGEEEKGYRRRDKSDGERHHRDDGYDRRRRDEDSHRKRSPDSKHRREDGGHHVRNQQSDDRSYKERRHRDGR

SEQ ID NO: 9958 - protein, 674 aa, Zea mays
  Clone ID: TF_ZmC10872_11.pep
MSGKSAKREMETGKKATSHGKAPSRESSTKAKEGSPPCVKSHRRGDKKKKMKRVVYYEIDSSLPFRSDSNATSITSKRQERKKYSKMPLRYPRISKRTPLLSVPLGKPPCFDGEDYSMWSDKMRHHLTSLHESIWNIVEFGVQVPKVGDDGYDSDEVAQIRHFNSQATTILLASLCREESNKVQGLKSAKKIWDVLKTAHEGDEVTKITKRETIEGELGRFILNQGEEPQTMYNWLKTLVNQVRNLGSTKWDDHEMLKVIHRSLTFCNPTQVQLICGDPRYKLMSLEEVIGKFVSFELMIKNSKHIVNLEQGATSTPKVQPVAFKATEEKKEESTSSRLPIDASKLDNEEMALIIKSFRQILKQRRGKDYKPRSKRVCYKCGKPGHFIAKCPMSGDSDRGDDKRGKKKEKKRYYKKKGSDAHVCREWDSDESSIDSSDEDAANIVVNKGLLFPNVGHKCFMAKDGKKKKVQTRTTPKYTTSSDEGSSSEDEDDLLTLFANLNMQQKEKLNELIGAIHDKDELLDSQEEFLIKENKRHVKFKNAYAQEVEKCEKLSKELSICHESISNLRTENANLIANVEKLNVCNDSISNLRKENASLIAKIDELNVCKKSISCLKNENATLHAKIEELNVCKPSTSTIDHCWGLVLKCCELRIRQHKMLKFKALRPLKHYFP

SEQ ID NO: 9959 - protein, 911 aa, Zea mays
  Clone ID: TF_ZmC951_370.pep
MILKVFLRRKISRDISVEYLGSISGKNLKGITREISGQYFWKEFEGDNGETFVSKFEKISRFEFLGCYNSQATTILLASLCREEYNKVQGLKSAKEIWDVLKTAHEGDEVTKITKRETIEGELGRFVLNQGEEPQAMYNRLKTLVNQVRNLESTKWDDHEMVKVILRSLIFCNPTQVQLIRGDPRYKLMSPEEVIGKFVSFELMIKGSKQIVNLEQGSTSTPEVQSVAFKATEEKKEESTSSRLPIDASKLDNEEMALIIKSFRQILKQRRGKDYKPHSKRVCYKCGKPGHFIAKCPMSSDSDRCDDKRGKKEKKRCYKKKGGDAHVCQEWDSDESSTNSSFDEDAANIAVNKGLLFPNVGHKCFMAKDDKRKKVKSRASTKYTTSSDEGSSSEDEDNLLTLFANLNMQQKEKLNELIGAIHEKDGLLDSQEEFLIKENKKHVKVKNAYAQEIEKCENLTRELIICHDTISNLRTENVSLIAKVEKSDVCHDSITNLRNENASFIAKIDKLNESISSLKDENARLISKAKDLNVCNDAISSLRNENAILHAKIDELNACKHLHLLLIMFLFALDGKAPVAHDNKGYILYPVGYPEHKIRRIHAKKSHYVSHHAYMYKNETSSSRHSTHIKMPKKKSPTASNESNVSFKTFDASYVLTNKSGKVVAKYVGGKHKGSKTCVWVPKVYESGGSSWIINSGCTNHMTGEKRMFSSYEKNKDPQRAITFGDGNQDVGVTVFRRCDDSVAFKGVLEGQLYLVDFNIAELDTCLIVKTNMGWLCQRRLAHVGMKNLHKLLKGEHILGLTNVHFEKDRVCSACQAGKQVGSHHPHKNIMTIDRPLELLHMDLFGPIAYISIDEKTTDQANDGGKKSFEVPSAREKVKETRNPKPGVKKKTCKVKVDRVKKSYGASRITT

SEQ ID NO: 9960 - protein, 267 aa, Zea mays
  Clone ID: TF_ZmC10764_3.pep
SQCFSSEIMVERHTNRHRGFGFVTFEDRRAVDSAIKEMHGQEIDGRTISVNKAEPKMNTDDTRYAGGGGRGEYRGGRGDGPPPGNCFECGRPGHWVRDCPSAAGGRSGRFPSKFSGGSGVGRGDRFSGSDRFGDRYMDDRYDGGRYGYRDQADARDRYAGGRDRYANDRYPSGGDHFGGDRYGGGPDCYVPSGYGRERERSYERDGVRGGGGGGGGYDRSGPRGGGGYDRDGPRGGGGSARYDGGNYRERPGPYDRPSRGGRFDDRY

SEQ ID NO: 9961 - protein, 343 aa, Zea mays
  Clone ID: TF_ZmC10764_5.pep
MSVSTCRVPRGRPGFPLAVADFSSRQTLILLLPFSSPTVGRAVAVAMEGKEEGRIFVGGLSWQTDERKLEDAFGRFGKVVDAQIMVERHTNRHRGFGFVTFEDRRAVDSAIKEMHGQEIDGRTISVNKAEPKMNTDDTRYAGGGGRGEYRGGRGDGPPPGNCFECGRPGHWVRDCPSAAGGRSGRFPSKFSGGSGVGRGDRFSGSDRFGDRYMDDRYDGGRYGYRDQADARDRYAGGRDRYANDRYPSGGDHFGGDRYGGGPDCYVPSGYGRERERSYERDGVRGGGGGGGGYDRSGPRGGGGYDRDGPRGGGGSARYDGGNYRERPGPYDRPSRGGRFDDRY

SEQ ID NO: 9962 - protein, 211 aa, Zea mays
  Clone ID: TF_ZmC10764_7.pep
MNTDDTRYAGGGGRGEYRGGRGDGPPPGNCFECGRPGHWVRDCPSAAAGRSGRFPSKFSGGRGDRFSGSDRFGDRYMDDRYDGGRYGDRYMDDRYDGGRYGCRDQVDARDKYAGGRDRYANDRYSTGGDHFDGDRYGGGPDRYAPNGYGRERERSYERDGGGGYVRDGPRGGVADRYGGGGPARYDGGSYRDRPGPYDRPSRGGGRFDDRH

SEQ ID NO: 9963 - protein, 1116 aa, Zea mays
  Clone ID: TF_ZmC119_1388.pep
MRSPWDRLTAVSKQRTELPNITDSDVIGAFLAGTTCRDLVSKLGRKTPTRASELMDIATKFASGQEASTQRGAKKKGKKKSQAKHDAADADLVAVAEYKNPRKPPGGANLFDKMLKEPCPYHQGPVKHTLEECAMLRRHFHKAGPPAEGGRARDDDNKEDHQAGEFPEEAVLVDFLRANADVFVWSSSDMPGIPRDVAEHSLDIRAGARPVKQPLRRFDEEKRRAIGEEIHKLMAAGFIKECMNHVFGEHIGRTVEAYVDDIVVKTREASNLLSDLEVTFRCLKAKGVKLNPKKCVFGVPRGMLLGFIVSERGIEANPEMIATITSTGPIKDLKGIQRVTGCLAALSRFVSRLGKRGLPLYRLLRKAECFTWTPEAEEALGNLKALLTNAPILVPPAAGEALLIYVAVTTQVVSAVIVVERREEGHALPVQRLVYFISEVLSETKIRYPQIQKLLYAVILTRWKLRHYFESHPITVVSSFLKGKCALGPFLSILVIECQLKCLKCEFMQWMNKVQIKSKVKFLQDHLFTPPSRCSQLVSKPFSSQRDLPPEEMDPKGKGIVINDKEKESFVNEPKDDKPTDSGSGHRRKEGKKKKTRCIKEIIYYDDSDESTSSQKDDDNDYKKTVNSNFSFDYSRIQHSSNSHLLSIPLGKPPHFDGEDYGFWSHKMRSHLFSLHPSIWEIVENGMKFDSSDSPLLINEQIHRNAQATTVLLASLCREEYNKVSGLDNAKQIWDTLKISHEGNDITMLTKMELVEGELGRFAMIRGEEPTQTYNRLNTLINKIRSYGSTRWTDHDVVRLMLRSFTVLDPHLVNNIRENPRYTMMTPKEVLGKFVSGRMMIKEARYVDDALNGPLHEPQPIALKATRSKEALPSKVAQIEAAGLNDEEMALIIKRFKTALKGRKGQPSKAKTKGKRSCFKCGKLGHFIANCPENDSDQEQGKNGKRENKKVYKKAKGEAHLGKEWDSDCSSSDSDDEGLAATAFNKSALFPNEHHTCLMAREKKVITRNANTYDSSSDDESSEDEIDYSSLFKGLDRTKIAKINELIDALNEKDRILEKQEDLLYEEHDKFVSTQNSLALEVKRNGILSCELSTCNETISSLKGVRILMLMLVVNT

SEQ ID NO: 9964 - protein, 1671 aa, Zea mays
  Clone ID: TF_ZmC29741_3.pep
MDPKGKGIVINDKEKESFVNDLKDDKTTDSGSGHRRKDGKKKKTRRIKEIVYYDDSDESTSSHKENDNNDYDKRKTVNSNFSFDYSRIPQSANAHLLSIPLGKPPHFDGEDYGFWSHKMRSHLFSLHPSIWEIVESGMHFDSSDSPMFINEQIHKNAQATTVLLASLCRDEYHKVSGLDNAKQIWDTLKISHEGNDVTLLTKMELVEGELGRFAMIRGEEPTQTYNRLKTLINKIRSYESMRWTDHDVVRLMLRSFTVLDPHLVNNIRENPRYTKMSPEEVLGKFVSGRMMIKEARYVDDALNGPINEPQPLALKATRSKEALPSKVAQIEAAGLNDEEMALIIKRFKTALKGRKGQPSKTKAKEKRSCFKCGKLGHFIANCPDNDSDQDQGNKREKKKNYKKAKGEAHLGKEWDSDCSSSDSDNEGLAATAFNKLSLFPNERHTCLMAREKKVCTRDSTYASSSEDESSDEDEIDYSCLFKGLDRTKVDKVNELIDALNDKNRLLEKQEDLLYEEHDKFIEAQKSHALEVKRNEMLSCELSSCHETISNLRSINDDLNAKLEIASKSTSCVENDVICNRCKDFDINACSEHIASIAKLNDEIASLNAQLKIRKSEFDKLKFARDAYTIGRHPSIKDGLGFKREVKNLTSHKASISTKEKGKAPMASNAKKNHAFMYHDRKFSRNVHDDRSCNAYNAFDSHAMFASSSSYMHGRNVFRRNVVHHMPRRNVVNTPRKVNEPSTIYHVLNASFAICRKDRKIIARKLGAKCKGDKTCIWVPKEIVTNLVGPNKSWVYASGGSSWIIDSGCTNHMTGEKEMFTSYVKNKDSQDSIIFGDGNQGKVKGLGKIAISNEHSISNVFLVESLGYNLLSVSQLCNMGYNCLFTNVDVSVFRRCDGSLAFKGVLDGKLYLVDFAKEEAGLDACLIAKTSMGWLWHRRLAHVGMKNLHKLLKGEHVIGLTNVQFEKDRPCAACQAGKQVGGAHHSKNVMTTSRPLELLHMDLFGPVAYLSIGGSKYGLVIVDDFSRFTWVFFLQDKSETQGTLKRFLRRAQNEFELKVKKIRSDNGSEFKNLQVEEFLEKEGIKHEFSAPYTPQQNGVVERKNRTLIDMARTMLGEFKTPECFWSEAVNTACHAINRVYLHCLLKKTSYELLTGNKPNVSYFRVFGSKCYILVKKGRNSKFAPKAVEGFLLGYDSNTKAYRVFNKSSGLVEVSSDVVFDETNGSPREQVVDLDDVDEEDVPTAAIRTMAIGKVLAMQEELNNFKRNEVWTLVPRPKQNVVGTKWVFRNKQDEHEVVTRNKARLVAKGYAQVAGLDFEETFAPVARLESIRILLAYAAHHSFRLFQMDVKSAFLNGPIKEEVYVEQPPSFEDERYPDHVCKLSKALYGLKQAPRAWYECLRDFLIANAFKVGKADPTLFTNTCDGDLFVCQIYVDDIIFGSTNKKSCEEFSRVMTQKFEMSMMGELNYFLGFQVKQLKDDTFISQTKYTQDLLKRFGMKDAKPAKTPMGTDGHTDLNKGDSDYAGCKVDRKSTSGTCQFLGRFLVSWNSKKQTSVALSTAEAEYVAAGQCCAQLLWMRQTLRDFGYNLSKVPLLCDNESAIRMAENPVEHSRTKHIDIRHHFLRDHQQKGDIEVFHVSTENQLADIFTKPLDEKTFCRMRSELNVLDSRNLD

SEQ ID NO: 9965 - protein, 922 aa, Zea mays
  unsure (1)..(922): unsure at all Xaa locations
  Clone ID: TF_ZmC29741_36.pep
MDPKGKGIVINDKEKESFVNEPKDDKPIDSGSGHRRKEGKKKKTRRIKEIIYYDDSDESTSSQKDDDNDYKKTVNSNFSFDYSRIQHSSNSHLLSIPLGKPPHFDGEDYGFWSHKMRSHLFSLHPSIWEIVENGMKFDSSDSPMLINEQIHRNAQATTVLLASLCREEYNKVSGLDNAKQIWDTLKISHEGNDITMLTKMELVEGELGRFAMIRGEEPTQTYNRLKTLINKIRSYGSTRWTDHDVVRLMLRSFTVLDPHLMNNIRENPRYTMMTPEEVLGKFVSGRMMIKEARYVDDALNGPLHEPQPIALKATRSKESLPSKVAQVEAAGLNDEEMALIIKRFKTALKGRKGQPSKAKTKGKRSCFKCGKLGHFIANCPENDSDQEQGKNGKRENKKVYKKAKGEAHLGKEWDSDCSSSDSDDEGLAATAFNKSALFPNEHHTCLMAREKKVITRNANTYDSSSDDESSEDEIDYSSLFKGLDRTKIAKINELIDALNEKDRILEKQEDLLYEEHDKFVSAQNSLAIEVKRNGILSCELSTCNETISSLKGEINDLTAKLEVASNSYVENVTICTRCKDFDVNACSEHLVSISKLNDEVASLNAQLKTSKSEVDKIKFARDAYTVGRHPSIKDGLGFKREAKNLTSHKASIFVKEKGKAPMVSSAKRNHAFLYYDRKHARNAYNDFDSHAYDSYAMTASSSHVVHMPRRNFAHAPRKVVNKPSTIYYACNAPFAICRKGKKVIARKLGAKCKGDKTCIWVPKXICTNLVGPNKSWVLSPKPKFALQVYASGGSSWIIDSGCTNHMTGEKKMFTSYVKNKDSQDSIIFGDGNQGKVKGLGKIAISNEHSISNVFLVESLGYNLLSVSQLCNMGYNCLFTNVDVSVFRKSDGSLAFKGVLDGNLYLVDFAKKEVGLESTCLIA

SEQ ID NO: 9966 - protein, 1626 aa, Zea mays
  Clone ID: TF_ZmC4916_368.pep
MDPKGKGIVINDKEKESFVNEPKDDKPTDSGSGHRRKEGKKKKTRRIKEIIYYDDSDESTSSQKDDDNDYKKTVNSNFSFDYSRIQHSSNSHLLSIPLGKPPHFDGEDYGFWSHKMRSHLFSLHPSIWEIVENGMKFDSSDSPMLINEQIHRNAQATTVLLASLCREEYNKVSGLDNAKQIWDTLKISHEGNDITMLTKMELVEGELGRFAMIRGEEPTQTYNRLKTLINKIRSYGSTRWTDHDVVRLMLRSFTVLDPHLVNNIRENPRYTMMTPEEVLGKFVSGRMMIKEARYVDDALNGPLHEPQPIALKATRSKESLPSKVAQVEAAGLNDEEMALIIKRFKTALKGRKGQPSKAKTKGKRSCFKCGKLGHFIANCPENDSDQEQGKNGKRENKKVYKKAKGEAHLGKEWDSDCSSSDSDDEGLAATAFNKSALFPNEHHTCLMAREKKVITRNANTYDSSSDDESSEDEIDYSSLFKGLDRTKIAKINELIDALNEKDRILEKQEDLLYEEHDKFVSAQNSLALEVKRNGILSCELSTCNETISSLKGEINVLTTKLEVASNSCVENITICTRCKDFDVNACSEHLVSISKLNDEMASLNAQLKTSKSEVDKIKFARDAYTIGRHPSIKDGLGFKREAKNLTSHKAPIFVKEKGKAPMANSAKRNHAFLYHDRRHARNAYNDSDSHVYDSHAMFASSSSYKHDRDMCRRNVVHMPRRNFAHVPRKVVNKPSTIYYACNAPFAICRKGKKVYASGGSSWIIDSGCTNHMTGEKKMFTSYVKNKDSQDSIIFGDGNQGKDKSETQGTLKRFLRRAQNEFELKVKKIRSDNGSEFKNLQVEEFLEEEGIKHEFSAPYTPQQNGVVERKNRTLIDMARTMLGEFKTPEYFWSEAVNTACHAINRVYLHRLLKKTSYELLTGNKPNVSYFRVFGSKCYILVKKGRNSKFAPKAVEGFLLGYDSNTKAYRVFNKSSGLVEVSSDVVFDETNGSPREQVVDCDDVDEEDVPTAAIRTMAIGEVRPQEQDERDQPSSSTMVHPPTEDDEQVPQVEALDQGGAQDDQVMEEEAQPAPPTQVRAMIQRDHPVDQILGDISKGVTTRSQLVNFCEHYSFVSSIEPFRVEEALLDPDWVLAMQEELNNFKRNEVWTLVPRPKQNVVGTKWVFRNKQDEHGVVTRNKARLVAKGYAQVAGLDFEETFAPVARLESIRILLAYAAHHSFRLFQMDVKSAFLNGPIKEEVYVEQPPGFEDERYPNHVCKLSKALYGLKQAPRAWYECLRDFLIANAFKVGKADPTLFTKTCDGDLFVCQIYVDDIIFGSTNQKSCEEFSRVMTQKFEMSMMGELNYFLGFQVKQLKDGNFISQTKYTHDLLKRFGMKDAKPAKTPMGTDGHTDLNKGGKSVDQKAYRSMIGSLLYLCASRPDIMLSVCMCARCQSDSKECHLVAVKRILRYLVATPCLGLWYPKGSTFDLVGYSDSDYAGCKVDRKSTSGTCQFLGRSLVSWNSKKQTSVALSTAEAEYVAAGQCCAQLLWMRQTLRDFGYNLSKVPLLCDNESAIRMAENPVEHSRTKHIDIRHHFLRDHQQKGDIEVFHVSTENQLADIFTKPLDEKTFCRLRSELNVLDSRNLD

SEQ ID NO: 9967 - protein, 1608 aa, Zea mays
  Clone ID: TF_ZmC4916_380.pep
MDPKGKGIVINDKEKESFVNEPKDDKPTDSGSGHRRKEGKKKKTRRIKEIIYYDDSDESTSSQKDDDNDYKKTVNSNFSFDYSRIQHSSNSHLLSIPLGKPPHFDGEDYGFWSHKMRSHLFSLHPSIWEIVENGMKFDSSDSPMLINEQIHRNAQATTVLLASLCREEYNKVSGLDNAKQIWDTLKISHEGNDITMLTKMELVEGELGRFAMIRGEEPTQTYNRLKTLINKIRSYGSTRWTDHDVVRLMLRSFTVLDPHLVNNIRENPRYTMMTPEEVLGKFVSGRMMIKEARYVDDALNGPLHEPQPIALKATRSKESLPSKVAQVEAAGLNDEEMALIIKRFKTALKGRKGQPSKAKTKGKRSCFKCGKLGHFIANCPENDSDQEQGKNGKRENKKVYKKANGEAHLGKEWDSDCSSSDSDDEGLAATAFNKSALFPNEHHTCLMAREKKVITRNANTYDSSSNDESSEDEIDYSSLFKGLDRTKIAKINELIDALNEKDRILEKQEDLLYEEHDKFVSAQNSLALEVKRNGILSCELSTCNETISSLKGEINVLTAKLEVASNSCVENITICTRCKDFDVNACSEHLVSISKLNDEVASLNAQLKTSKSEVDKIKFARDAYTVGRHPSIKDGIGFKREAKNLTSHKAPIFVKEKGKAPMASSAKRNHAFLYHDRRHARNAYNDFDSHVYDSHAMFASSSSYKHDRDMCRRNVVHMPRRNFAHVPRKVVNKPSTIYYACNAPFAICRKGKKVYASGGSSWIIDSGCTNHMTGEKKMFTSYVKNKDSQDSIIFGDGNQGKDKSETQGTLKRFLRRAQNEFELKVKKIRSDNGSEFKNLQVEEFLEEEGIKHEFSAPYTPQQNGVVERKNRTLIDMARTMLGEFKTPECFWSEAVNMACHAINRVYLHRLLKKTSYELLTGNKPNVSYFRVFGSKCYILVKKGRNSKFAPKAVEGFLLGYDSNTKAYRVFNKSSGLVEVSSDVVFDETNGSPREQVVDCDEEDVPAAAIRTMAIGEVRPQEKDEQPSSSTMVQPPTEDDEQVPQVEALDQGGAQDDQVMEEEAQPAPPTQVRAMIQRDHPVDQILGDISKGVTTRSRLVNFCEHYSFVSSIEPFRVEEALLDPDWVLAMQEELNNFKRNEVWTLVPRPKQNVVGTKWVFRNKQDEHGVVTRNKARLVAKGYAQVAGLDFEETFAPVARLESIRILLAYAAHHSFRLYQMDVKSAFLNGPIKEEVYVEQPPGFEDERYPDHVCKLSKALYGLKQAPRAWYECLRDFLIANAFKVGKADPTLFTKTCDGDLFVCQIYVDDIIFGSTNQKSCEEFSRVMTQKFEMSMMGELNYFLGFQVKQLKDGTFISQTKYTQELLKWFGMKDAKPAKTPMGTDGHTDLNKGGSLLYLCASRPDIMLSVCMCARFQSDPKECHLVAVKRILRYLVATPCFGLWYPKGSTFNLVGYSDSDYAGCKVDRKSTSGTCQFLGRSLVSWNSKKQTSVALSTAEAEYVAAGQCCAQLLWMRQTLRDFGYNLSKVPLLCDNESAIRMAENPVEHSRTKHIDIRHHFLRDHQQKGDIEVFHVSTENQLADIFTKPLDEKTFCRLRSELNVIDSRNLD

SEQ ID NO: 9968 - protein, 1595 aa, Zea mays
  Clone ID: TF_ZM4266.C12.o4.fg.pep
MDPKGKGIVINDKEKESFVNEPKDDKPTDSGSGHKRKDGKKKKTRRIKEIVYYDDSDESTSSQKDDDNDYKKTVNSNFSFDYSRIQHSSNSHLLSIPLGKPPHFDGEDYGFWSHKMRSHLFSLHPSIWEIVENGMKFDSSDSPMFINEQIHRNAQATTVLLASLCREEYNKVSGLDNSKQIWDTLKISHEGNDITMLTKMELVEGELGRFAMIRGEEPTQTYNRLKTLINKIRSYGSTRWTDHDVVRLMLRSFTVLDPHLVNNIRENPRYTMMTPEEVLGKFVSGRMMIKEARYVDDALNGPLHEPQPIALKATRSKESLPSKVAQVEAAGLNDEEMALIIKRFKTALKGRKGQPSKAKTKGKRSCFKCGKLGHFIANCPENDSDQEQGKNGKRENKKGYKKAKGEAHLGKEWDSDCSSSDSDDEGLAATAFNKSALFPNEHHTCLMAREKSDNESSEDEIDYSSLFKGLDRTKIAKINELIDALNEKDRILEKQEDLLYEEHDKFVSAQNSLALEVKRNGILSCELSTCNETISSLKGEINVLTAKLEVASNSCVENITICTRCKDFDVNACNKHLVSISKLNDEVASLNAQLKTSKSEVDKIKFARDAYTVGRHPSIKDGLGFKREAKNLTSHKAPIFVKEKGKAPMASSAKRNHAFLYHDRRHARNTYNDFDSHVYDSHAMFASSSSYKHDRDMCRRNVVPRRNFAHVPRKVVNKPSTIYYACNAPFAICRKGRKIVARKLGARCKGDKTCIWVPKDICANLAGPNMSWVYASGGSSWIIDSGCTNHMTGEKKMFTSYVKNKDSQDSIIFGDGNQGKIDLVQLVKQDKSETQGTLKRFLRRAQNEFELKVKKIRSDNGSEFKNLQVEEFLEEEGIKHEFSAPYTPQQNGVNSRPPECFWSEAVNTACHAINRVYLHRLLKKTSYELLTGNKPNVSYFRVFGSKCYILVKKGRNSKFAPKAVEGFLLGYDSNTKAYRVFNKSSGLVEVSSDVVFDETNGSPREQVVDCDDVDEEDVPTAAIQTMAIGEVRPQEQDEQDQPSSSTTVHPPPQDDEHVHQQEADDHVMEEDAQPAPPTQVRAMIQRDHPVDQILGDISKGVTTRSRLVNFCEHYSFVSSIEPFRVEEALLDPDWVLAMQEELNNFKRNEVWTLVPRPKQNVVGTKWVFRNKQDEHGVVTRNKARLVAKGYAQVAGLDFEETFAPVARLESIRILLAYAAHHSFRLFQMDVKSAFLNGPIKEEVYVEQPPGFEDERYPDHVCKLSKALYGLKQAPRAWYECLRDFLIANAFNVGKADPTLFTKTCDGDLFVCQIYVDDIIFGSTNQKSCEEFSRVMTQKFKMSMMGELNYFLGFQVKQLKDGTFISQTKYTQDLLKRFGMKDAKPAKTPMGTDGHTDLNKGGKSVDQKAYRSMIGSLLYLCASRPDIMLSYPKGSTFDLVGYSDSDYAGCKVDRKSTSGTCQFLGRSLVSWNSKKQTSVALSTAEAEYVAAGQCCAQLLWMRQTLRDFGYNLSKVPLLCDNESAIRMAENPVEHSRTKHIDIRHHFLRDHQQKGDIEVFHVSTENQLADIFTKPLGEKTFCRLRSELNVLDSWNLD

SEQ ID NO: 9969 - protein, 663 aa, Zea mays
  Clone ID: TF_ZM4707.C2.o8.fg.pep
MDPKGKGIVINDKEKESFVNEPKDDKPTDSGSGHRRKEGKKKKTRRIKEIIYYDDSDESTSSQKDDDNDYKKTVNSNFSFDYSRIQHSSNSHLLSIPLGKPPHFDGEDYGFWSHKMRSHLFSLHPSIWEIVENGMKFDSSDSPMLINEQIHRNAQATTVLLASVCREEYNKVSGLDNAKQIWDTLKISHEGNDITMLTKMELVEGELGRFAMIRGEEPTQTYNRLKTLINKIRSYGSTRWTDHDVVRLMLRSFTVLDPHLVNNIRENPRYTMMTPEEVLGKFVSGRMMIKEARYVDDALNGPLHEPQPIALKATRSKESLPSKVAQVEAAGLNDEEMALIIKRFKTALKGRKGQPSKAKTKGKRSCFKCGKLGHFIANCPENDSDQEQEKNGKRENKKAYKKAKGEAHLGKEWDSDCSSSDSDDEGLAATAFNKSALFPNEHHTCLMAREKKVITHNANTYDSSSDDESSEDEIDYSSLFKGLDRTKIAKINELIDALNEKDRILEKQEDLLYEEHDKFVSAQNSLALEVKRNGILSCELSTCNETISSLKGEINVLTAKLEVASNSCVENITICTRCKDFDVNACSEHLVSISKLNDEVASLNAQLKTSKSEVDKIKFARDAYTVGRHPSIKDGLGFKREAKKLTSHKAPIFVKEKGKAPMA

SEQ ID NO: 9970 - protein, 516 aa, Zea mays
  Clone ID: TF_ZM4712.C2.o2.fg.pep
MDPKGKGIVINDKEKESFVNEPKDDKPTNSGSGHRRKEGKKKKTRRIKEIIYYDDSDESTSSQKDDDNDYRKTATRSKESLPSKVAQVEAVGLNDEEMALIIKRFKTALKGRKGQPSKAKTKGKRSCFKCGKLGHFIANCPENDSDQEQGKNGKRENKKVYKKAKGEAHLGKECDSDCSSSDSDDEGLAATAFNKSALFPNEHHTCLMAREKKVYASGGSSWIIDSGCTNHMTGEKKMFTSYVKSKDSQDSIIFGDGNQGKDKSETQGTLKRFLRRAQNEFELKVKKIRSDNGSEFKNLQVEEFLEEEGIKHEFSAPYTPQQNGVMKKMFRRPLYGPWRLEKYGHRNKMNEINLLPQLWCIPQPKMTNRLYQMDVKSAFLNGPIKEEVYVEQPPGFEDERYPDHVLSGGYTHLLVAIDKFSKWIEVRPLNSIRSEQVVAFFTNIIHRFGVPNSIITDNGTQFTGGKFLDFCEDHHIQVDWAAVAHPMMNGQVERANNMILQGLKPRIYNDLNKFGK

SEQ ID NO: 9971 - protein, 1665 aa, Zea mays
  Clone ID: TF_ZM4715.C1.o7.fg.pep
MDPKGKGIVINDKEKESFANEPKDDKPTDSGSGHRRKEGKKKKTRRIKEIIYYDDSDESTSSQKDDDNDYKKTVNSNFSFDYSRIQHSSNSHLLSIPLGKPPHFDGEDYGFWSHKMRSHLFSLHPSIWEIVENGMKFDSSDSPMLINEQIHRNAQATTVLLASLCREEYNKVSGLDNAKQIWDTLKISHEGNDITMLTKMELVEGELGRFAMIRGEEPTQTYNRLKTLINKIRSYGSTRWTDHDVVRLMLRSFTVLDPHLVNNIRENPRYTMMTPEEVLGKFVSGRMMIKEARYVDDALNGPLHEPQPIALKATRSKESLPSKVAQVEAAGLNDEEMALIIKRFKTALKGQKGQPSKAKTKGKRSCFKCGKLGHFIANCPENDSDQEQGKNGKRENKKVYKKAKGEAHLGKEWDSDCSSSDSDDEGLAATAFNKSALFPNEHHTCLMAREKKVITRNANTYDSSSDDESSEDEIDYSSLFKGLDRTKIAKINELIDALNEKDRILEKQEDLLYEEHDKFVSAQNSLALEVKRNGILSCELSTCNETISSLKGEINVLTAKLEVASNSCVENITICTRCKDFDVNACSEHLVSISKLNDEVASLNAQLKTSKSEFEKLKFARDAYTIGRHPSIKDGLGFKREAKNLTSHKTPISTKEKGKAPMANSVKKNHAFMYYDRRYSRNAFRSNDVFDSHAYDSYAMTASSSHVMHGRNVFRRNVVHQMPRRNVDHNAPRKVVNEPSEIYCALNASFAICRKDKKIVARKLGARCKGDKTCIWVPKNICANLVGPNMSWVYASGGSSWIIDSGCTNHMTGEKKMFTSYVKNKDSQDSIIFGDGNQGKDKSETQGTLKRFLRRAQNEFELKVKKIRSDNGSEFKNLQVEEFLEEEGIKHEFSAPYTPQQNGVVERKNRTLIDMARMMLGEFKTPECFWSEAVNTACHAINRVYLHRLLKKTSYELLTGNKPNVSYFRVFGSKCYILVKKGRNSKFAPKAVEGFLLGYDSNTKAYRVFNKSSGLVEVSSDVVFDETNGSPREQVVDLDDVDEEDVPTAAMRTMAIGDVRPQEQLEQDQPHSSTMVQPPTQDDEQVHQQEACDQGGAQDDRVMEEEAQPAPPTQVRAMIQRDHPVDQIMGDISKGVTTRSRLVNFCEHYSFVSSIEPFRVEEALLDPDCVLAMQEELNNFKRNEVWTLVPRPKQNVVGTKWVFRNKQDEHGVVTRNKARLVAKGYAQVAGLDFEETFAPVARLESIRILLAYAAHHSFRLYQMDVKSAFLNGPIKEEVYVEQPPGFEDDRFLDHVCKLSKALYGLKQAPRAWYECLRDFLVANAFNVGKADPTLFTKTCNGDLFVCQIYVDDIIFGSTNQKSCDEFSRVMTQKFEMSMMGELNYFLGFQVKQLKDGTFISQTKYTQDLLKRFGMKDAKPAKTPMGTDGHTDLNKGGKSVDQKAYRSMIGSLLYLCASRPDIMLSVCMCARFQSDPKECHLVAVKRILRYLVATPCFGLWYPKGSTFDLVGYSDSDYAGCKVDRKSTSGTCQFLGRSLVSWNSKKQTSVALSTAEAEYVAAGQCCAQLLWMRQTLRDFGYNLSKVPLLCDNESAIRMAENPVEHSRTKHIDIRHHFLRDHQQKGDIEVFHVSTENQLADIFTKPLDEKTFCRLRSELNVLDSRNLD

SEQ ID NO: 9972 - protein, 706 aa, Zea mays
  Clone ID: TF_ZM4843.C9.o1.fg.pep
MDPKGKGIVINDKEKESFVNEPKDDKPTDSGSGHRRKEGKKKKTRRIKEIIYYDDSDESTSSQKDDDNDYKKTVNSNFSFDYSRIQHSSNSHLLSIPLGKPPHFDGEDYGFWSHKMCSHLFSLHPSIWEIVENGMKFDSSDSPMLINEQIHRNAQATTVLLASLCREEYNKVSGLDNAKQIWDTLKISHEGNDITMLTKMELVEGELGRFAMIRGEEPTQTYNRLKTLINKIRSYGSTRWTDHDVVRLMLRSFTVLDPHLVNNIRENPRYTMMTPEEVLGKFVSGRMMIKEARYVDDALNDPLHEPQPIALKATRSKESLPSKVAQVEAAGLNDEEMALIIKRFKTALKGRKGQPSKAKTKGKRSCFKCGKLGHFIANCPENDSDQEQGKNGKRENKKAYKKAKGEAHLGKEWDSDCSSSDSDDEGLAATAFNKSALFPNEHHTCLMAREKKVITRNANTYESSSDDESSEDEIDYSSLFKGLDRTKIAKINELIDALNEKDRTLEKQEDLLYEEHDKFVSAQNSLALEVKRNGILSCELSTCNETISSLKGEINDLTAKLEVASNSYVENITICTRCKDFDVNACSEHLVSISKLNDEVASLNAQLKTSKSEVDKIKFARDAYTVGRHPSIKDGLGFKREAKNLTSHKTPISTKEKGKAPMANSVKKNHAFMYYDRRYSRNAFRSNDVFDSHAYDSYAMTASSSH

SEQ ID NO: 9973 - protein, 703 aa, Zea mays
  Clone ID: TF_ZM4989.C2.o1.fg.pep
MDPKGKGIVINDKEKEFFVNDPKDDKSNDSGSGHKRKEGKKKKTRSIKEIIYYDDSDKSTSSQKDDDNDYKKTVNSNFSFDYSRIQHSSNSHLLSIPLGKPPHFDGEDYGFWSHKMRSHLFSLHPSIWEIVENGMKFDSSDSPMLINEQIHRNAQATTVLLASLCREEYNKVSGLDNAKQIWDTLKISHEGNDITMLTKMELVEGELGRFAMIRGEEPTQTYNRLKTLINKIRSYGSTRWTDHDVVRLLLRSFTVLDPHLVNNIRENPRYTKMTPEEVLGKFVSGRMMIKEARYVDDALNGPLHEPQPIALKATRSKESLPSKVAQIEAAGLNDEEMALIIKRFKTALKDRKGQPSKAKTKGKRSCFKCGKLGHFIANCPENDSDQEQEKNGKRENKKVYKKAKGEAHLGKEWDSDCSSSDSDDEGLAATAFNKSALFPNEHHTCLMAREKKVITRNANTYDSSSDDESSEDEIDYSSLFKGLDRTKIAKINELIDALNEKDKILEKQEDLLYEEHDKFVSAQNSLALEVKRNGILSCELSTCNETISSLKGEINVLTAKLEVASNSCVENITICTRCKDFDVNACNEHLVSISKLNDEVASLNAQLKTSKSEVDKIKFARDAYTVGRHPSIKDGLGFKREAKNLTSHKAPIFVKEKGKAPMASSAKRNHAFLYYDRRHARNAYNDFDSHAYDSYAMTASSSH

SEQ ID NO: 9974 - protein, 1732 aa, Zea mays
  unsure (1)..(1732): unsure at all Xaa locations
  Clone ID: TF_ZM5043.C4.o4.fg.pep
MDHKGKGIVINDKEKESFVNEPKDDKPTDSGSGHRRKEGKKKKTRRIKEIIYYDDSDESTSSQKDDDNDYKKTVNSNFSFDYSRIQHSSNSHLLSIPLGKPPHFDGEDYGFWSHKMRSHLFSLHPSIWEIVENGMKFDSSDSPMLINEQIHRNAQATTVLLASLCREEYNKVSGLDNAKQIWDTLKISHEGNDITMLTKMELVEGELGRFAMIRGEEPTQTYNRLKTLINKIRSYGSTRWTDHDVVRLMLRSFTVLDPHLVNNIRENPRXHDDDARGSTWKIRXGRMMIKEARYVDDALNGPLHEPQPIALKATRSKESLPSKVAQVEAAGLNDEEMALIIKRFKTALKGRKGQPSKAKTKGKRSCFKCGKLGHFIANCPENDSDQEQGKNGKRENKKVYKKAKGEAHLGKEWDSDCSSSDSDDEGLAATAFNKSALFPNEHHTCLMAREKKVITRNAYDSSSDDESSEDEIDYSSLFKGLDRTKIDKINELIDALNEKDRILEKQEDLLYEEHDKFVSAQNSLALEVKRNGILSCELSTCNETISSLKGEINVLTAKLEVASNSCVENITICTRCKDFDVNACSEHLVSISKLNDEVASLNAQLKTSKSEVDKLKFARDAYTIGRHPSIKDGLGFKREAKNLTSHKTPIPAKEKGKAPMATSVKKNHAFLYHDRKNSRNAFRSYDAYDSHAYDSYAMTASSSHVVHERNVGRRNVVNIPRKVNEPSTIYHALNASFAIYRKDRKVYASGGSSWIIDSGCTNHMTGEKKMFTSYVKNNDXPDSIIFGDGNQGKKKXGSLAFKGVLDDKLYLVDFAKEEAGLDACLIAKTSMGWLWHRRLAHVGMKNLHKLLKGEHVIGLTNVQFEKDRPCAACQAGKQVGGAHHSKNVMTTSRPLELLHMDLFGPVAYLSIGGSKYGLVIVDDFSRFTWVFFLQDKSETQGTLKRFLRRAQNEFELKVKKIRSDNGSEFKNLQVEEFLEEEGIKHEFSAPYTPQQNGVVERKNRTLIDMARTMLGEFKTPERFWSEAVNTACHAINRVYLHRLLKKTSYELLTGNKPNVSYFRVFGSKCYILVKKGRNSKFAPKAVEGFLLGYDSNTKAYRVFNKSSGLVEVSSDVVFVETNGSPREQVVDCDDVDEEDVPTAAIRTMAIGEVHQQEACDQGGAQDDHVMEEDAQPAPPTQVRAMIQRDHPVDQILGDISKGVTTRSRLVNFCEHYSFVSSIEPFRVEEALLDPDWVLAMQEELNNFKCNEVWTLVPRPKQNVVGTKWVFRDKQDEHGVVTRNKARLVAKGYAQVAGLDFEETFAPVARLESIRILLAYAAHHSFRLYQMDVKSAFLNGPIKEEVYVEQPPGFEDERYSDHVCKLSKALYGLKQAPRAWYECLRDFLIVNAFKVGKADPTLFTKTCNGDLFVCQIYVDDIIFGSTNQKSCEEFSRVMTQKFEMSMMGELNYFLGFQVKQLKDGTFISQTKYTQDLLKRFGMKDAKPAKTPMGTDGHTDLNKGGKSVDQKAYRSMIGSLLYSCASRPDIMLSVCMCARFQSNPKECHLVAVKRILRYLVATPCFGLWYPKGSTFDLVGYSDSDYAGCKVDRKSTSGTCQFLGRSLVSWNSKKQTSVALSTAEAEYVAAGQCCAQLLWMRQTLRDFGYNLSKVPLLCDNESAIRMAENPVEHSRTKHIDIRHHFLRDHQQKGDIEVFHVSTENQLADIFTKPLDEKTFCRLRSELNVLDSRNLD

SEQ ID NO: 9975 - protein, 544 aa, Zea mays
  Clone ID: TF_ZmC4916_385.pep
MDPKGKGMVINDKEKESLLNEPRDDKPTDSGSSHKKREGKKKRHIKKIIYYDSDASSSSPRDDDDDDSSSKKKTVNQNYSFDYSRIPFNSNAYLLSIPLGKPSHFDGEDYSFWSHKMDEYNKVSGLDNAKQIWDTLKISHEGNDATMITKIELVEGELGRFAMIRGEEPTQSYNRLKTLVNKIRSYGSTRWMDYDVVRLMLRSFTIIDPHLVNLIRENPRYTKMTPEEILGKFVSRRMMVKEARYVDNMLNGPLLVYEPQLVALKATSSREALPSKVAQVEAAGLNEDEMALIIKRFKTALKGRKEYPNKNKARGKRSCFKCGKTGHFIAQCPDNDNDQEQEKYGKKEKKKSYRKAKGEAHHGKEWDSDCSSFDSDDEGLAASAFNKSSLFPNERHTCLMAKEKKDRLLEKQEDILYEEHDKFVSVQKSLALEIKRNESLSSELSTCHETISSLKSLNDELTTKLEGVNKSSSCEEHVVVCDRCKDFDVDACDEHLISITKLNDEVASLNAQLKTCKINFDQLKFAREAYTVGRHPSIKDGLGF

SEQ ID NO: 9976 - protein, 1599 aa, Zea mays
  Clone ID: TF_ZM4449.C5.o7.fg.pep
MDPKGKGMMINDKEKESLLNEPRDDKPTDSGSSHKKRDGKKKKRRIEKIIYYDNDASSFSPRDDDDDDSLLKKKTVNQNYSFDYSRIPFNSNAHLLSIPLGKPPHFDGEDYSFWSHKMRSHLFSLHPSIWEVVENGMHFDSTDNPVFINEQIHKNAQVTTVLLASLCWDEYNNVSGLDNAKQIWDTLKISHEGNDATMITKMELVEGELGRFAMIRGEEPTQTYNRLKTLVNKIRSYGSTRWTDHDVVRLMLRSFTVIDPHLVDLIRENPRYTKMTPEEILGKFMSGRMMVKEARYVDDALNAPLPVYEPQPVALKATSSREALPSKVAQVEAAGLNEDEMALIIKRFKTTLKGQARGKRSCFKCGKTGHFIAQCPDNDNDQEQEKYGKKEKKKNYKKAKDEAHLGKEWNSDCSSSDSDDEGLAASAFDKSSLFPNERHTCLMAKEKKVCIQNTHKYTSSSDEESSDDEVEYTDLFKGLDRAKVDKINELIDALNEKNRLLERQEDILYEEHEKFVSVQKSLALELKRNEILSFELSACQEYVSSLKNLNDELNVKLEEANATRSCVEHVAICNRCKDVDVNACDEHLIAITKLNDEVASLNAQLKTCKIDFDKLKFARDAYTIGRHPSIKDGLGFRKKTNNLTSQKTLVLNKEKGKAPMASSSQKCHAYTYVRKFSRTAHRSYDHDVFNPHAMFASRSTFVHGRSRPRRNHVVHHVPRKVYASGGSSWIIDNGCTNHMTGEKKMFTSYVKNKDSQDTIIFGDGNQGKVKGLGKIAITSEHSISNVFLVESLGYNLLSVSQLCHMGYNCLFTNVDVSVFRRSDGSLAFKGALDDKLYLVDFSKEEADLDACLIAKTSMGWLWHRRLAHVGMKNLHKLLKGEHVLGLTNDKSETQGTLKRFLKRAQNECELKVKKIRSDNGSEFKNLQVEEYLKEEGVKHEFSAPYTPQQNSVIERKNRTFIDMARTMLGEFKTPERFWSEAVNIACHAINRLYLHRLLKKTSYEVLTGNKPNVSYFRVFGSKCYILVKKGRHSKFTPKAVEGFLLGYDSNTKAYRVFNKSSGLVEVSSDVVFDETNDSPREQVDLDDIDEDDVPTTAMRMMAIDGEQVPQKEGQDQGGAHEEQVMEEEAPSVPPTQIRATIQRHHPVDQILGDISKGVTTRSRLANFCEHYSFVSSIEPFRVEEALQDPDWVLAMQEELNTFKRNEVWSLVPRPKQNIVGTKWVFRDKQDEHGVVTRNKARLVAKGYAQVAGLDFEETFAPVARLESIRILLAYAAHHSFRLFQMDVKSAFLNGPIKEEVYVEQPPSFEGDRYPDHVFKLSKALYGLKQAPRAWYECLRDFLIANAFKVGKVDPTLFTKTCDGDLFVCQIYVNDIIFGSTNQKSCEEFSRVMTQKFEMSMMVKQLKDNTFISQTKYTQDLLKRFGMKDAKPAKTPMGTDGHVDLNKGDSYAGCKVDRKSTSGTCQFLGRSLISWSSKKQTSVALSTVVPEYVAAGQCCTQLLWMSQTLRDFGYNLSKVPLLCDNGSAIRMADNPAEHDRTKHIDIRHHFLRDHQQKGDIEVFQISTENQLADIFTKPLDEKTFCRLRSELNVLDSCNLD

SEQ ID NO: 9977 - protein, 254 aa, Zea mays
  Clone ID: TF_ZM4544.C5.o1.fg.pep
MALIIKRFKTALKGRKEYPNKNKARGKRSCFKCGKTGHFIAQCPDNDDDQEQEKHGKREKKKVYKKAKGEAHLGKEWDSDCSSSDSNDEGLAASAFNKSLLFPNERHTCLMAKEKKDKPETQGTLKRFLRRAQNEFELKVKKIRSDNGSEFKNLQVEEYLEEEGVKQEFSAPYTPQQNGVMCDHKNNKSKINLLPQRWCIPQLKMMDTFLKRRRVIKGEHKKKKSWRKKHHWPLQLKSERQFKEIIPSIRFWVT

SEQ ID NO: 9978 - protein, 184 aa, Zea mays
  Clone ID: TF_ZM4647.C3.o3.fg.pep
MTPEEILRKFVSGRMMVKEARYVDDALNSPLPVYEPQSVALKATSSREALPRQVAQVEATGLNEDEMVLIIKRFKIALKGRKEYPNKNKTKGKRSCFKCGKTGHFIAQCPDNDHDQGQEKGRKREKKKNYRKAKGEAHLGKEWDSDCSSSDSDDEGLAASAFDKSSLFPKERHTCLMAKEKKFK

SEQ ID NO: 9979 - protein, 480 aa, Zea mays
  Clone ID: TF_ZM4840.C5.o1.fg.pep
MDPKGKGMVVNDKEKESFLNEPRDDKPTDSGSSHKKRDGKKRRIKKIVYYDSDASSSSPRDDDDDDSSSKKKMQIHKNAQATTVLLASLCRDEYNKVSGLDNTKQIWDTLKISHEGNDATMITKMELVEGELGRFAMIRGEEPTQTYNRLKTLVNKIRSYGSTRWTDHDVVRLMLRSFTVHQDDARGDSWEVCEQAHDGEEARYVDDALNGPLPVHEPQTIALKATSNRETLPSKVAQVEATGLNEDEMALIIKSFKTALKGRKEYPNKNKTKGKRSCFKCGKTGHFIAQCPDNDDDQEQEKHGKREKKVYKKAKGEAHLGKEWDSDCSSSDSNDEGLAASAFNKSSLFPNERHTCLMAKEKKVSVRDTSKYTTSSDDDSSDDEVDYSSLFKGLDRAKVEKINELIDALNEKDRLLEKQEDILYEEHDKFVSVQKSLALEIKRNEMLSSEFSVCHESVSSLKILNDDLNVKLEEANKSSS

SEQ ID NO: 9980 - protein, 498 aa, Zea mays
  Clone ID: TF_ZM5106.C2.o12.fg.pep
MDPKGKGMVVNDKEKESLFNEPRDDKPTDSGSSHKKRDEKKKRRIKKIIYYDSDASSSSPRDDNNDDDSSSKKKMHMGIVENGMHFDNTDNPVIINEQIHKNAQATTVLLASLCRDEYNKQLATGLNEDEMTLIIKRFKTALGRKEYPNKNKTRGKRSCFKCGKTGHFIAQCPDNDNDQGEEKSGKREKKKNYRKAKGEAQLGKGWDSDCSSSDSDDEGLAASAFNKSSLFPNEHHTCLMAKEKKVHIRDSPKYSSSSDEESSDDEVDYSSLFKGLDRVKADEINELIDALNEKDRLLEKQEDILYEEHDKFVSVQKYLALETKKNEMLSSELSSCHESISSLKNLNDELNAKLEEVSKTSSCVEHVSICNRCKDYDVDACDEHLISITRLNDEVSSLNAQLKTCKIDFDKLKFARDAYTIALLLFMVEVGLGEIMLCLMCLGECAMNLLLFFILATLLLYFHVYASVGSSWIIGSVCTNHMAGEKKMFTSYVKNKDS

SEQ ID NO: 9981 - protein, 1436 aa, Zea mays
  unsure (1)..(1436): unsure at all Xaa locations
  Clone ID: TF_ZmC24260_9.pep
MMMMMTPHPNLMPEWPSMKPLHFSHPLIVSWQREMLRMLGEADDYMHKEKEKFKTLKELYKNLQVSFEELKTSHNDLKENCEKLVDAQKSSIVHEVMVVTKDVGVTCDLLDSLTSEPLPTNSICDKCKISLNDNIALDESKIVVENKVLVDRVNTLTHDLEKAYGGKAKLDFILGSQRCSLNREGLGYVPKKGNNAFIKQNTLFVKECDKVCHKCHKKGHVKKNCPKLKNVSSTCFEHCYVLSHNAKGVHAKFIGTSIVGNKKKAIWVPKTLVTNIQGPKQVWVNYKAGGNHWVLDSGCTQHMTRDMKMFTQMSEEDCSNYDSITFGDNRKGKVKGLGKIAISNDHSISNVLLVESLNFNLLSVAQLCDLGFNCNFTVEDVIISSVDGSNLKFKGFRHENLYLVDFSSNEAKLTTCLFSKASLDKSNVFETFKSFAILAQNQFDFDIKNVRSDNGSEFXNARIDEYCDDKGIKHEFSSKYTPEQNGIVERKNRTLIXMARSMLAEYNISDSYWAEAINTACHSSNRLYYHKLLKKTPYELLIGRKPNISYFRVFGCKCYILRKGSRLSKFEKKCDEGFLLEYSSNSKAYRVFNKTHGIIEEAYDVEFDKTNGSQDESDNLDDVGGTQLINAMKTMAIGEIKPKEDDDENSVVVIPSSSTLNEEDHQSQQHDETMDTHDQGTSRHSVPPNASTSNYQTVSRIHHSIVKDRPVDQIVGDISKGVQTRSRIASFCEHFSFVSCMEPNRVDEALLDVDWVNAMHEELTNFARNEVWELVERPKNHNVIGTKWVFHNKHNEDGVVVRNKARLVAQGYTQIEGLDFGETFAPVARLEAIRILLAYASAHNIKLYQMDVKSAFLNGKISELVYVEQPPGFEDPKRPNHVFKLSKALYGLKQAPRAWYERLRDFLLSKDFKIGKVDTTLFTKRIGKHLFVCQIYVDDIIFGSTNELFCEEFGKMMSKEFEMSMIGEFSFFLGLQIKQLKDGIFISQSKYLKDMLKKFGLENAKPTKTPMETNGHLDLDEGGRFKSKRPHGDDADYTPTTDSEAQSSAGGTESMDTEDFPHIHPDYPIDTTGWTYPKRRFSMAEYYSRRTVNQYTLPSDTNVQFFHTQLQFDVFWGTLVDTNFHKHQVIDWSFMLGQSVMEDLIPKFETCGLYQFMWQRTDFSEMAVKQFLATSEIDIEEESITWMTGFKRYSASFADFATANSLDYGTISAELDLYTEDNFEDFVQFYEPARLGIPRRFGETAGLRHHPAVINKIVRVTILPKSGVKSKIRDKFWNIIQHIMNGEVMNIVLFMMRQLNDLKMDKIQNLAYAPYIMALIKAKTRFEGPCEIVHTPFRPFKNEIGFLTRPLTPFPDDEEDPGYNAGAAPDVEAEQMPPPPPPPQPQQYWQPGPGYFDPYFHNMQQGLQTHIDTRFEGMMTHVDHRLDDMQSRFDSN

SEQ ID NO: 9982 - protein, 691 aa, Zea mays
  Clone ID: TF_ZmC4916_422.pep
MDPKGKGMVVNDKEKDSIFNEPRDDKPTDSGSSHKKKDRKKKRRIKKIIYYDSDASSSSPRDDDDDNDSSPKKKMVNQNYSFDYSCIPYNSNAHLLSIPLGKPPHFDGEDYSFWSHKMRSHLFSLHPSIWEIVENGMHFDSTDNLIFINEQIHKNAQATTVLLASLCRNEYNKVSGLDNTKQIWDTLKISHEGNDATMITKMELVEGELWRFAMIRGEEPTQTYNRLKTLVNKIRSYGSTRWTDRDVVRLMLRSFTVIDPHLVNLIHENPRYTKMTPEEILRKFVSGRMMVKEARYVDDALNGPLPVYEPQPIALKATSSKEALPSKVAQLEAAGLNENEMALIIKRFKTALKGRKEYPNKNKTRGKRSCFKCGKTGHFIANCPDNESDQGQEKSGKEKKKNYRKAKGEAHLGKEWDLDCSSSDSDDEGLTSSAFNKSSLFPNERHTCLMAKEKKVHVRDTPKYTTSSDDDSSDDDVDYSSLFKGLDRAKVEKINELIDALNEKDRLLERQEDILYEEHDKFVSVQKSLALETKRNEMLSSELSICHESVSSLNSLNDELNARLEEVNKTSSCVEHVVICNRCKNFDVDACDEHLASITKLNNEVASLNAQLKTCKVDYDKLKFARDAYTVGRHPSIKDGLGFRKETKNLTSQRTPVLNKEKGKAPMASSPQRNHAFIMIGKLLVVLITIR

SEQ ID NO: 9983 - protein, 606 aa, Zea mays
  Clone ID: TF_ZM4132.C6.o2.fg.pep
MDPKGKGMVVNDKTKESIVNEPRDDKPSDSGSSHKKRDGNKKRRIKKIVYYDSDESSSSPRDDDDEKKKPVNSNFSFDYSRIPVNSNAHLLSIPLGKPPNFDGEDYSFWSHKMRSHLFSLHPSIWEIVENGMLFDSTDNPVLINEQIHKNAQATTVLLASLCMDEYHKVSGLDNAKQIWDTLKISHEGNDATMITKMELVEGELGRFAMIRGEEPTQTYNRLKTLVNKIRSYGSTRWMDHDVIRLMLRSFSVLDPHLVNSIRENPKYTKMTPEEILGKFVSGRMMIKEARYVDEALNGPMPIYEPQTVALKATSSREALPSKVAQVEAVGLNEDEMTLIIKRFKTTLKGRKEHPNKSKAKGKRSCFKCGKTGHFIANCPDNTNDQEQERNGKREKKKTYKKMKGEAHLGKEWDSDCSSSDSDDEGLAASAFNKSLLFPNERHTCLMAKEKKVNARETPKYSTSSDEDSSDDEVDYTSLFKGLDRAKVEKINELIDALNEKDRLLERQEDILYEEHNKFISVQKSLALEIKRNELLSSKLSICNESISSLKILSDDLNANLEVVNKSSPCVEHVVICNRCKDFNIDACVEHLTEREMCPWAISNIFW

SEQ ID NO: 9984 - protein, 407 aa, Zea mays
  Clone ID: TF_ZM4133.C5.o1.fg.pep
MTLIIKRFKTALKGHREYPNKNKTRGKRSCFKCGKTGHFIANCPDNDSDQGQEKSRKKEKKKNYRKAKGEAHLGKEWDSDCSSSDSDDEGLAASAFNKSSLFPNERHTCLMAKEKKVYASGGSSWIIDSGCTNHMTEEKKMFTSYVKNKDSQDTIIFGDGNQGKVKGLGKIAITNEHSISNVFLVESLGYNLLSDKSETQGTLKRFLRRAQNEFELKVKKIRSDNGSEFKNLQVEEYLEEEGVKHEFSAPYTPQQNGVVERKNRMLIDMARTMLGEFNTPERFWSEVVNTACHAINRLYLHRLLKKTSYKLLTGNKPNVSYFRVFGSKYYILVKKGRHSKFAPKVVEGFLLGVEEALQDLDWVLAMQEELNNFKRNEVWSLVPRPKQNVVGTKWVFRNKQDKHGVVT

SEQ ID NO: 9985 - protein, 1429 aa, Zea mays
  unsure (1)..(1429): unsure at all Xaa locations
  Clone ID: TF_ZM4325.C1.o25.fg.pep
MDPKGMGMVVNDKTKESIVNEPRDDKPSDSGSSHKKKDRKKKRRIKKIVYYDSDESSSSPRDDKYEEKKKTVNSNFSFDYSRIPFNSNAHLLSIPLGKPLHFDGEDYPFWSHKMRSHLFSLHPSILEIVENGMLFDSTDNPVFINEQIHKNAQATSILLASLCRDEYNKVSGLDNAKQIWDTLKISHEGNDATMITKIELVEGELGRFAMIRGEEPTQTYNWLKTLVNKIRSYGSTRWTDHDVVRLMLRFFTVLNPHLMNSICENPWYTRITPEEILGKFVSGHMMIKEARYVDEALNGPMPIYEPQPVALKATSSREALPSKVAQVEAAGLNEDEMALIIKRFKTALKGRKEHPNKSKTKGKRSCFKCGKTGHFIANCPDNDSNQGQEKSGKREKKKSYKKAKGEAHLGKEWDSDCSSSNSNDEGLTASAFNKSSLFPSECHTCLMAKERKVSARNNSMYDSSSDEESSDDEVDYSSLFKGLDRAKVEKINELIDALNEKNKLLEKQEDLLYEEHDKFIRVQKSLVLATKRNEILSSEISACHESISSLRSVNDDLIAKLEVANKSSSSVERVVICNRCKNFDVNACNEHLASITKLNGEVASLNAQLKTSKNDFDKLKFARDAYTVGRHPSIKDGLGFRREAKNLTSQRAPISAKEKGKAPMTSNAQRNHAFIYSDRKFSRNAHRSYAYDSHAMIASSSSFVHGRNRPRKNVVHVPRKVYASGGSSWIIDSGCTNHMTGEKKMFTSYVKNKDSQDTIIFGDGNQGKVKGLGKIAITNEHFISNVFLVESLGYNLLSISQLCHMGYNCLFTNVDVSVFRRSDGSLAFKGVLDDKLYLVDFSKEEADLDACLIAKTSMGWLWHHRLAHVGMKNLHRLLKGEHVLGLTNVFFEKDRPCAACQVGKQVGSAHHSKNVMTTSRPLELLHMDLFGPVAYLSLGGSKYDLVVVDDFSHFTWVFFLQDKSETQGTLKRFLRRAQNEFELKVKKIRSDNRSEFKNLQVEEFFEEEGIKHKFSAPYTPQQNGVVERKNRTLIDMARTILGEFKMPERFRSEAVNTACHAINQAYLHRLLKKTSYELLTGNKPNVSCFRVFGSKCYILVKKGRNSKFAPKAVEGFLLGYDSNTKAYRVFNKSSGLVEVSSDVVFDETNGSPREQVDLDNIDEYDVPTDAIRTMAIGDVSQKKACDQGGAQEDQVMEEEAPRPPPTQVRATIQRNHPVDQILCDISKGVTTRSRLANFCEHYSFVSSIEPFRVEEALLDPDWVLAMQEELNNFKRNEVWTLVPCPKQNIVGTKWVFRNKQDEHGVVTRNKARLVAKGYAQVTGLDFEETFAPVARLESIRILLAYAAQHSFRLFQMDVKSAFLNGPIKEEVYVEQPXGFEDERYPDHVXGKADPTLFTKTCDGDLFVCQIYVDDIIFALPFITCKSIWS

SEQ ID NO: 9986 - protein, 1230 aa, Zea mays
  unsure (1)..(1230): unsure at all Xaa locations
  Clone ID: TF_ZM4335.C2.o1.fg.pep
MVVNDKEESLFNEARDGKPNDSGSSHKKRDGKKKRRIKKIIYYDSDASSSSPRDDNDDDSSSKKRTVNQNYSFDYSRMPYNSNAHLLSIPLGKPPHFDGEDYSFWSHKMRSHLFSLHPSIWEIIENGMDEYNKVSGLDNAKQIWDTLKISHEGNDATMITKMELVEGEMGRFTMIRGEEPTQTYNRLKTLNPRYTKMTPEEILGKFVSGRMMVKEARYVDNALNGPLPVYEPKPVALKATSSREALPSKDEMTLIIKRFKTALKGHREYPNKNKTRGKRSCFKCGKTGHFIANCPDNDSDQGQEKSRKKEKKKNYRKAKGEAHLGKEWDSDCSSSDSDDEGLAASAFNKSSLFPNERHTCLMAKEKKVRVRDTPKYTSSSDEESSDNEVDYSSLFKGLDRAKVEKINELIDALNEKDTLLEKQEDILYEEHDKFISVQKSLALEIKRNEMLSSELSACHESVSSLRSLNDDLNAKLEEVNKSTSCVEHVVICNRCKDFDVDASNEHIVSITKLSNEVYASGGSSWIIDSGCTNHMTEEKKMFTSYVKNKDSQDTIIFGDGNQGKVKGLGKIAITNEHSISNVFLVESLGYNLLSVSQLCHMGYNCLFTNVDVSVFRRSDGSLAFKGVLDGKLYLVDFSKEEADLDACLIAKTSMGWLWHRRLAHVGMKNLHKLLKGEHVLGLTNVCFEKDRPCAACQAGKQVGSTHHSKNVMTTSRPLELLHMDLFGPVAYLSIGGSKYGLVIVDDFSCFTWVFFLQDKSETQGTLKRFLRRAQNEFELKVKKIRSDNGSEFKNLQVEEYLEEEGVKHEFSAPYTPQQNGVVERKNRMLIDMARTMLGEFNTPERFWSEVVNTACHAINRLYLHRLLKKTSYKLLTGNKPNVSYFRVFGSKYYILVKKGRHSKFAPKVVEGFLLGYDLNTKAYRVFNKSSGLVEVSSDVVFDDTNGSPREQVDLDDIDEDDVPTAAMRTMAIGDVRPQEQQEQDQPSSSTMVSPPTQDDGQVPQEEARLVAKGYAQVAGLDFEETFAPVARLESIRILLAYAAHHSFRLFQMDVKSAFLNGPIKEEVYVEQPPGFEDVRVMTQKFEMSMMGELTYFLGFQYTQDLLKRFGMKDAKPAKTPMGTDGHVDLNKGVSTPCFGIWYLKGSTFDLIGYSDSDYAGCMVDRKSTSGTCQFLGRSLVSWSSKNQTSVALSTAEAEYVAXGQCCAQLLWMRQTLXDFGYNLSKVPLLC

SEQ ID NO: 9987 - protein, 426 aa, Zea mays
  Clone ID: TF_ZM4509.C2.o1.fg.pep
MDIKGNGMVVNDKEKESIFNEPRDNKPTDSGLSHKKKDGKKKRRIKKIVYYDSDESSSSPRDNDEKRKPEIVENGMQFDSTDNPVFINEQIHKNAQATTVLLASLCRDEYNKVSGLDNAKQIWDTLKISHEGNDATMITKMELVEGELGRFAMIRGEKPTQTYNRLKTLVNKIRSYGSTRWTDHNVVRLMLRSFTVIDPHLVNLIHENPRYTKMTPEEILGKFVSGRMMVKEARYVDDALNGPMPIYEPQPVALKATSSKEALPSKVAQVEALGLNESEMVLIIKCFKTALKGRKEYPNKNKTRGKRSCFKCGKTGHFIANCPDNDSDQGQENSGKREKKAYKKAKGEAHLGKEWDSDCSSSDSDDEGLAASAFNKSSLFPNERHTCLMAKEKKDRLLEKQEDILYEEHDKFVSVQKSLALELKEY

SEQ ID NO: 9988 - protein, 589 aa, Zea mays
  unsure (1)..(589): unsure at all Xaa locations
  Clone ID: TF_ZM4576.C1.o19.fg.pep
MDPKGKGMVVNDKEKESIFNEPRDDKPTDSGSSHKKKDGKKKRRIKKIVYYDSDESSSSPRDDDYDEKKKSVNSNFSFDYSCIPYNSNAHLLSIPLGKPPHFDGEDYAFWSHKMCSHLFSLHPSIWEIVENGIQFDSTDNPVFINEQIHKNAQATTILLASLCRDEYNKVSGLDNTKQIWDTLKISHEGNDATMITKMELVEGELGRFAMIRGEEPTQTYNRLKTLVNKIRSYGSTRWTDHDIIRLMLRSFTVIDPHLVNLIRENPRYTKMTPEEILGKFVSGRMMVKEARYVDDALNGPMPVYEPQPVALKATSSREALPSKVAQVEAAGLNEDEMALIIKRFKTALKGRKEHPNKSKAKGKRSCFKCGKTGHFIANCPDNANDQEQEKNEKREKKKAYKKAKGEAHLGKEWDSDCSSSDSDDEGLTASAFNKSSLFPNERHTCLMAKEKKNRLLEXQEDILYEEHDKXCKDFDVDACVEHLTSITKLNGEVTSLNAQLKTCKNDFDKLKFARDAYTVGRHPSIKDGHGFRKEVKNLTSQRAPIPNKEKGKAPMASSNQKNHAFMYNDRKFLEVLIIIGVIMLLIHMP

SEQ ID NO: 9989 - protein, 651 aa, Zea mays
  Clone ID: TF_ZM4582.C2.o1.fg.pep
MDIKGNGMVVNDKEKESIFNEPRDNKPTDSGLSHKKKDGKKKRRIKKIVYYDSDESSSSPRDNDEKRKPQIHKNAQATTVLLASLCRDEYNKVSGLDNAKQIWDTLKISHEGNDATMITKMELVEGELGRFAMIRGEKPTQTYNRLKTLVNKIRSYGSTRWTDHNVVRLMLRSFTVIDPHLVNLIHENPRYTKMTPEEILGKFVSGRMMVKEARYVDDALNGPMPIYEPQPVALKATSSKEALPSKVAQVEALGLNESEMVLIIKCFKTALKGRKEYPNKNKTRGKRSCFKCGKTGHFIANCPDNDSDQGQENSGKREKKAYKKAKGEAHLGKEWDSDCSSSDSDDEGLAASAFNKSSLFPNERHTCLMAKEKKDKSETQGTLKRFLRRAQNEFELKVKKIRSDNGSEFKNLQVEEYLEEEGIKHEFSAPYTPQQNGVVERKNMTLIDMARTMLGEFKTPERFWSEAVNTTCHAINRLYLHRLLKKTSVEEALQDPDWVLAMQEKLNNFKRNEVWSLVPRPKQNVVGTKWVFHNKQDEHGVVTRNKARLVAKGYAQVAGLDFEETFAPVARLESIRILLAYAAHHSFSLFQMDVKSVFLNGPIKEEVYVEQPPGFEDDRYPDHVFKLSKALHGLKQAPRAWYECLRDFEST

SEQ ID NO: 9990 - protein, 1279 aa, Zea mays
  unsure (1)..(1279): unsure at all Xaa locations
  Clone ID: TF_ZM4622.C5.o2.fg.pep
MDPKRKGMVVNDKEKESIFNEPRDDKPTDSGSSHKKKDGKKKRRIKKIIYYDSDASSSSPRDDDDSSSKKKTINQNYSFDYSRMSYNSNVHLLSIPLGKPPHFDGEDCSFWSHKMCSHLFSLHPSIWEIVENGMHFDSTDTPVMINEQIHKNAQATAVLLASLCRDXVQQNDARGDPWKIXSGRMMVKKARYVDDALNGPLPIYELQLVALKATSSKEALPSRDERSTPNKNKTRGKRSCFKCGKTGHFIANCPDNDSDQGQENSGKEKKKNYRKAKGEAHLGKEWDSVCSSSDSDDEGLAASAFNKSSLFPNERHTCLMAKEKKDRAKVEKNNELIDALNEKDRLLEKQEDILYEEHDKFISIQKSLALEIKRNEMLSSELSACHESVSNLKSLNDDLNAKLEEVNKSSSCVEHVVICNRCKDFDVDACNEHIVSITKLSNEVASLNAQLKTCKDDFNKLKFARDAYTIGRHPSIKDGLGFRKETKNLTSQKAPVLNKEKGKAPMASSSQKCHAYIYDRKFSRNAYRDYDHAMIASSSTYDCSRNRPRRNHAVSHAPRRNNVVSHVPRKMCNEPTTVFHTCNTSFILSCKNAKVVARKLGSKCKGDKTCIWVPKTIVTNLAGPNKSWVYASGGSSWIIDSGCTNHMTGEKKMFTSYVKNKDSQDMIIFGDGNQRKVKGLGKIAITNEHSISNVFLVESLGYNLLSAGKQVGSTHHSKNVMTTSRPLELLHMDLFGPVAYLSIGGRTLKRFLRRAQNEFELKVKKIRSDNGSEFKNLHVEEYLEEEGVKHEFSAPYTPQQNGVVERKNRTLIDMARTMLGEFKTPERFWSEAVNTACHAINQLYLHRLLKKTSYELLTGNKPNVSYFRVFGSKCYILVKKVSSDVVFDETNGSPREQVDLDDIDEDDVPTAPMRTMAIGYVRPQEQHEQDQPSCSTMVHPPTQDDEHVPQEEGPDQGGAQEEQVMEEEAPQVPPTQVRATIQRNHPIDQILGDISKGVTTRSRLAIFCEHYSFVSSIEPFGVEETLQDPYWVLAMQEELNNFKRNEVWSLVPRPKQNVVETKWVFHNKQDEHRVVTRNKARLVAKDYAAHHSFRLFQMDVKSAFLNGPIKEEVYVEQPPGFEDDRYPDHVFKLSKALYGLKQAPRAWYECLRDFLIANAFKVGKADPTLFTNTCDGDLFVCQIYVDDIIFGSTNQKSCEEFSRVMIQKFEMSMMGELTYFLGFQVKKLKDDTFISQTKYTQDLIKRFGMKDAKPTKTPMGTDGHVDLNKGGTSVDQKAY

SEQ ID NO: 9991 - protein, 601 aa, Zea mays
  unsure (1)..(601): unsure at all Xaa locations
  Clone ID: TF_ZM4679.C2.o5.fg.pep
MEKIREVMAGLFQYRFRVSVARVGQSYQKPYDHLFETVPYPQGARIPEFSKFSDVYIAEFVWPAKAKSSACSSLQPVQKNRQEEIKFTFNVAKCDRIFDELLKNDNIKLTHTIPPMDKLKRCAYSDQGGAVSPNHRWRFDYLHGCRRIRFLEVLRARSLGFLSNTRGNHLVGGIIAKLPPTWRIFFMALKHKKEAMIVKSIISTLDVEEVRSKDVPRSGPMDSGTSNANVVEGKSGGKNKNKTNRKPKAKQNSDFKKKNIVDLTCFVCGESGHIARKCRNRKGKKGDGQKTVNVAIADAGNSGGGLFRLSVADDCNNVANSVSYSELNLYLVKTKDEALNCFEIYKAKVENQLAKKIKRVRSDRGGEYLSNKFGEYCVEHGIIHETTAPYSPQSNGVAERKNQTLIDLVNAMLDSSGLPKSWCGEAILATCFVLNRVPSAKGDKTPYEGWKGDTLKTLEEAYASPDAEHWKEAVHNEMESILTNGTWEICDLPVGCKXYGIKWIFKKKLKPDGIVDKYKXGLWPRDLPKIKAAFLNGELDEEIYMKQSDGFVTHGQENMDLGEADVILNIKLIKGENGIILKQSHYVENIPKLLQHLLILV

SEQ ID NO: 9992 - protein, 1228 aa, Zea mays
  Clone ID: TF_ZM4823.C5.o4.fg.pep
MDPKGKGMVVNDKEKESIFNEPRDDKPTDSGSSHKKRDGKKKRRIKKIIYYDSDASSSSPREDDDDDDSSKRKTHLCARDEYNKVSGLDNAKQIWDTLKISHEGNDATMITKIELVEGELRRFAMIRGEEPTQTYNRLKTLVNKIRSYGSTRWTDHDVVRLMLRSFTVIDPHLVNLIRENPRYTKMTSEEILGKFVSGHMMVKEARYVDDALNGPLPVYEPQPIALKATSSREALPSRVAQVEATGLNEDEMALIIKRFKTALKGRKEYPNKNKIRGKRSCFKCGKTGHFISQCPDNDNDQAQERHGKKEKKKNYRKAKGEAHLGKEWDSDCSSSDSDDEGLAASTFDKSSLFPNERHTCLMAKEKKVHIRDTPKYSSSSDEESSDDEVDYSELFKGLDRAKVYASGGSSWIINSGCTNHMTEEKKMFTSYVKNKDSQDTIIFRDGNQGKVKGLGKIAITNEQSISNVFLVESLGRSDGSLAFKSVLDGKLCLVDFSKENAGLDACLIANTNMGWLWHHHLAHVGMKNLHKLLKGDRVLGLTDVCFEKNRPCATYKSETQGTLKRFLRKAQNEFELKVKKIRSDNGSEFKNLQVEEFLEEEGIKHEFSAPYTSQQNGVVERKNRTLIDMARTMLGEFRTPERFWSEVVNTACHAINRLYLHRLLKKTSYKLLTGNKPNVSYFRVFGSKCYILVKKGRHSKFAPKAVEGFLLGYDLNTKAYRVFNKSSGLVEVSSDVVFDETNGSQREQVDLDDIDEDEVPTAAMRMMAIGDVRPQELQEQDQPSSSTLVHPPTQDDGQVPQEQERDQGGAQEEHVMEEEAPQAPPTQVRASIQGHHPVDQILGEISKGVTTRSRLATFCEHYSFVSSIEPFRVEEVLHDPDWMLAMQEELNNFKRNEVWSLVPRPKQNVVGTKWVFRNKQDEHGVVTRNKARLVAKAYAGHHSFRLFQMDVKSAFLNGPIKEEVYVEQPPGFEDDWYPDHVYKLSKALYGLKQAPRGCYPSLLQKPCDGDLFVCQIYVDDIIFGSTNQKSCEEFSRVMMQKFEMSMMGELTYFLGFQVKQLKDGTFISQTKYTQDLLKRFGMKDAKPAKTLMGTDGHLDLNKGGKSVDQKAYRSMIGSLLYLCASRPDIMLSVCMCARFQSDPKECHLVAVKRILRYLVSTHCFGIWYPKGSTFDLIGYADSDYAGCKVDKKSTSGTCQFLGRSLVSRSSKKQTSVALSTIEAEYIAA

SEQ ID NO: 9993 - protein, 477 aa, Zea mays
  Clone ID: TF_ZM4904.C1.o13.fg.pep
MDPMGKGMVINDKEKESFLNEPKDDKPTDSGSSHKKKDRKKKRHIKKIVYYDIDESSSSQRDDDDKKKKTVNSNFSFDYSRIPQNSNAHLLSIPLGKPPHFDGEDYGFWSHKMRSHLFSLHPSIWEIVENGMQFDSTDNPMEEYHKVGGLDNAKQIWDTLKISHEGNDATMITKMELVEGELGRFAMIKGEEPTQTYNRLKTLVNKIRSYGSTRWTDHDAVRLMLRSFTVLDPHLVNSIRENPRYTKMTPEEILRKFVSGRMMIKEARYVDEALNGPMPIHEPQTVALKATSSKEGLPSKRFKTALKGRKEHPNKSKTKGKRSCFKCGKTGHFIANCPDNDRDQGQEKSGKRENKKVYKKAKVEAHLGKEWDSDCSSSDSDDEGLAASAFNKSSLFPNEHHTCLMAKEKKVYASGGSSWIIDSGCTNHMTGEKKMFTSYVKNKDSQDSIIFGDGNQGKVKGLGKIAISSEHSYLMCF

SEQ ID NO: 9994 - protein, 204 aa, Zea mays
  Clone ID: TF_ZM4909.C3.o1.fg.pep
MDPKGKGMVVNDKEKESIFNEPRDDKPTDSGSSHKKKDGKKKRRIKKIVYYDSDESSSSPKDGDDDSHEYNKVSSLDNAKQIWDTLKISHEGNDATMITKMEFVEGELGRYTKMTPEEILGKLVSGRMMVKEARRFKTALKGRKEYPNKNKAKGKRSCFKCGKTGHFIANCPDNDSDQGQEKSGKKEKKKSYRKAKGEAHLGKE

SEQ ID NO: 9995 - protein, 668 aa, Zea mays
  unsure (1)..(668): unsure at all Xaa locations
  Clone ID: TF_ZM5004.C1.o6.fg.pep
MTREKKMFTSYIKNKDXQDTIIFGDGNQGKVRGLGKIAITNEHSISNVFLVESLGYNLLSVSQLCHMGYNCLFTNVDVSVFRRSDGSLAFKGVLDDKLYLVDFLKEEAVLDACLIAKTGLGWLWHHRLSHVGMKNLHKLLKGEHVLGLTNICFEKDRPCAACQAGKQVGRTHHSKNVMTTSRPLELLHMDLFGPVAYLSIGGSKYGLVIIDDFFRFTWVFFLQDKSETQGTLKRFLRRAQNEFELKVKKIRSDNGSEFKNLQVEEYLEEEGVKHEFSAPYTPQQNGVVERKNMMLIDMERTMLGEFKTLERFWSEAVNTACHAINRPYLHRLLKKTSYELLTGNKPNVSYFHVFGSKCYILVKKGRHSKFAPKAVEGFLLGYDSNTKAYRVFNKSSGLVEVSSDVVFDETNGSPREQVDLDDIDEDDVPTAAMHTMAIGDVRPQEQQEQDQPSSSTMVQPPTQDGEQPGATSKAKCCGNQVGVPQQARRARVVTRNKARLVAKGYAQVAGLDFEETFAPVARIESIRILLAYAAHHSFRLFQMDVKSAFLNGPIKEEVYVEQPPGFEDDRYPDHVFKLSKALYGLKQAPRAWYECLRDFLIANAFKVGKADPTLFIKTCDGDLFVCQIYVDDIIFGSTNQKSCEEFSRVMTQKFKMSMMGKLTYFLGF

SEQ ID NO: 9996 - protein, 1460 aa, Zea mays
  Clone ID: TF_ZM5105.C4.o2.fg.pep
MDPKGKGMVVNDKEKESFLNEPRDDKPTDSGSSHKKKDGKKKRDEYNKVSGLDNAKQIWDTLKISHEGNDATMITKMELVEGELGRFAMIRGEEPTQTYNRLKTLVNKIRSYGSTRWTDHDVVRLMLRSFTVIDPHLVNFICENPRYTKMTPEEILGKFVSGRMMVKEARYVDDALNGPMAIYEPQPVALKATSSNREALPSKVAQVEAAGLNEDEMALIIKRFKIALKGRKEHPNKSKAKGKRSCFKCGKTGHFIANCPDNANDKEQENSGKREKKKAYKKAKGEPHLDKKWDSDCSSSDSDDEGLAASNFNKSYLFPNECHTCLMAKEKKVSTRDTPKYTTSSDDDSSDDEVDYTSLFKGLERTKVDKINELIDALNENNRLLEKQEDILYEEHDKFVSVQKSLALDIKRNEMLSSELSACHETVSSLKSINDDLNAKLEVVNKSSSFTEHVVICNRCKDFDVDACVEHLTSITKLNGEVASLNAQLKTCKNDFDKLKFARDAYTVGRHPSIKDGLGFRKEAKNLTSQRAPIPNKEKGKAPMASSNQKNHAFMYNDRNFSRSSHYNRSYNAFDSHAMIASSSNFNVVARKMGSKCKGDKTCIWVPKTIVTNLVGPNKSWVHASGGSSWIIDSGCTNHMTGEKKMFTSYVKNKDSQDTIIFGDGNQGKVKGLGRIAITNEHSISNVFLVESLGYNLLSVSQLCHMGYNCLFTNVDVSVFRRSDGSLVFKGVLDGKLYLVDFSKEEADLDACLIAKTSMGWLWHRRLAHVGMKNLHKLLKGEHVLGLTNDKSETQGTLKRFLRRAQNEFELKVKRIRSDNGSEFKNLQVEYLEEEGIKHEFSAPYTPQQNGVVERKNRMLINMARTMLGEFKTPERFWSEAVNTACHAINRLYLYRLLKKTSYELLISNKPNVSYFRVFGSKCYILVKKGLVEVSSDVVFDETNDSPREQVDLDDIDEDDVPTAAIHTMAIGDVRPQEQQQQDQPSSSTMVHPPTQDDEQVHQEGACDQGGAQEEQVIEEEVPLAPPTQVRAIIQRNHHVDQILGDISKGVTTRSRLANFCEHYSFVSSIEPFRVEEALQDPDWVLAMQEELNNFKRNEVWSLVPRPKQNVVGTKWVFRNKQDEHGVLDLWQKETFAPVARLESIRILLAYAAHHSFRLFQMDVKSAFLNGPIKEEVYVEQPPGFEDDKYPDHVFKLSKALYRLKQAPRAWYECLRDFLIANAFKVGKVDPTLFTKTCDGDLFVCQIYVDDIIFGSTNQKSCEEFSMVMTQKFEMSMMGELNYFLRFQVKQLKDGTFISQTKYTQDLLKRFGMKDAKPAKTPMGTNGHVDLNKGGRSVDQKAYRSMIGSLLYLCASRPDIMLSVCMCARFQSDPRECHFVAVKRILRYLVATPCFGIWYPKGSTFDLVGYSDSDYAGCKVDRKSTSGTCQFLGRSLVSWSSKKQTSVALSTVEAEYVAAG

SEQ ID NO: 9997 - protein, 447 aa, Zea mays
  Clone ID: TF_ZmC4916_440.pep
MDPKGKGMVVNDKEKESIFNEPRDDKPTDSGSSHKKRDGKKKRRIKKIIYYDSDASSYSPRDDDDDSSSKKKTVNQNYSFDYSRIPYNSNAHLLSIPLRKPPHFDGEDYSFWSHKMRSHLFSLHPSIWEIVENGMHFDSTDNPMIINEQIHKNAQATTVLLASLYRNEYNKVSGLDNAKQIWDTLKISHEGNDATMITKMELVEGKLGRFTMIRGEEPTQTYNRLKTLVNKIRSYGSTRWTDHDVVRLMLRSFTVIDPHLFNLIRENPRYTKMTPEEILEKFVSGRMMVKEARYVDDALNGPLPIYEPQPVALKAMSGRETLPSKVAQVEATGLNENEMALIIKRFKTALKGRKEYPNKNKTRGKRSCFKCGKTGHFIAQCPVNDNDQGQEKHGKREKKKVYKKVKGEAHLGKEWDSDCSSSDSDDEGLSALAFDKSSLLLGFSLPF

SEQ ID NO: 9998 - protein, 864 aa, Zea mays
  Clone ID: TF_ZM4989.C10.o1.fg.pep
MDPKGKGMVINDKEKESFVNEPNDDKPTDSGSGHKRKDGRKKKARRIKEIVYYDSDESSSSQKDNDDYDRRKTVNSNFSFDYSRIPHSSNAQLLPIPLGKPPHFDGEDYGFWSHKMCTHLFSLHPSIWEIVESGMKFDSSDSPMFINEQIHRNAQATTVLLASLCRDEYHKVSGLDNAKQIWDTLKISHEGNDVTLLTKMELVEGELGRFAMIRGEEPTQTYNRLKTLINKIRSYGSTRWTDHDVVRLMLRSFTVLDPHLVNNIRENPRYTKMSPEEVLGKFVSGRMMIKEARYVDDALNGSINEPQPLALKATRSKEALPSKVAQIEAAGLNDEEMALIIKRFKTVLKGRKGQLSKTKAKGKRSCFKCGKLGHFIANCPNNDSDQDQGNKREKKKNYKKAKGEAHLGKEWDSDCSSSDSDNEGLAATAFNKSSLFPNERHTCLMAREKKVSTHNTSTYASSSEDESSDDDEIDYSCLFKGLDRTKVDKINELIDALNDRNILLEKQEDLLYEEHDKFVEAQKSLALEIKRNEMLSSELSSCHETIAKLKSFNDDLNAKLEVATSLNAQLKTSKNEFDKLKFARDAYTIGRHPSIKDGLGYKREAKNLTSHKAPISAKEKGKAPMATSTKKNHAFLYHDRRQSRSAYRGYNAYDDFDSHHMIASSSSYMHGRNMSRRNAIHHVPRKNVSHASRKVVNEPSTIYCALNASFAIRRKDKKIVARKLGAKCKGDKTCIWVPKDICTNLVGPNMSWVYASGGSSWIIDSGCTNHMTGEKKMFTSYVKNKDSQDSIIFGDGNQGKDKSETQGTLKRFLRRAQNEFELKVKKIRSDNGSEFKNLQVEEFLEEEGIKHEFSAPYTPQQNGV

SEQ ID NO: 9999 - protein, 2127 aa, Zea mays
  unsure (1)..(2127): unsure at all Xaa locations
  Clone ID: TF_ZmC24260_2.pep
MASNNNVHIGKPPHFDGNNYDYWKIRMSMHLRAMGGKIWPIVRDGFVVLKEDEPSVSDNENILTNDQAMNVFYDALDINEFNRIKNLTTAHEIWVKLMEIHEGTTIVKSAKLYVCKGKFEQFIMKEDESVSDMFNRLNEIVNELKGLGFNVPDVDFTHKFLRSLPEKYETIVTMLVRSDLSTTSPTEVLGEILTQDIFKKSQADALSLAKKVKNESIALKAKASKAIEKEDSNDEENESESDGDMALFVRKFNKFMKMKRGQPRRGQTSRRNAFNDRKCFECGEPGHIAMNCPSKKKKGKDESDKKKKKYYNKKKDGKAYLVEWDSDDSSDDDDDDTSSKLNAGIAIKEAPSLFSSPHCLMAKGDAKALKELYKNLQVSFEELKTSHNDLKENCEKLADAQKSSIVHEVEVVTKDVGVTCDLLDSLTSEPLPTNSICDKCKISLNDNIALDESKIIVENEVLVDRISTLTHDLEKAYGGKKNLDFILGSQRCSLNREGLGYVPKKGKNAFVKQKTLFVKECDKVNYKAGGNHWVLDSGCTQHMTGDMKMFTQMSDEDCSNYDSITFGDNRKGKVKGLGKIAISNDHSISNVLLVESLNFNLLSVAQLCDLGFCCNFTVEDVIISSVDGSNLKFKGFRHENLYLVDFSSNEAKLTTCLFSKASLGWLWHRRLGHVGMKQLNRLTKHDLVRGLKDVKFEKNKLCSSCQAGKQVANTHPNKSQMSTHRPLELLHMDLFGPTSFVSIGGNSYCLVIVDDYSRFTWVYFLRDKSNVFETFKSFAILAQNQFDFDIKKVRSDNGSEFKNARIDQYCDDKGIKHEFSSKYTPXQNGIVERKNRTLIDMARSMLAEYNISDSYWAEAINTACHSSNRLYCHKLLKKTPYELLIGRKPNISYFRVFGCKCYILRKGSRLSKFEKKCDEGFLLGYSSNSKAYRVFNKTHGIIEEAYDVEFDETNGSQDESENLDDVGGTQLINAMKTMAIGEIKPKEDDDENSVVVIPSSSTINEEDHQSQQLNETIDTHDQGTSRPPIPPNASTSNYQTVSRIHHSIVKDHPVDQIVGDISKGVQTRSRIASFCEHFSFVSCVEPNRVDEALLDVDWVNAMHEELNNFARNEVWELVERPKNHNVIGTKWVFRNKHNEDGVVVRNKARLVAQGYTQIEGLDFGETFAPVARLEAIRILLAYACAHNIKLYQMDVKSAFLNGKISELVYVEQPPGFEDPKRPNHVFKLSKALYGLKQAPRAWYERLRDFLFSKDFKIGKVDTTLFTKRIGKDLFVCQIYVDDIIFGSTNELFCEEFGKMMSKEFEMSMIGELSFFLGLQIKQLKDGIFISQSKYLKDMLKKFGLENAKPIKTPMATNGHLDLDEGGTMVDQKLYRSIIGSLLYITASRPDVMFSVCMCARFQASPREIHLKAAKRILRYLKYTPNIGLWYPKGAQFELIGYSDSDYAGCKVDRKSTSGCCQFLGRSIVSWSSKKQNSVALSTAEAEYISAGNCCAQLLWMKQTLLDYGIIFKNVPLMCDNESAKVDRSWKNECQAADRPPMDRGPSAESGNGQSEQPRRPSEILRARTVRRPSADRPRQGRKRDKDADLPVVLPRSISLALHSPYTLLCRVGFGGLRKKLAGRFKSKRPRGNDDDYTPTTDSEAQSSAGGTESMDAEDFLHVHPDYPIDIQGWTYPKRRFSMAEYCSRRTVNQYALPSDTNIQFFHTQLQFDVFWGTLVDTNFHKHQVIDWSFLLSQSVMEGLIPKFETCGLYQFMGQRTDFNEMAVKQFLATSEIDIAEESITWMTGFKRYSASFADFAAANSLNYGTISAGVDLYTEDNFEDFVQFYEPARLGIPRRFGETAGLRHHPAVINKIARVTILPKSGDKSKIRDKFWNIIQHIMNGEVMNIVLFMMRQLNDLKMDKNQNLAYAPYIMALIKSKTRFEGPCEIVHTPFRPFKNEIGFLTRPLTPFPDDEEDPGYAGGAAPNVEEQQMPPPPPPPQPQHYWEPAPGYFDPYFHNMQQGLETHIDARFDGLMSHVDHRLDDMQSRFDSNWDALNSEFSDFRDQIHTNVTDPIMSRLNNMQQSFQDNMSALSSQFDNLSTTDNMHDISQRQQQLQQDFGQFSSLFDTFSTHYYNMHPPPSDQ

SEQ ID NO: 10000 - protein, 1560 aa, Zea mays
  Clone ID: TF_ZM4182.C3.o1.fg.pep
MASNNNVHIGKPPHFDGNNYDYWKIRMSMHLRAMGGKIWPIVRDGFVVLKEDEPSVSDNENILTNDQAMNVFYDALDINEFNRIKNLTTAHEIWVKLMEIHEGTTIVKSAKLYVCKGKFEQFIMKEDESVSDMFNRLNEIVNELKGLGFNVPDVDFTHKFLRSLPEKYETIVTMLVRSDLSTTSPTEVLGEILTQDIFKKSQADALSLAKKVKNESIALKAKASKAIEKEDSNDEENESESDGDMALFVRKFNKFMKMKRGQPRRGQTSRRNAFNDRKCFECGEPGHIAMNCPSKKKKGKDESDKKKKKYYNKKKDGKAYLVEWDSDDSSDDDDDDTSSKLNAGIAIKEAPSLFSSPHCLMAKGDAKALKELYKNLQVSFEELKTSHNDLKENCEKLADAQKSSIVHEVEVVTKDVGVTCDLLDSLTSEPLPTNSICDKCKISLNDNIALDESKIIVENEVLVDRISTLTHDLEKAYGGKKNLDFILGSQRCSLNREGLGYVPKKGKNAFVKQKTLFVKECDKVNYKAGGNHWVLDSGCTQYMTGDMKMFTQMSDEDCSNYDSITFGDNRKGKVKGFCCNFTVEDVIISSVDGSNLKFKGFRHENLYLVDFSSNEAKLTTCLFSKASLGWLWHRRLGHVGMKQLNRLTKHDLVRGLKDVKFEKNKLCSSCQAGKQVANTHPNKSQMSTHRPLELLHMDLFGPTSFVSIGGNSYCLVIVDDYSRFTWVYFLRDKSNVFETFKSFAILAQNQFDFDIKKVRSDNGSEFKNARIDQYCDDKGIKHEFSSKYTPKQNGIVERKNRTLIDMTRSMLAEYNISDSYWAEAINTACHSSNRLYCHKLLKKTPYELLIGRKPNISYFRVFGCKCYILRKGSRLSKFEKKCDEGFLLGYSSNSKAYRVFNKTHGIIEEAYDVEFDETNGSQDESENLDDVGGTQLINAMKTMAIGEIKPKEDDDENSVVVIPSSSTINEEDHQSQQLNETIDTHDQGTSRPPIPPNASTSNYQTVSRIHHSIVKDHPVDQIVGDISKGVQTRSRIASFCEHFSFVSCVEPNRVDEALLDVDWVNAMHEELNNFARNEVWELVERPKNHNVIGTKWVFRNKHNEDGVVVRNKARLVAQGYTQIEGLDFGETFAPVARLEAIRILLAYACAHNIKLYQMDVKSAFLNGKISELVYVEQPPGFEDPKRPNHVFKLSKALYGLKQAPRAWYERLRDFLFSKDFKIGKVDTTLFTKRIGKDLFVCQIYVDDIIFGSTNELFCEEFGKMMSKEFEMSMIGELSFFLGLQIKQLKDGIFISQSKYLKDMLKKFGLENAKPIKTPMATNGHLDLDEGGTMVDQKLYRSIIGSLLYITASRPDVMFSVCMCARFQASPREIHLKAAKRILRYLKYTPNIGLWYPKGAQFELIGYSDSDYAGCKVDRKSTSGCCQFLGRSIVSWSSKKQNSVALSTAEAEYISAGNCCAQLLWMKQTLLDYGIIFKNVPLMCDNESAVKLATNPVQHSRTKHIDIRHHFLRDHVGKGDISIYSIGTDDQLADIFTKPLDETRFCSLRSEMNVIDISNVA

SEQ ID NO: 10001 - protein, 1759 aa, Zea mays
  Clone ID: TF_ZM5061.C1.o1.fg.pep
MASNNNVHIGKPPHFDGNNYDYWKIRMSMHLRAMGGKIWPIVRDGFVVLKEDEPSVSDNENILTNDQAMNVFYDALDINEFNRIKNLTTAHEIWVKLMEIHEGTTIVKSAKLYVCKGKFEQFIMKEDESVSDMFNRLNEIVNELKGLGFNVPDVDFTHKFLRSLPEKYETIVTMLVRSDLSTTSPTEVLGEILTQDIFKKSQADALSLAKKVKNESIALKAKASKAIEKEDSNDEENGSESDGDMALFVRKFNKFMKMKRGQPRRGQTSRRNAFNDRKCFECGEPGHIAMNCPSKKKKGKDESDKKKKKYYNKKKDGKAYLVEWDSDDSSDDDDDDTSSKLNAGIAIKEAPSLFSSPHCLMAKGDAKVKIITDLNDVNDDDDIDDVDDDGYSYDDLVRMLGEADDYMHKEKEKFKALKELYKNLQVSFEELKTSHNDLKENCEKLGNAQKSSIVHEVEVVTKDVGVTCDLLDSLTSEPLPTNSICDKCKISLNDNIALDESKIIVENEVLVDRISTLTHDLEKAYGGLGYVPKKGKNAFVKQKTLFVKECDKVNYKAGGNHWVLDSGCTQHMTGDMKMFTQMSDEDCSNYDSITFGDNRKGKVKGLGKIAISNDHSISNVLLVESLNFNLLSVAQLCDLGFCCNFTVEDVIISSVDGSNLKFKGFRHENLYLVDFSSNEAKLTTCLFSKASLGWLWHRRLGHVGMKQLNRLTKHDLVRGLKDVKFEKNKLCSSCQAGKQVANTHPNKSQMSTHRPLELLHMDLFGPTSFVSIGGNSYCLVIVDDYSRFTWVYFLRDKSNVFETFKSFAILAQNQFDFDIKKVRSDNGSEFKNARIDQYCDDKGIKHEFSSKYTPEQNGIVERKNRTLIDMARSMLAEYNISDSYWAEAINTACHSSNRLYCHKLLKKTPYELLIGRKPNISYFRVFGCKCYILRKGSRLSKFEKKCDEGFLLGYSSNSKAYRVFNKTHGIIEEAYDVEFDETNGSQDESENLDDVGGTQLINAMKTMAIGEIKPKEDDDENSVVVIPSSSTINEEDHQSQQLNETIDTHDQGTSRPPIPPNASTSNYQTVSRIHHSIVKDHPVDQIVGDISKGVQTRSRIASFCEHFSFVSCVEPNRVDEALLDVDWVNAMHEELNNFARNEVWELVERPKNHNVIGTKWVFRNKHNEDGVVVRNKARLVAQGYTQIEGLDFGETFAPVARLEAIRILLAYACAHNIKLYQMDVKSAFLNGKISELVYVEQPPGFEDPKRPNHVFKLSKALYGLKQAPRAWYERLRDFLLSKDFKIGKVDTTLFTKRIGKDLFVCQIYVDDIIFGSTNELFCEEFGKMMSKEFEMSMIGELSFFLGLQIKQLKDGIFISQSKYLKDMLKKFGLENAKPIKTPMATNGHLDLDEGGTIVDQKLYRSIIGSLLYITASRPDVMFSVCMCARFQASPREIHLKAAKRILRYLKYTPNIGLWYPKGAQFELIGYSDSDYAGCKVDRKSTSGCCQFLGRSLVSWSSKKQNSVALSTAEAEYISAGNCCAQLLWMKQTLLDYGIIFKNVPLMCDNESAVKLATNPVQHSRTKHIDIRHHFLRDHVGKGDISIYSIGTDDQLADIFTKPLDETRFCSLRSEMNVIDISNKVGRDWQNEYQAADRPPMDRGPSAASGNGQSEQPRRLSESRFDSNWDALNSEFSDFRDQIHTNVTDPIMSRLNNMQQSFQDNMGALSSQFDNLSTTDNLHDISQRQQQLQQDFGQFSSLFDTFSTHYYNMHPPPSDQ

SEQ ID NO: 10002 - protein, 289 aa, Zea mays
  Clone ID: TF_ZmC5918_2.pep
MARVFVGNLDPRVTAREIEDEFRTFGVLKSVWVARKPPGFAFIDFDDRRDAQDAIRDLDGKNGWRVELSTKDGGGRGRDRNGSDMKCYECGEVGHFARECRLRIGSGGLGSGRRRSRSPRYRSRSRSRSRSPRHRRSPSYGRRSYSPRDRSPRRRSYSRSPPRSRARSLSRSPPLPPPPPRNNSMSPRGAREMSRSSPPPPKNNSSSPREAREMSRSPPPPAKNNRSSPREAREMSRSPPPPPPRNNSRSPPGARDVSRSPPPPPDARRSYSRSPEQQPQHESPYANDA

SEQ ID NO: 10003 - protein, 248 aa, Zea mays
  Clone ID: TF_ZmC5918_5.pep
MARVFVGNLDPRVTAREIEDEFRTFGVLKSVWVARKPPGFAFIDFDDRRDAQDAIRDLDGKNGWRVELSTKDGGGRGRDRNGSDMKCYECGEVGHFARECRLRIGSGGLGSGRRRSRSPRYRSRSRSRSRSPRHRRSPSYGRRSYSPRDRSPRRRSYSRSPPLPPPPPRNNSMSPRGAREMSRSSPPPPKNNSSSPREAREMSRSPPPPAKNNRSSPREAREMSRSPPPPPPRNNSRSPPGARDVSRS

SEQ ID NO: 10004 - protein, 609 aa, Zea mays
  Clone ID: TF_ZM4269.C1.o9.fg.pep
MSHKPPTFASSPDPLDTDDWLKSVEKMLNIAQCTDREKVLYASGRLTGPAADWWDSYTAAHDVADTTTRAEFTTQFKNHHIPAGLMKIKKKEFLSLKQGSMSVSKYRDKFIQLSRYVPDEVAEDERKQEHFIEGLNGPLYTPTKFSGQSAGTTCYKCGKIGHYANVCPQRIATTPVQNKQQTPGSGKGYSIARVNQVSVDATPDGADIVLGMFYVNAIPATILFDSGATHSFMSARYANTNEIPLLNMRKPMIVITPKGPVEANQMTRRLTLTIMAREFGATAIILEATSIDLILGMSWLRKAKAIIACGRGTVELTSPKGEIFQVQITVTTSSKRAMFFIPEEFVGDNIRVVRDFLDVFPEELPGMPPDREVEFVRDLLPGTAPISKRPYMMSVEELKELKKQLTELQEAGYIRSSSSPWRAPVLFVQKKDGSQRMCVDYRSLNDVTMKNKYLLPRIEDLFDQMRGARVFSKIDLRSGYHQMRIRPSDIPKTTFSTRYGLYEFIVMSFGLTNAQTYFMDLMNKFSKCEFWIGEVPFLGHIISNGGISVDPAKVKEIMAWGVPTIVTEIRSFLELAGYYWRFIEGFSKIAKPMTSLLEKGREFKWDEKC

SEQ ID NO: 10005 - protein, 1234 aa, Zea mays
  unsure (1)..(1234): unsure at all Xaa locations
  Clone ID: TF_ZM4411.C1.o3.fg.pep
MSGEHAKKEMVIGEKPAISHGKAPSGESRNKKKEESPPHKSHRSGDKKKKMKKVVYYETDSSSPSTSGSDASSVTSKCHERKKFSKIPLRYPCISKRTPLLSVPLGKPPVFYGEDYNMWSDKMRHHLTSLHTSIWDVVEFGVQVPSVGDEDYDSDEVAQIRHFNSQATTILLASLSREEYNKVQGLKSAKEIWDVLKTVHEGDEVTKITKRETIKGELGRFMLNQGEDPQAMYNRLKTLVNQVRNLGSTKWDDHEMVKVILRSLVFLNPTQVQLIRGDPRYKLMSPEEVIGKFVSFELMIKGSKKIIEQGATSTSKVQPVAFKATEEEKKDSTPSRVPIDASKLDNEEMALIIKSFHQILKQRRGKDYKPRSKKVCYNCGKPGHFIAKCPLYSDSDRDNDKRGKKEKKRYYKKKGGDAHVCQEWDSDESSTDSSSDEDAANIAINKGLLFPNVGHKCLMAKDGKKKKVKSRSSTKYATSSDEDNSSDDEDNLLTLFANLNIQQKEKLNELISAIHEKYELLDSQEDFLIKENKKHVKTKNAYAQEIDMLNESLASLKFENDKLIAKAKELDVCNVSISNLRNENAILHAKIVELNDCKPSTSTVEHVSICTRCRDINIDAIHDHLAMIKQQNDHIAKLDAKIAEHELENEKFKFPRGMLYSGRRPGIKDGIGFQQGDNVKLNAPPKRLSNFVKGKAPMPQDNEGYILYPAGKVVAKYVGGKYKGSKTXFGYPRPLELLHMDLFGSIAYISIGMKFLVANALFXVKRGRKSKFAPKAVEGFLLGCDSNTRVYRVFNKSTGLVEVSCDIVFDESNGSQVEQVDLDELDDEEAPCIALRNMSIGDVCPKESEEPPQAQDHQPSSSMKASPPTQDEDQAQEDENEDQEDEPPQEEDIDQGGDANDQDKEDDEDPRPPHPRVHQAIQRNHPMNTILGDIHKGPHRVEEALQDSDWVLAMQEELNNFTRNEVWHLVPCPNQNVVATKWVFRNKQDEHGVVTRNKARLVPKGYSQVEGLDFGETYAPVARLESIRILLAYATYHGFKLYQMDVKIAFLNGPIKEEVYVEQPPGFEDSEYPNHVYKLSKALYGLKQAPRAWYECLRDFLITNGFKVGKADPTLFTKTNENDLFFSRIMIQKFEMSMMGELKYFLGFQVKQLQQGTFISQTKYIQDILTKFGMKDAKPIKTPMRTNGHLDLDMGGKSVDQKEEHIRDLSVSGEIPGVLGFKETKLSSSFYRRS

SEQ ID NO: 10006 - protein, 991 aa, Zea mays
  unsure (1)..(991): unsure at all Xaa locations
  Clone ID: TF_ZmC4916_354.pep
MDPKGKGIVINDKEKESFVNEPKDDKTTDLGSGHKRKDGKKKKTRRIKDIVYYDDSDESTSSQKDNDDNDYERRKPVNSNFSFDYSRIPQSTNAHSLSIPLGKPPHFDGEDYGFWSHKMRSHLFSLHPSIWEIVESGMKFDSSDSPMFINEQIHRNAQATTVLLASLCRDEYHKVSGLDNAKQIWDTLRISHEGNDVTLLTKMELVEGELGRFTMIRGEEPTQTYNRLKTLINKIRSYRSTQWTDHDVVRLMLRSFTVLDPHLVNNICENPRYTKMSPEEVLGKFVSGRMMIKEARYVDDALNGPIHEPQPIALKATRSKEALPSKVAQVEAAGLNDEEMALIIKRFKTALKGRKGQPSKTKTKGKRSCFKCGKVGHFIANCPDNDSDQEEGNKREKKKNYKKAKGEEHLGKEWDSDCSSSDSDNEGLAATAFNKSSLFPNEHHTCLMAREKKGLDRAKVDKINELIDALNDKNRLLEKQEDLLYDEHDKFVEAKKSLALEIKRNEMLSCELSTCHDSISSLKSINDDLTAKLEIANKSTSCVEHVVVCTRCKDFNIDACSEHLVSISKLNDEVASLNAQLKTSKSEFDKLKFARDAYTIGRHPSIKDGLGFKREAKNLTSHKAPIPAKEKGKAPMASSTKRNHAFMYHDRRQSNKSCNAYDAFDSHAMFASSSSYMHGKDMSRRHFVHMPRRNVVNVPRNVNEPSTIYHALNASFAICRKDRKIVARNIGAKCKGDKTCIWVPKTIVTNLVGPNKSWVYASGGSSWIIDSGCTNHMTGEKKMFTSYVKNKDSQDSIIFGDGNQGKDKSETQGTLKRFLRRAQNEFELKVKKIRSDNGSEFKNLQVEEFLEEEGIKHEFSAPYTPQQNGVVERKNRTLIDMARTMLGEFKTPECFWSEAVNTACHAINRVYLHRLLKKTSYELLTGNKPNXEEDVPTAAIRTMAIGEVRPQEQDERDQPSSSTTVHPPPQDDEXVHQKETCDQGGAQDVHV

SEQ ID NO: 10007 - protein, 1636 aa, Zea mays
  Clone ID: TF_ZmC4916_357.pep
MDPKGKGMVVNDNEKESIFNEPRDDKVNDSGSSQKKKDGKKKRHIRKVVYYDSDESSSSQKDDEYEEKKKTVNSNFSFDCSRIPHNSNAHLLSIPLGKPPHFDGEDYGFWSHKMRSHLFSLHPSIWEIVENGMQFDSSDNSMFINEQIHKNAQATTILLASLCREEYNKVSGLDNAKQIWDTLKISHEGNDVTMLTKMELVEGELGRFAMIRGEEPTQTYNRLKTLVNKIRSYGSTRWTDHDVVRHMLRSFTVLDPHLVNSIRENPRYIKMTPEEILEKFVSGRMMIKEARYVDESLNGPIHEPQTIALKATSSREALPSKVAQVEAAGLNEDEMALIIKRFKTALKGHKEHPNKSKTKGKRSCFKCGKVGHFIANCPDNDGDQDKEKKREKKKTYKKAKGEAHLGKEWDSDCSSSDDKGLAASAFNKSSLFPNEHHTCLMAKEKKVYTRDTITYASSSDDESSDDEIDYASLFKGLDRTKIDKINELIDALNDKNRLLEKQEDLLYEEHDKFVDVQKSLALEVKRNEMLSCELSTCHETISSLKSVNDDLNAKLEVANRSNSCEEHVVICNRFLMPNLRLAKIIDKLKFASDAYTVGRHPSIKDGLGFKREAKNLTSYKAPISAKDKGKAPMANSVQKNHAFIYSDRKFSRNAYRNYSYDSYAMPASSSSIVHDMPRKNIIHHMPRRNVAHVPRKPSNEPSTIYHACNASFAICRKDKKVVARKLGAKCKGDKACIWVPKAIVTNLVGPNKSWVYASGGSSWFIDSGCTNHMSGEKKMFTSYVKNKDSQDSIIFGDENQGKIDLVQLVKQDKIETQGTVKRFLRRAQNEFELKVKKIRSDNGSEFKNLQVEEYLEEEGIKHEFSAPYTPQQNGVVERRNKTLIDMSRTMLGEFKIPERFWSEAVNTACHTINRVYLHRLLKKTSYELLTGNKPNVSYFRVFGSKCYILVKKGRNSKFAPKAVEGFLLGYDSNTKAYRVFNKSSGLVEVSSDVVFDETNGSPREKVVNPNDVDEYDVPTDAIRTMAIGDVRPQEHQEQDQPSSSTLVHPPTQDDEQVHQEEACDQGGAQDDHVMDEEAPQAPPTQVRATIQRNHPVDQILGDISKGVTTRSRLVNFCEHCSFVSSIEPFRVEDALLDPDWVLAMQEELNNFKRNEFWTLVPRPKQNVVGTKWVFRNKQDEHGVVTRNKARLVAKGYAQVTGLDFEETFDPVARLESIRILLAYAAHHSFRLFQMDVKSAFLNGPIKEEVYVEQPPSFKDERYPNHVCKLSKALYGLKQALRAWYECLRDFLIANAFKVGKADPTLFTKTCDGDLFVCQIYVDDIIFGSTNQKSCEEFSRVMTQKFEMSMMGELNYFLGFQVKQLKDGTFISQTKYTQDLIKRFGMKDAKPAKTPMGTDGHVALNKGGKSVDQKAYRSMIGSLLYLCASRPDIMLSVCMCARFQSDPRECHLVVVKRILRYLVATPCFGIWYPKGSTFDLIGYSDSDYAGCKVDRKSTSGTCQFLGRSLVSWSSKKQTSVALSTAEAEYVAAGQCCAQLLWMRQTLRDFGYNLSKVLLLCDNESAIRMADNPVEHSRTKHIDIWHHFLRDHQQKGDIEVFYVSTENQLADIFTKPLDESTFCRLRSELNVLDSRNSD

SEQ ID NO: 10008 - protein, 424 aa, Zea mays
  Clone ID: TF_ZmC4916_412.pep
MDPKGKGMVIDDKEKESFINEPKDDKPTDSGSSQKKKDGKKKRRIKKIVYYDSDESSSSQKDDGYKEKKKTVNSNFSFDYSRIPHNSNAHLLSIPHGKPPHFDGEDYGFWSHKMRSHLFSLHPSIWEIVENGMRFDSSDNSMFINEQIHKNAQATTVLLASLCREEYNKVSGLDNAKQIWDTLKISHEGNDVTMLTKMELVEGELGRFAMIRGEEPTQTYNRLKTLVNKIRSYGSTRWTDHDVVRLMLRSFTVLDPHLVNSIRENPRYIKMTPKEILRKFVSGRMMIKEARYVDEALNGPIYEPQTVALKATSNRETLPSKRFKTALKGRKEHPNKSKTKGKRSCFKCGKVGHFIANCPDNDSDQDQEKKREKKKTYKKAKGEAHLGKEWDSDCSSNDNEGLATSAFNKSSLFPNEHHTCLMAK

SEQ ID NO: 10009 - protein, 1215 aa, Zea mays
  Clone ID: TF_ZM3638.C2.o1.fg.pep
MALGSGHKRKDGKKKKTRRIKKIVYYDDSDESTSSQKDNDDNDYERRKPVNSNFSFDYSRIPQSTNAHLLSIPLGKPPHFDGEDYGFWSHKMRSHLFSLHPSIWEIVESGMKFDSSDSPMFINEQIHGNAQATTVLLASLCRDEYHKVSGLDNAKQIWDTLRISHEGNDVTLLTKMELVEGELGRFAMIRGEEPTQTYNRLKTLINKIRSYGSTRWTDHDVVRLMLRSFTVLDPHLVNNIRENPRYTKMSPEEVLGKFVSGRMMIKEARYVDDALNGPIHEPQPIALKATRSKEALPSKRFKTALKGRKGQPSKTKTKGKRSCFKCGKVGHFIANCPDNDSDQEEGNKREKKKKNYKKAKGEAHLGKEWDSNCSSSDSDNEGLAVTAFNKSSLFRNEHHTCLMAREKKGLDRTKVDKINELIDALNDKNRLLEKQEDLLYDEHDKFVEAQKSLALEIKRNEMLSCELSTCHDSISSLKSINDELNAKLEIANKSTSCVEHVVVCTRCKDFNVEACSEHLVSISKLNDEVASLHAQLKTSKSEFDKLKFARDAYTIGRHPSIKDGLGFKREVKDLTSHKAPISAKEKGKAPMASSARKNHAFMYHDRRQSNKSCNAYDAFDSHAMFASSSSYMHGKDMSRRYFVHMPRRNVVNVPRKVNEPSTIYHTLNASFAICRKDRKIVARKLGAKCKGDKTCIWVPKTIVTNLVGPNKSWVYASGGSSWIIDSGCTNHMTGEKKMFTSYVKNKDSQDSIIFGDGNQGKVKGLDVSVFRRSDGSLAFKGVLDDKLYLVDFAKEEAGLDACLIAKTSMGWLWHRRLAHVGMKNLHKLLKGEHVIGLTNVQFEKDRPCAACQAGKQVGSSHHTKNVMTTSRPLEMLHMDLFGPVAYLSIGGSKYGLVIVDDFSRFTWVFFLQDKSETQGTLKRFLRRAQNEFELKVKKIRSDNGSEFKNLQVEEYLEEEGIKHEFSAPYTPQQNGVVERKNRTLIDMARTMLGEFKTPERFWSEAVNTACHAINRVYLHRLLKKTSYELLTGNKPNVLYFRVFGSKCYILVKKGRNSKFAPKAVEAFLLGYDSNTKAYRVFNKSLGLVEVSSDVVFDETNGSPREQVVDFDDVDEEEVPTAAIRTMAIGDVRPHEQNERDQPSSSTMVQPPTQDDEQEACDQGGAQDDHVMEEEAQPAPLTQVRAMIQRDHPVDQILGDISKGVTTRSRLVNFCE

SEQ ID NO: 10010 - protein, 387 aa, Zea mays
  Clone ID: TF_ZM4321.C3.o5.fg.pep
MDPKGKGMVVNDNEKESIFNEPRDDKVNDSGSSQKKKDGKKKRRIRKVVYYDSDESSSSQKDDEYEEKKKTVNSNFSFDYSRFPHNSNAHLLSIPLGKNTIRWASLCREEYNAKQIWDTLKISNEGNDVTMLTKMELVEGELGRFTMIRGEEPTQTYNRLKTLVNKIRRYGSTRWTDHDVVRLMLRSFTVIDPHLVNSIRENPRYTKMTPEEILGKFVSGRMMIKEARIVDDALNGPIHEPQPIALKATRSREMLPSKVAQVETAGLNEEEMALIIKRFKTALKGRKEHPNKSKTKGKRSCFKCGKVGHFIANCPDNDSDQDQEKKREKKKTYKKAKGEAHLGKEWNSNCSSSDSDDEGFAASAFNKSSLFPNEHHTCLMAKEKKNM

SEQ ID NO: 10011 - protein, 464 aa, Zea mays
  Clone ID: TF_ZM4355.C1.o9.fg.pep
MDPKGKGIVINDKEESFVNEPKDDKPTDSGSGHKRKDGKKKKTRRIKEIVYYDYSDESTSSQKDNDDNDYRKPIWDTLRISHEGNDVTLLTKMELVEGELGRFAMIRGEEPTQTYNRLKTLINKIRSYGSTRWTNHDVVRLMLRSFTVLDPHLVNNIRENPRYTKMSPEEVLGKFVSGRMMIKEARYVDDALNGPIHEPQPIALKATRSKEALPSKVAQVEAAGLNDEEMTLIIKRFKTALKGRKGQPSKTKTKGKRSCFKCGKVGHFIANCPDNDSDQEQGNKREKKNYKKAKGEAHLGKEWDSDCSLSDSDNEGLAATAFNKSSLFPNEHHTCLMAREKKGLDRTKVDKINELIDALNDKNRLLEKQEDLLYDEHDKFVEAQKSLALEIKRNEMLSCELSTCHDSISSLKSINDDLNAKLEIANKSTSCVEHVVVCTRCKDFNVDACSEHLVSISKLNDKVV

SEQ ID NO: 10012 - protein, 1465 aa, Zea mays
  Clone ID: TF_ZM4543.C1.o1.fg.pep
MTPEEILGKFVSGRMMIKEARYVDEALNGPIHEPQTIALKATSSREALPSKVAQVEAAGLNEDEMTLIIKRFKTALKGRKEHPNRSKTKGKRSCFKCGKVGHFIANCPDNDSDQDQEKKRENKKTYKKAKGEAHLGKEWDSDCSSSDDEGLAASAFNKSSLFPNEHHTCLIATEKKNRLLEKQEDLLYEEHDKFVDVQKSLALEVKMNEMLSCELSTCHETISSLKSVNDDLNAKLEVANKSSSCVEHVVICNKCKDFNVDACVEHLTSIAKLNGEVASLNAQLKTSKNEFDKLKFARDAYTVGRHPSIKDGLGFKREAKNLTSHKAPISAKEKGKAPMANSVQKNHAFIYSDRKFSRNAYRNYSYDSYAMPASSFSIVHDMPRKNVIHHMPRKNVVHVPRKASNEPSTIYHACNASFAICRKDKKVIARKLGAKCKGDKTCIWVPKAIVTNLAGPNKSWVYASGGSSWIIDSGCTNHMTGEKKMFTSYVKNKDSQDSIIFGDGNQGKVKGLGKIAISSEHSISNVFLVESLGYNLLFVSQLCNMGYNCLFTNVDVSVFRRSDGSLAFKGVLDDKLYLVDFAKEEAGLDACLIAKTSMGWLWHRRLAHVGMKNLHKLLKGEHVLGLTNVTFEKDRPCAACQAGKQVGSAHHSKNVMTTSRPLELLHMDLFGPVAYLSIGGKTQGTLKRFLRRAQNEFELKQNGVVERKNRTLIDMARTMLGEFKTAEWFWSEAVNMACHAINRVYLHRLLKKTSYKLLTSKKPNVSYFRVFGSNCYILVKKGRNSKFAPKAVEGFLLGYDSNTKAYRVFNKSSGLVEVSSDVVFDETNGSPREQVVDLDDVDEEDAPTTAIRTMAIGDVRPQEQKEQDQPSSSTMVQPPTQDDEQVHQEEACDQGGAQDDHVMEEEAQHAPPTQVRATIQRNHPVDQILGDISKGVTTRSRLVNFCEHYSFVSSIEPFRVEEALLDPDWVLAMQEELNNFKRNEVWTLVPRPKQNVVGTKWVFRNKQDEHGVVTRNKARLVAKGYAQVAGLDFEETFAPVARLESIRILLAYAAHHSFRLFQMDVKSAVLNGPIKEEVYVEQPPGFEDERYPDHVCKLSKALYGLKQAPRAWYECLRDFLIDNAFKVGKADPTLFTKTCNGDLFVCQIYVDDIIFGSTNQKSCKEFSRVMTQKFEMSMMGELNYFLGFQVKQLKDITFISQTKYTQDLIKRFGMKDAKPAKTPMGTDGHIDLNKGGKSVDQKAYRSMIGSLLYLCASRPDIMLSVYMCARFQSDPRECHLVAVKRSLRYLVATPCFRIWYPKGSTFDLIGYSDSDYAGCKVDRKSTSGTCQFLGRSLVSWSSKKQTFVALSTVEAEYVAAGQCCTQLLWMRQILRDFGYNLSKVSLLCDNESAIRMADNPIEPSRTKHIDIRHHFLRDHQQKGDIEVFYVSTENQLADIFTKPLDEKTFCKLRSELNVLDSRNLD

SEQ ID NO: 10013 - protein, 436 aa, Zea mays
  unsure (1)..(436): unsure at all Xaa locations
  Clone ID: TF_ZM4626.C1.o6.fg.pep
MDPKGKGXVNDNEKESIFNEPRDDKVNDSGLSQKQKDGKKKRRIRKVVYYDSDESSSSQKDDEYEEKKKTVNSNFSFDYSRIPHNSNAHLLSILLGKPPHFDGEDYGFWSHKMRSHLFSLHPSIWEIVENGMQFDSSDNSMFINEQIHKNAQATTVLLASLCREEYNKVSGLDNAKQIWDTLKISHEGNDVTMLTKMELVEGELGRLKTLVNKIRSYGSTRWTDHDVVRLMLRSFTVLDPHLVNSIRENPWYIKMTPEQILGKFVSGRMMIKEARYVDEALNGPIHEPQAIALKATSSRETLPSKVAQIEAAGLNEDEMALIIKRFKTALKGRKEHPNKSKMKGKRSCFKCGKVGHFIANCPDNDSDQDQEKRREKKKTYKKAKGEAHLSKEWDSDCSSSDSDDEGLAASAFNKSALFPNEHHTCLMAKEKKLKEY

SEQ ID NO: 10014 - protein, 522 aa, Zea mays
  Clone ID: TF_ZM4884.C12.o1.fg.pep
GLRLFPEYLSFAFGLPSKTGCDTGSGHKRKDGKKKKKTRRIKEIVYYDDSDESTSSQKDNDDNDYERRKPVNSNFSFDYSRIPQSTNAHLLSIPLGKPPHFDGEDYRFWSHKMRSHLFSLHPSIWEIVESGMKFDSLDSPMFINEQIHRNAQATIVLLASLCRDEYHKVSGLDNAKQIWDTLRISHEGNDVTLLTKMELVEGELGRFAMIRGDEPTQTYNRLKTLINKIRSYGSTRWTDHNVVRLMLRSFTVLDPHLVNNIRENPRYTKMSPEEVLGKFVSGRMMIKEARYVNDALNGPIHEPQPIALKATRSKEALPSKRFKTALKGRKGQPSKTKTKGKRSCFKCGKVGHFIANCPDNDSDQEQGNKREKKKNYKKAKGEAHLGKEWDSNCSSFDSDNEGLAATAFNKSSLFPNEHHTCLMAREKKGLDRTKVDKINELIDALNDKNRLLEKQEDLLYDEHDKFVEAQKSLALEIKRNEMLSCELSTCHDSISSLKSINDDLNAKLEIANKSTSCVEHVV

SEQ ID NO: 10015 - protein, 685 aa, Zea mays
  unsure (1)..(685): unsure at all Xaa locations
  Clone ID: TF_ZM4322.C3.o2.fg.pep
MDTHRPPHFDGTNFPYYSARMACYLEAVDLGVWRVTRDGMKPLKNPEKPTTSEEKEIHLNARAKNCLYESLSMDIFNQVFTLKTANEIWLKLHELHDGTSNVREQKHCLVLNEYNSFAMKDDELVRDMYSRLNLIINELNSIGINKLGDADIVRKIISLLPQQRYGSIITILHNMEDLSNMTPTIVIGKIAAFEMSRKMSRGEEPTSSRPYAFACDERKGKKKAPTPSSSSEEEEEEXVMMMKIINHAHHPPRTKKRSDASERSRIFSLTLTXKKQRKRGCFACGEKGHFRDNCPNMAKPKKERSKGKALTSVRTWDDSSSEDEPPRTRSHRSSSRSSRSSHKCLMARGNKSIPSSSDESSSNDEGEGKPSLDELAEAVEFFQDVCTKQKAQLKTLKNKLVSSQNDYKGLLEKFETFANLNSELSTKIELLESSAPSTATDDSLIKKNEKLKAKLASSQEAIENLLEKMEILSIHNNELTTKLENIGSTPAASLVEIPEIIKKDASTSCFDLIDDSNPCNQVVVENIVVKTCSDEVAKENEQLKQEVARLGKALYDKKGKAKQIRPSQDNTTAGVNKPMEGETVICRLCHMEGHKSFQCKAMIGDKQRRKLKQKPSSKISNTYIKKVNKKDATPYLIKKKKNGKVIAIKANKQANKGKGAKRIWVPKEIISTMKSTKKVWIPKGK

SEQ ID NO: 10016 - protein, 1649 aa, Zea mays
  Clone ID: TF_ZmC951_403.pep
MSGDPAKKEMETGEKPTTSHGSTSSEESRTKRKEKKKSSSHKGKEKKSSSHHKEKKERSSSHKPHRRGDKHKRMRKVVYYETDTSSTSTSDSDAPSVTSKHQERKKFSKIPLHYPRISKNAPLLSVPLGKPPTFDGEDYARWSDLMRFHLTSLHKSIWDVVEFGAQVPSVGDKDYDEDEVAQIEHFNSQATTILLASLSREEYNKVQGLKSAKEVWDVLKTAHEGDELTKITKRETIEGELGRFRLRKGEEPQHMYNRLKTLVNQVRNLGSIKWDDHEMVKVILRSLIFLNPTQVQLIRGNPRYTKMTPEEVIGNFVSFECMIEGSRKINELDDPSTSEAQPVAFKATEDKKEESTPSRQPIDASKLDNEEMSLVIKSFRQILKQRRGKDYKSRSKKVCYKCGKPGHFIAKCPVSSDGDRGDDKKGRRKEKKRYYKKKGGDAHVCREWDSDESSSDSSDDEDAANIAVTKGLLFPNVGHKCLMAKDGKRKKVKSNSSTKYESSSDDNASDEEDNLRVLFANLNMEQKEKLNELISAIHEKDDLLDSQEDCLIKENKKHVKVKKAYALEVEKCEKLSSELSTCREMIDNLRNENASLNTKVDSHVCIVSTFNPKNNNDLLARIEELNMSLASLRVENENLIAKAKEIDACNVTISDLRDNNDILRAKIVELNSCKPSTSSIEHVSICTRCRDVDINAIHDHMTLIKQQNDHIAILDAKIAEHNLENEKFKFARSMLYSGRRPGIKDGIGFQRGDNVKLSAPPKRLSNFVKGKAPMPQDNEGYILYPAGYPESKIRRIHSRRSHSGPNHAFMYKGETSSSRQPTHAKLPKKKIPNASNEHSISFKTFDASYVLTNKSGKVVAKFVGGKHKGSKTCVWVPKVLVSNAKGPKTVWVYASGGSSWILDSGCTNHMTGEKKMFSSYEKNQDPQRAVTFGDGNQGVTVFRRSDDSIAFKGVLEGQLYLVDFDRAELDTCLIAKTNMGWLWHRRLAHVGMKNLHKLLKGEHILGLTNVHFEKDREKSQTQETLKRFLRRAQNEFALRIKKIRSDNGTEFKNSQIEGFLEEEGIKHEFSSPYTPQQNGVVERKNRTLLDMARTMLDEYKTSDRFWAEAVNTACYAINRLYLHRILKKTSYELLTGKKPNISYFRVFGSKCFILVKRGRKSKFAPKTVEGFLLGYDSNTRAYRVFNKSTGLVEVSCDVVFDETNGSQIEQVDLDEIGEEEAPCIALRNMSIGDVCPKESEEPPIAQDQPSSSMQASPPTQIEDQAQVDKVEDQANEPPQDDGIDQGGDANEENKEDEEQRPLHPRVHQAIQRDHPVDTILGDIHKGVTTRSRVAHFCEHYSFVSSIEPHRVEEALQDSDWVVAMQEELNNFTRNKVWHLVPRPNQNVVGTKWVFRNKQDEHGVVTRNKARLVAKGYSQVEGLDFGETYAPVARLESIRILLAYATYHGFKLYQMDVKSAFLNGPIKEEVYVEQPPGFEDSKYPNHVYKLSKALYGLKQAPRAWYECLRDFLIANGFKVGKADPTLFTKTLENDLFVCQIYVDDIIFGSTNESTCEEFSRIMTQKFEMSMMGELKYFLGFQVKQLQEGTFISQTKYTQDILTKFGMKDAKPIKTPMGTNGHLDLDTGGEETTSRALTVPFLAIHAKKGEK

SEQ ID NO: 10017 - protein, 390 aa, Zea mays
  Clone ID: TF_ZM4325.C1.o21.fg.pep
MEDLSNMTLTIVIGKNVAFEMSQKMCRGVEPTSSRPYAFTCDERKGKKKAPTPSSSSEEEEEEESDDDEDNQPCTSSSEDVKTIRHVGKVMRMIRKINLMGVPLQVEDLLFNIDRKKQRKRGCFACGEKAHFRDNCPNMAKPKKERSKGKTLTSVRTWDDSSSEDEPPSTRSHRSSSRSSRSSHKCLMARGNKSIPSSSDESSSDDEGEGKPSVDELAEAVEFFQDVCTKQKAQLKTLKNKLISSQNDYKEVARLGKALYDKKGKAKQIRPPQDNTTAGVNKPMEGETVICRLCHKEGHKSFQCKAMTGDKQRQKLKQKPSSKISNTYIKKVDKKTATPYLIKKKKDGKVIASKANKQANKGKGAKRIWVPKEIISTMKSTKKVWIPKGK

SEQ ID NO: 10018 - protein, 1087 aa, Zea mays
  Clone ID: TF_ZM4409.C1.o5.fg.pep
MSPKEILGKFVSGRMMIKEARYIDEALNGPIHEPQAIALKATSSREALPSKVAQIEAVGLNEDEMALIIKRFKTALKGRKEHPKKNKTKGKRSCFKCGKVGHFVANCPDNDSDQEQGKNGKRENKKVYKKAKGEAHLGKEWDSDCSSSDSDDEGLAATAFNKYEHLVSISRLKDEVASLNAQLKTSKSEFDKLKFARDAYTIGRHPSIKDGLGFKREAKNLTSHKAPISAKKKGKAPMANSAKKNHAFMYHDRRYSRNVHRSYDTFDSHAMIASSSYIMHDRNLARKMLLMYLGKKDKKVVARKLGAKCKGDKTCIWVPKTIVTNLVGPNKSWVYVSGGSSWIIDSGCTNHMTGEKKMFTSYVKNKDSQDSFIFGDENQGKVKGLGKIAISNEHSISNVFLVESLGYNLLSVSQLCNMGYNCVFTNVDVSVFRRSDGSLAFKGVLDDKLYLVDFAKEELWHHRLAHVGMKNLHKLLKGEHVLGLTNVHFEKDRPCAACQAGKQVGSAHHIKNVMTTSRPLELLHMDLFGPVAYLSIGGRTLKRFLRRAQNEFELKVKKIRSDNGSEFKNLQVEEYLEEEGIKHEFSALYTPQQNGVEERKNRTLIDMARTMLGEFKTPEQFWSEAVNTACHAINWVYLHRLLKKTSYELLTGNKPNVSYFRVFGSKCYILVKKGRNSKFAPKFVEGFLLGYDSNTKAYRVFNKSSGLVEVSSDVVFDETNGSPREQVELDDVDEEDVPTDAIRTMAIGDVRPQEHKEQEQPSSSTTVHPQPKMMNRVEEALLDPDWVLAMQEELNNFKRNEVWTVVPRPKQNVVGTKWVFRNKQDEHGVVTRNKARLVAKGYAQVAGLDFEETFAPVARLESIRILLAYAAHHSFRLYQMDVKSAFLNGPIKEEVYVEQPPGFEDERYPDHVCKLSKALYGLKQAPRAWYECLRDFLIANAFKVGKADPTLFTKTCDGDLFVCQIYVDDIIFGSTNQKSYEEFSRVMTQKFEMSMMGELNYFLGFQVKQLKDCTDTRTNATWSAWSTPRPSPNPRPSSPTWRASKGAPDAKRHTGNFEPAETVKYVPLDPSNDASKQIRIGSKLDPK

SEQ ID NO: 10019 - protein, 87 aa, Zea mays
  Clone ID: TF_LIB4767-015-R1-K1-C4.pep
RPPRSLSRCDDCVEYRPRPLTLTPRRRRPRRLRQVPRDGPFIFVSLFAGRRAPARFRNDLCNNCKRPGHFARECPSVAVCHTCGLPG

SEQ ID NO: 10020 - protein, 207 aa, Zea mays
  unsure (1)..(207): unsure at all Xaa locations
  Clone ID: TF_LIB3991-009-Q6-K6-E11.pep
LIRGNPRYPLMTPEEVIGNFVSFECMIKGSKKINELDEPSTSEAQPVAFKATEEKKEESTPSRQPIDASKLDNEEMALIIKSFRQILKQRKGKDYKPRSKKVCYKCGKPGHFIAKCPMSSDSDRGDDKKGRRKEKKKYYKKKGGDAHVCREWDSDESSSDSSSDEDAANIAVTEGLLFPNVGHKCLMAKDGKKKXKSRSSTKYETSS

SEQ ID NO: 10021 - protein, 1666 aa, Zea mays
  Clone ID: TF_ZmC951_288.pep
MSGDHAKKEMETGEKPTTSHKSTSSEESRTKRREKKKSSSNKGKEKKSSSHHKEKKEKSSSHKPHRKGDKHKRMRKVVYYETDTSSTSTSDSDAPSVTSKRQERKKYSKIPLRYPRISKHTPLLSVPLGKPPTFDGEDYARWSDLMRFHLISLHKSIWDVVEFGAQVPSVGDENYDEDEVAQIEHFNSQATTILLASLSKEEYNKVQGLKNAKEVWDVLKTAHEGDELTKITKQETIEGELGRFRLHKGEEPQHMYNRLKTLVNQVRNLRSKKWDDHEVVNVILRSLIFLNPTQVQLIRGNPRYTKMTPEEVIGHFVSFECMIEGSRKINELGDPSEAQPVAFKATEEKKEESTPSRQPIDASKLDNEEMALVIKSFRQILKQRRGKDYKSRSKKVCYKCGKPGHFIAKCPMSSDSDRGDDKKGRRKEKKRYYRKKGGDAHVCREWDSDESSSDSSDDEDAANIAVTKGLLFPNVGHKCLMAKDGKKKKVKSNSSTKYESSSDDNASDEEDNLRILFANLNMEQKEKLNELISAIHEKDDLLDSQEDCLIKENKKHVKVKKAYALEVEKCEKLSSELSTCREMIDNLRNENAILNAKVDSHVCNVSIPNLRDDNIDLLAKIDELNVSLASLRLENENLIAKARDFDVCNTTISDLRTKNEMLHAKVVELKSCKPSTSNVEHVSICTRCRDVDVNAILDHMALIKQQNDHIAKLDAKIAEHNLENEKFKFARSMLYNGRRPGIKDGIGFQRGDNVKLNAPPKNLSNFVKGKAPMPQDNEGYILYPVGYPESKIRRIHSRKSHSGSNHAFMYRGETSSSRQPTRAKLPRKKTPNASNDHAISFKTFDASYVLTNKSGKVVAKYVGSKHKGSRTCVWVPKVLVSNAKGPKTIWVYASGGSSWILDSGCTNHMTGEKRMFSSYEKNQDPQRAITFGDGNQGVTVFRRSDDSIAFKGVLEGQLYLEKSQTQETLKGFLRRAQNEFGLRIKKIRSDNGTEFKNSQIESFLEEEGIKHEFSSPYTPQQNGVVERKNRTLLDMARTILDEYKTPDRFWAEAVNTACYAINRLYLHRILKKTSYELLTGKKPNISYFRVFGSKCFILVKRGRKSKFAPKTVEGFLLGYDSNTRAYRVFNKSTGLVEVSCDVVFDETNGSQVEQVDLDEIGEEQAPCIALRNMSIGDVCPRESKEPPNAQDQPSSSMQASPPTQNEDEAQVDEGQNKEDEPPQDDGNDQGGDAIDQEKEDEEEPRPPHPRVHQAIQRDHPVDTILGDIHKGVTTRSRVAHFCEHYSFVSSIEPHRIEEALQDLDWVVAMQEELNNFTRNEVWHLVPRPNQNVVGTKWVFRNKQNEHGVVTRNKARLVAKGYSQVEGLDFGETYAPVARLESIRILLAYATYHGFKLYQMDVKSAFLNGPIKEEVYVEQPPGFEDSEYPNHVYRLSKALYGLKQAPRAWYECLRDFLISNGFKVGKADPTLFTKTLENDLFVCQIYVDDIIFGSTNESTCEEFSRIMTQKFEMSMMGELKYFLGFQVKQLQEGTFICQTKYTQDILTKFGMKDAKPIKTPMGTNGHLDLDTGGKSVDQKSISNQVIGILKGNWSLRRRQRLPLRNSYFTITPSNSLFFGGEMSIKEKDFILGGESKSSKAKGPDFVFGIILTHSFMTKEKEKYQRGL

SEQ ID NO: 10022 - protein, 1527 aa, Zea mays
  unsure (1)..(1527): unsure at all Xaa locations
  Clone ID: TF_ZM3612.C9.o1.fg.pep
MRKVVYYETDTSSTSISDSDAPSVTSKRQERKKFSKIPLHYSRTPRHTPLLSVPLGKPPTFDGEDYARWSDLMKFHLTSLHKSIWNVVEFGAQVPSIGDEDYDTDEVAQIEHFNSQATTILLASLSKEEYNKVQGLKNAKEIWDLLKTAHEGDELTKITKRETIEGELGRFRLRQGEEPQDMYNRLKTLVNQVRNLESKKWDDHEVVKVILRALIFLNPTQVQLIRGNPRYPLMTPEEVIGNFVSFECMIKGSKKINELDEPSTSEAQPVAFKATEEKKEESTPSRQPIDASKLDNEEMALIIKSFRQILKQRRGKDYKPRSKKVCYKCGKPGHFIAKCPMSSDSDRGDDKKGKRKEKKKYYKKKGGDAHVCREWDSDESSTDSSSDDEDAANIAITKGLLFPNVGHKCLMAKDGKKKKVKSNSSTKYESSSDDNASGEEDNLRTLFAELNMEQKEKLNELISAIHEKDDLLDSQEDFLIKENKKHVKVKNAYALEVEKCEKLSSELSTCHETINNLRNENAKLIAKIDSHVCIDSHPRNDNVELLARIDELNDSLTSLRIENENLIAKAKDFDICNTTISDLRTKNDMLHAKVVELKSCKPSTSNVEHVSICTRCRDIDVNAIHDHMSLIKQQNDHIAKLDAKIAEHNLKNEKFKFARSMLYNGRRPGIKDGIGFQRRDNVKLNAPSKNLSNFVKGKAPMPQDNEGYILYPASYPENKIRRTHSRKSHSGPNHAFMYKGETSSSRQPTRAKLPRKKTPNASNDHAISFKTFDASYVLTNKSGKVYASGGSSWILDSGCTNHMTGEKKMFSSYEKNQDPQRAITFGDGNQGVTVFRRSDDSIAFRGVLEGQLYLDKSHTQETLKGFLRRAQNEFGLRIKKIRSDNGTEFKNSQIEGFLEEEGIKHEFSSPYTPQQNGVVERKNRTLLDMARTMLDEYKTPDQFWAEAVNTACYAINQLYLHRILKKTSYELLTGKKPNISYFRVFGSKCFILVKRGRKSKFAPKSVEGFLLGYDSNTRAYRVFNKSSGLVEVSCDVVFDETNGSQVEQVDLDEIGEEQAPCIALRNMSIRDVCPKELEEPPHTQDQPSSSMQASPPTQNEDEAQVDEGEDQRDEPPQDDGNDQGGDANDQDKEDEQPRPPHPRVHQAIQRDHPIDTILGDIHKGXVEEALQDSDWVMAMQEELNNFTRNXGTKWVFRNKQDEHGVVTRNKARLVAMGYSQVEGLDFGETYAPVARLESIRILLAYATYHGFKLYQMDVKSAFLNGPIKEEVYVEQPPGFEDSEYPNHVYRLSKALYGLKQAPRAWYECLRDFLIANGFKVGKADPTLFTKTLDNDLFVCQIYVDDIIFGSTNESTCEEFSRIMTQKFEMSMMGELKYFLGFQVKQLQEGTFICQTKYTQDILTKFGMKNAKPIMTPMGTNGHLDLDTGGAKGSHLANKRPSIEFNKRAKEQPKAPLVWRTGLSGVPPDSVRCTRGLQLKLFALGNIQSQRASVHRTVSGAPKKDAAQELASLGFSLQPLRYNSPNYP

SEQ ID NO: 10023 - protein, 1802 aa, Zea mays
  Clone ID: TF_ZM3649.C7.o1.fg.pep
MSGDHAKKEMETGEKPTTSHESTSSEESRTKRREKKKSSSNKGKEKKSSSHHKEKKEKSSSHKPHRKGDKHKRMRKVVYYETDTSSTSTSDSDAPSVTSKRQERKKYSKIPLRYPRISKHTPLLSVPLGKPPTFDGEDYARWSDLMQFHLISLHKGIWDVVEFGVQVPSIGDENYDEDEVAQIEHFNSQATTILLASLSKEEYNKVQGLKNAKEIWDVLKTAHEGDELTKITKRETIEGELGRFRLHKGEEPQHMYNRLKTLVNQVRNLGSKKWDDHEVVNVILRSLIFLNPTQVQLIRGNPRYTKMTPEEVIGHFVSFECMIEGSRKINELGEPSEAQPVAFKATEEKKEESTPSRQPIDASKLDNEEMALVIKSFRQILKQRRGKDYKSRSKKVCYKCGKPGHFIAKCPMSSDSDRGDDKKGRRKEKKRYYRKKGGDAHVCREWDSDESSSDSSDDEDAANIAVTKGLLFPNVGHKCLMAKDGKKKKVKSISSTKYESSSDDNASDEEDNLRILFANLNMEQKEKLNELISAIHEKDDLLDSQEDCLIKENKKHVKVKKAYALEVEKCEKLSSELSTCREMIDNLRNENAILNAKVDSHVCNVSIPNLRDDNIDLLAKIDELNVSLASLRLENENLIAKAKDFDVCKVTIADLRDKNDILHAKIVELNSCKPSTSTIEHVTICARCRDIDINAIHDHMSLIKQQNDHIAKLDAKIAEHNLENEKFKFARSMLYNGRRPGIKDGIGFQRGDNVKLNAPPKNLSNFVKGKAPMPQDNEGYILYPAGYPESKIRKIHSRKSHSGPNYAYMYKGETSSSRQPTHAKLPKKKIPNASNEHSISFKTFDASYVLTNKSGKVVAKFVGNKHKGSKTCVWVPKVLVSNAKGPKTVWVYASGGSSWILDSGCTNHMTGEKRMFSSYEKNQDPQRAITFGDGNQGVTVFRRSDDSIAFKGVLEGQLYLEKSQTQETLKGFLRWAQNEFGLRIKKIRSDNGTEFKNSQIEGFLEEEGIKHEFSSPYTPQQNGVVERKNRTLLDMARTMLDEYKTPDRFWAEAVNTACYAINRLYLHRILKKTSYELLIGKKPNISYFRVFGSKCFILVKRGRKSKFAPKTVEGFLLGYDSNTRAYRVFNKSTGLVEVSCDVVFDETNGSQVEQVDLDEIGNEEAPRIALRNMSIGDVCPKESEEPPNAQDQPSSSMQASPPTQNEDEAQVDEGQNQEDEPPQDDSNDQGGDEIDQEKEDEEEPRPPHPRVHQAIQRDHPVDTILGDIHKGVTTRSRVAHFCEHYSFVSSIEPHRIEEALKDSDWVVAMQEELNNFTRNEVWHLVPRPNQNVVGTKWVFRNKQDEHGVVTRNKARLVAKGYSQVEGLDFGETYAPVARLESIRILLAYATYHGFKLYQMDVKSAFLNGPIKEEVYVEQPPGFEDSEYPNHVYRLSKALYGLKQAPRAWYECLRDFLIANGFKVGKADPTFFTKTLENDLFVCQIYVDDIIFGSTNESTCEEFSRIMTQKFEMSMMGELKYFLGFQVKQLQEGTFISQTKYTQDILAKFGMKDAKPIKTPMGTNGHLDLDTGGKSVDQKVYRSMIGSLLYLCASRPDIMLSVCMCARFQSDPKESHLTAVKRILRYLAYTPKFGLWYPRGSTFDLIGYSDADWAGCKINRKSTSGTCQFLGRSLVSWASKKQNSVALSTAEAEYIAAGHCCAQLLWMRQTLRDYGYKLTKVPLLCDNESAIKMADNPVEHSRTKHIAIRYHFLRDHQQKGDIEISYINTKDQLADIFTKPLDEQSFTRLRHELNILDSRNFFC

SEQ ID NO: 10024 - protein, 1923 aa, Zea mays
  Clone ID: TF_ZM4633.C8.o1.fg.pep
MSGDHAKKEMETGEKPTTSHGSTSSEESRTKRREKKKSSSNKGKEKKSSSHHKEKKEKSSSHKPHRKGDKHKRMRKVVYYETDTSSTSTSDSDAPSVTSKRQERKKYSKIPLRYPRISKHTPLLSVPLGKPPTFDGEDYARWSDLMRFHLTSLHKSIWDVVEFGAQVPSVGDEDYDEDEVAQIEHFNSQATTILLASLSREEYNKVQGLKSAKEIWDVLKTAHEGDELTKITKRETIEGELDRFRLNKGEEPQHMYNRLKTLVNQVRNLGSKKWDDHEVVNVILRSLIFLNPTQVQLIRGNPRYTKMTPEEVIGHFVSFECMIEGSRKINELGEPSEAQPVAFKATEEKKEESTPSRQPIDASKLDNEEMALVIKSFRQILKQRRGKDYKSRSKKVCYKCGKPGHFIAKCPMSSDSDRGDDKKGRRKEKKRYYKRKGGDAHVCREWDSDESSSDSSDDEDAANIAVTKGLLFPNVGHKCLMAKDGKRKKVKSNSSTKYESSSDENASDEEDNLRILFANLNMEQKEKLNELISAIHEKDDLLDSQEDCLIKENKKHVKVKKAYALEVEKCEKLSSELSTCREIIDNLRNENAILNAKVDSHVCDVSISTPRDNNDDLLARIEELNISLASLRVENEKLITKAKELDVCNVTISDLRTKNDMLHTKVVELKSCKPSTSIVEHVSICTRCRNVDIDAIHDHMILIKQQNDHIAKLDAKIAEHNLENEKFKFARSMLYNGRRPGIKDGIGFQRGDNVKLNAPPKNLSNFVKGKAPMPQDNEGYILYPAGYPESKIRRIHSRKSHSGPNHAFMYKGETSSSRQPTHAKLPRKKTPSASNDHTISFKTFDASYVLTNKSGKVVAKFVGGKHKGSKTCVWVPKVLVSNAKGPKTVWVYASGGSSWILDSGCTNHMTGEKRMFSSYEKNQDPQRAITFGDGNQGVTVFRRSDDSIAFKGVLEGQLYLVDFDRAELDTCLIAKTNMGWLWHRRLAHVGMKNLHKLLKGEHILGLTNVHFEKDRICSACQAGKQVGVHHPHKNIMTTDRPLELLHMDLFGPIAYISIGGSKYCLVIVDDYSRFTWVFFLQEKSQTQETLKGFLRRAQNEFGLRIKKIRSDNGTEFKNSQIEGFLEEEGIKHEFSSPYTPQQNGVVERKNRTLLDMARTMLDEYKTPDRFWAEAVNTACYAINRLYLHRILKKTSYELLTGKKPNISYFRVFGSKCFILVKRGRKSKFAPKTVEGFLLGYNSNTRAYRVFNKSTGLVEVSCDVVFDETNGSQVEQVDLNEIGEEQAPCIALRNMSIGDVCPKESEEPPSTQDQPSSSMQASPPTQNEDEAQNDEEQNQEDEPPQDDSNDQGGDTNDQEKEDEEEPRPPHPRVHQAIQRDHPVDTILGDIHKGVTTRSRVAHFCEHYSFVSSIEPHRVEEALQDSDWVVAMQEELNNFTRNEVWHLVPRPNQNVVGTKWVFRNKQDEHGVVTRNKARLVAKGYSQVEGLDFGETYAPVARLESIRILLAYATYHGFKLYQMDVKSAFLNGPIKEEVYVEQPPGFEDSEYPNHVYRLSKALYGLKQAPRAWYECLRDFLIANGFKVGKVDPTLFTKTLENDLFVCQIYVDDIIFGSTNESTCEEFSRIMTQKFEMSMMGELKYFLGFQVKQLQEGTFICQTKYTQDILTKFGMKDAKPIKTPMGTNGHLDLDTGGKSVDQKVYRSMIGSLLYLCASRPDIMLSVCMCARFQSDPKESHLTAVKRILRYLAYTPKFGLWYPRGSTFDLIGYSDADWAGCKINRKSTSGTCQFLGRSLVSWASKKQNSVALSTAEAEYIAAGHCCAQLLWMRQTLRDYGYKLTKVPLLCDNESAIKMADNPVEHSRTKHIAIRYHFLRDHQQKGDIEISYINTKDQLADIFTKPLDEQSFTRLRHELNILDSRNFFC

SEQ ID NO: 10025 - protein, 346 aa, Zea mays
  Clone ID: TF_ZM4643.C4.o1.fg.pep
MDPKGKGMVVNDKEKESFFNEPRDDKPTNSGSSHKKKDGKKKRRIKKIVYYDSDESSSSPRDDDDEKKKPQIHKNAQATTVLLASLCRDEYNKVSGLDNAKQIWDTLKISHEGNDATMITKMELVEGELGRFAMIRGEEPTQTYNRLKTLVNKIRSYGSTRWMDHDVVRLMLRYTKMTLEEILGKFVSGRMMVKEARYVDDALNGPLPVHEPQTIALKATSSREMLPSKVAQVEATGLNEDEMALIIKRFKTALKGRNEYPNKNKEKGKRSCFKCGKIGHFIAQCPDNENDQGEERHGKKEKKKSYRKAKGEAHLGKEWDSDCSSSDSDDEGLAASAFNKSSLFPN

SEQ ID NO: 10026 - protein, 1889 aa, Zea mays
  Clone ID: TF_ZM4672.C3.o1.fg.pep
MSGDHAKKEMETGEKPTTSHGSTSSEESRTKRREKKKSSSNKGKEKKSSSHHKEKKEKSSSHKPHRKGDKHKRMRKVVYYETDTSSTSTSDSDAPSVTSKRQERKKYSKIPLRYPRISKHTPLLSVPLGKPPTFDGEDYARWSDLMRFHLISLHKSIWDVVEFGAQVPSVGDENYDEDELAQIEHFNSQATTILLASLSKEEYNKVQGLKNAKEVWDVLKTAHEGDELTKITKRETIEGELGRFRLNKGEEPQHMYNRLKTLVNQVRNLGSKKWDDHEVVNVILRSLIFLNLTQVQLIRGNPRYTKMTPEEVIGHFVSFECMIEGSRKINELGDPSEAQPVAFKATEEKKEESTPIRQPIDASKLDNEEMALVIKSFRQILKQRRGKDYKSRSKKVCYKCGKPGHFIAKCPMSSDSDRGDDKKGRRKEKKRYYRKKGGDAHVCREWDSNESSSDSSDDEDAANIAVTKGLLFPNVGHKCLMAKDGKKKKVKSNSSTKYESSSDDNASDEEDNLRILFANLNMEQKEKLNELISAIHEKDDLLDSQEDCLIKENKKHVKVKKAYALEVEKCEKLSSELSTCREMIDNLRNENAILNAKVDSHVCNVSIPNLRDDNIDLLAKIDELNASLARLRLENENLIAKAKDFDVCNATISDLRTKNEMLHAKVVELKSCKPSTSNVEHVSICTRCRDIDVNAILDHMALIKQQNDHIAKLDAKIAEHNLENEKFKFARSMLYNGRRPGIKDGIGFQRGDNVKLNAPPKNLSNFVKGKAPMPQDNEGYILYPAGYPESKIRKIHSRKSHSGPNHAYMYKGETSSSRQPTHAKLPKKKIPNASNDHAISFKTFDASYVLTSKSGKVYASGGSSWILDSGCTNHMTGEKRMFSSYEKNQDPQRAITFGDGNQGVTVFRRSDDSIAFKGVLEGQLYLVDFDRAELDTCLIAKTNMGWFWHRRLAHVGMKNLHKLLKGEHILGLTNVHFEKDRICSACQAGKQVGVHHPHKNIMTTDRPLELLHMDLFGPIAYISIGESKYCLVIVDDYSRFTWVFFLQEKSQTQETLKGFLRRAQNEFGLRIKKIRSDNGTKFKNSQIEGFLEEEGIKHEFSSPYTPQQNGVVERKNRTLLDMARTMLDEYKTPDRFWVEAVNTACYAINRLYLHRILKKTSYELLTGKKPNISYFRVFGSKCFILVKRGRKSKFAPKTVEGFLLGYDSNTRAYRVFNKSTGLVEVSCDVVFDETNGSQVEQVDLDEIGNEEAPCIALRNMSIGDVCPKESEEPPNAQDQPSSSMQASPPTQNEEEAQVDEGQNQEDEPPQDDSNDQGGDAIDQEKEDEDEPRPPHPRVHQAIQRDHPVDTILGDIHKGVTTRSRVAHFCEHYSFVSSIEPHRVEEALQDSDWVVAMQEELNNFTRNEVWHLVPRPNQNVVGTKWVFRNKQDEHGVVTRNKARLVAKGYSQVEGLDFGETYAPVARLESIRILLAYATYHGFKLYQMDVKSAFLNGPIKEEVYVEQPPGFEDSKYPNHVYRLSKALYGLKQAPRAWYECLRDFLIANDFKVGKADPTLFTKTLENDLFVCQIYVDDIIFGSTNESTCEEFSRIMTQKFEMSMMGELKYFLGFQVKQLQEGTFISQTKYTQDILTKFGMKDAKPIKTPMGTNGHLDLDTGGKSVDQKVYRSMIGSLLYLCASRPDIMLSVCMCARFQSDPKESHLTTVKRILRYLAYTPKFGLWYPRGSTFDLIGYSDADWAGCKINRKSTSGTCQFLGRSLVSWASKKQNSVALSTAEAEYIAAGHCCAQLLWMRQTLRDYGYKLTKVPLLCDNESAIKMADNPVEHSRTKHIAIRYHFLRDHQQKGDIEISYINTKDQLADIFTKPLDEQSFTRLRHELNILDSRNFFC

SEQ ID NO: 10027 - protein, 604 aa, Zea mays
  Clone ID: TF_ZM4685.C2.o1.fg.pep
MSGGSAKREMETDTSRGKAPSRESGAKGREDSPPHVKSHRSGDKKKKMKKVVYYKTDSSSPSTSGSNAPSVTSKRHEHKKFRDEVTKITKQETIEGELGRFVLNQGEEPQAMYNRLKTLVNQVRNLGSTKWDDHEMVKEVIGKFVSFELMIKGSKQIIEQGGTSTTEVQPVAFKATEEKKEESTSSRLPIDASKLDNEEMAPIIKSFRQILKQRRGKDYIPRSKKVCYKCGKPGHFIAKCPMSSDSDRDNDKRGNKKRYYKKKGGDAHICREWDFDESTTGSSSNEDAANIAVNKGLLFPNDGHKCLMAKDDKKKKVKTRASTKYTTSSDEGSSSEDEDDLLSLFANLNMQQKEKLNELIGAIHEKDELLDSQEEFLIKENKKYVKIKDACAQEVEKNENLTKELSICHDTISNLRNENAKLDAKIAEHELENENFKFARSMLYNGRRPSIKDGIGFQQGSNVKLNAPKKLSNFVKGKAPMARDNEGYILYPAGYPEHKIRRIHSRKSHSGSHHAFMYKNETSSSKHSTHVKMPKKKTHAASNEPIISFQTFDASYVLTNKSGKVVAKYVGAKHKGSKTCVWVPKVLVSNIKGPKTIWVPKNKV

SEQ ID NO: 10028 - protein, 630 aa, Zea mays
  Clone ID: TF_ZM4878.C9.o1.fg.pep
MTPEEVIGHFVSFECMIEGSRKINELGDPSEAQPVAFKATEEKKEESTPSRQPIDASKLDNEEMALVIKSFRQILKQRRGKDYKSRSKKVCYKCGKPGHFIAKCPMSSDSDRGDDKKGRRKEKKRYYRKKGGDAHVCREWDSDESSSDSSDDEDAANIAVTKGLLFPNVGHKCLMAKDGKKKKVKSNSSTKYESSSDDNASDEEDNLRILFANLNMEQKEKLNELISAIHEKDDLLDSQEDCLIKENKKHVKVKKAYALEVEKCEKLSSELSTCREMIDNLRNENAILNAKVDSHVCNVSIPNLRDDNIDLLAKIDELNVSLASLRLENENLIAKARDFDVCNTTISDLRTKNEMLHAKVVELKSCKPSTSNVEHVSICTRCRDVDVNAILDHMALIKQQNDHIAKLDAKIAEHNLENEKFKFARSMLYNGRRPGIKDGIGFQRGDNVKLNAPPKNLSNFVKGKAPMPQDNEGYILYPVGYPESKIRRIHSRKSHSGSNHAFMYRGETSSSRQPTRAKLPRKKTPNASNDHAISFKTFDASYVLTNKSGKVVAKYVGSKHKGSRTCVWVPKVLVSNAKGPKTIWVYASGGSSWILDSGCTNHMTGEKRMFSSYEKNQDPQRAITFGDGNQ

SEQ ID NO: 10029 - protein, 1929 aa, Zea mays
  Clone ID: TF_ZM4944.C2.o1.fg.pep
MSGDHAKKEMETGEKPTTSYGSTSSEESRTKRREKKKSSSNKGKEKKSSSHHKEKKEKSSSHKPHRKGDKHKRMRKVVYYETDTSSTSTSDSDAPSVTSKRQERKKYSKIPLRYPRIPKHTPLLSVPLGKPPTFNGEDYAMWSNLMRFHLTSLHKRIWDVVEYGVQVPSIGDEDYDTDEVAQIEHFNSQAATILLASLSKEEYNKVQGLKNAKEIWDLLKTAHEGDELTKITKRETIEGELGRFRLRQGEEPQDMYNRLKTLVNQVRNLGSTKWDDHEVVKVILRALIFLNPTQVQLIRGNPRYPLMTPEEVIGNFVSFECMIKGSKKINELDEPSTSEAQPVAFKATEEKKEESTPSRQPIDASKLDNEEMALIIKSFRQILKQRKGKDYKPRSKKVCYKCGKPGHFIAKCPMSSDSDRGDDKKGRRKEKKKYYKKKGGDAHVCREWDSDESSSDSSDDEDAANIAVTKGLLFPNVGHKCLMAKDGKKKVKSRSSTKYETSSDEDDDKNEEDNLRILFANLNMEQKEKLNELISAIHEKDDLLDSQEDFLIKENKKHVKVKNAYALQVEKCEKLSSELSTCREMIDNLRNENAILNAKVDSHVCNVSIPNLKNDNVDLLAKIDELNASLASLRLENENLIAKAKNFDVCNATISDLRTKNEMLHAKVVELKSCKPSTSNVEHVSICTRCRDINIEAIHDHLALIKKQNDHIAKLDAKIAEHNLENEKFKFARSMLYNGRRPGIKDGIGFQRGDNVKLNAPPKNLSNFVKGKAPMPQDNEGYILYPAGYPESKIRKIHSRKSHSGPNHAFMYKGETSSPRQPTRAKLPKKKIPNASNDHAISFKTFDASYVLTSKSGKVVAKFVGGKHKGSKTCVWVPKVLVSNAKGPKTVWVYASGGSSWILDSGCTNHMTGEKRMFSSYEKNKDPQRAITFGDGNQGLVKGVTVFRRSDDSIAFKGVLEGQLYLVDFDRAELDTCLIAKTNMGWLWHRRLAHVGMKNLHKLLKGEHILGLTNVHFEKDRICSACQAGKQVGTHHPHKNIMTTDRPLELLHMDLFGPIAYISIGGSKYCLVIVDDYSRFTWVFFLQEKSQTQETLKGFLRRAQNEFGLRIKKIRSDNGTEFKNSQIESFLEEEGIKHEFSSPYTPQQNGVVERKNRTLLDMARTMLDEYKTPDRFWAEAVNTACYAINRLYLHRILKKTPYELLTGKKPNISYFRVFGSKCFILIKRGRKSKFAPKTVEGFLLGYDSNTRAYRVFNKSTGLVEVSCDVVFDETNGSQVEQVDLDEIGEEQAPCIALRNMSIGDVCPKESEEPPSTQDQPSSSMQASPPTQNEDEAQNDEEQNQEDEPPQDDSNDQGGDTNDQEKEDEEEPRPPHPRVHQAIQRDHPVDTILGDIHKGVTTRSRVAHFCEHYSFVSSIEPHRIEEALQDSDWVVAMQEELNNFTRNEVWHLVPRPNQNVVGTKWVFRNKQDEHGVVTRNKARLVAKGYSQVEGLDFGETYAPVARLESIRILLAYATYHGFKLYQMDVKSAFLNGPIKEEVYVEQPPGFEDSEYPNHVYRLSKALYGLKQAPRAWYECLRDFLIANGFKVGKADPTLFTKTLENDLFVCQIYVDDIIFGSTNESTCEEFSRIMTQKFEMSMMGELKYFLGFQVKQLQEGTFISQTKYTQDILAKFGMKDAKPIKTPMGTNGHLDLDTGGKSVDQKVYRSMIGSLLYLCASRPDIMLSVCMCARFQADPKESHLTAVKRILRYLAYTPKFGLWYPRGSTFDLIGYSDADWAGCKINRKSTSGTCQFLGRSLVSWASKKQNSVALSTAEAEYIAAGHCCAQLLWMRQTLRDYGYKLTKVPLLCDNESAIKMADNPVEHSRTKHIAIRYHFLRDHQQKGDIEISYINTKDQLADIFTKPLDEQSFTRLRHELNILDSRNFFC

SEQ ID NO: 10030 - protein, 1940 aa, Zea mays
  Clone ID: TF_ZM4954.C4.o1.fg.pep
MSGDHAKKEMETGDKPTTSQGSTSSEESRTKKREKKKNSSKRKEKRSSSSHHKEKKEKSSSHKPHRSGDKHKRMRKVVYYETDTSSTSTSGSDAASVTSKRQERKKYSKIPLRYPRVPKHTPLLSVPLGKPPTFNGEDYAMWSNLMRFHLTSLHKSIWDVVEYGVQVPSIGDEDYDTDEVSQIEHFNSQAATILLASLSKEEYNKVQGLKNAKEIWDLLKTAHEGDELTKITKRETIEGELGRFRLRQGEEPQDMYNRLKTLVNQVRNLGSTKWDDHEVVKVILRALIFLNPTQVQLIRGNPRYPLMTPEEVIGNFVSFECMIKGSKKINELDEPSTSEAQPVAFKATEEKKEESTPSRQPIDASKLDNEEMALIIKSFRQILKQRKGKDYKPRSKKVCYKCGKPGHFIAKCPMSSDSDRGDDKKGRRKEKKKYYKKKGGDAHVCREWDSDESSSDSSDDEDAANIAVTKGLLFPNVGHKCLMAKDGKKKVKSRSSTKYETSSDEDDDKNEEDNLRILFANLNMEQKEKLNELISAIHEKDDLLDSQEDFLIKENKKHVKVKNAYALQVEKCEKLSSELSTCREMIDNLRNENAILNAKVDSHVCNVSIPNLRNDNVDLLAKIDELNASLASLRLENENLIAKAKNFDVCNATISDLRTKNEMLHAKVVELKSCKTSTSNVEHVSICTRCRDINIDAIHDHLALIKKQNDHIAKLDAKIAEHNLENEKFKFARSMLYNGRRPGIKDGIGFQRGDNVKLNAPPKNLSNFVKGKAPMPQDNEGYILYPAGYPESKIRKIHSRKSHSGPNHAFMYKGETSSSRQPTRAKLPKKEIPNASNDHAISFKTFDASYVLTSKSGKVVAKFVGGKHKHSKTCVWVPKVLVSNAKGPKTVWVYASGGSSWILDSGCTNHMTGEKRMFSSYEKNKDPQRAITFGDGNQGLVKGLGKIAISPDHSISNVFLVDSLDYNLLSVSQLCQMGYNCLFTDICVTVFRRSDDSIAFKGVLEGQLYLVDFDRAELDTCLIAKTNMGWLWHRRLAHVGMKNLHKLLKGEHILGLTNVHFEKDRICSACQAGKQVGTHHPHKNIMTTDRPLELLHMDLFGPIAYISIGGSKYCLVIVDDYSRFTWVFFLQEKSQTQETLKGFLRRAQNEFGLRIKKIRSDNGTEFKNSQIESFLEEEGIKHEFSSPYTPQQNGVVERKNRTLLDMARTMLDEYKTPDRFWAEAVNTACYAINRLYLHRILKKTSYELITEGFLLGYDSNTRAYRVFNKSTGLVEVSCDVVFDETNDSQVEQVDLDEIGEEQAPCIALRNMSIGDVCPKESEEPPSTQDQPSSSMQASPPTQNEDEAQNDEEQNQEDEPPQDDSNDQGGDTNDEEKEDEEEPRPPHPRVHQAIQRDHPVDTILGDIHKGVTTRSRVAHFCEHYSFVSSIEPHRVEEALQDSDWVVAMQEELNNFTRNEVWHLVPRPNQNVVGTKWVFRNKQDEHGVVTRNKARLVAKGYSQVEGLDFGETYAPVARLESIRILLAYATHHGFKLYQMDVKSAFLNGPIKEEVYVEQPPGFEDSEYPNHVYRLSKALYGLKQAPRAWYECLRDFLIANGFKVGKADPTLFTKTLENDLFVCQIYVDDIIFGSTNESTCEEFSRIMTQKFEMSMMGELKYFLGFQVKQLREGTFISQTKYTQDILAKFGMKDAKPIKTPMGTNGHLDLDTGGKSVDQKVYRSMIGSLLYLCASRPDIMLSVCMCARFQADPKESHLTAVKRILRYLAYTPKFGLWYPRGSTFDLIGYSDADWAGCKINRKSTSGTCQFLGRSLVSWASKKQNSVALSTAEAEYIAAGHCCAQLLWMRQTLRDYGYKLTKVPLLCDNESAIKMADNPVEHSRTKHIAIRYHFLRDHQQKGDIEISYINTKDQLADIFTKPLDEQSFTRLRHELNILDSRNFFC

SEQ ID NO: 10031 - protein, 1217 aa, Zea mays
  Clone ID: TF_ZmC119_1758.pep
MDPKGKGMVVNDKEKESFVNDPKDDKPTDSGSGHKRKDGRKKKTRRIKEIVYYDSDESSSSQKDDDNDYEKKKTVNSKFSFDYSHIPQSSNAHLLSIPLGKPPHFDGEDYRFWSHKMRSHLFSLHPSIWEIVENGMHFDSTDSPMFINEQIHKNAQATTVLLASLCRDEYHKVSGLDNAKQIWDTLKISHEGNDVTMLTKMELVEGELGRFAMIRGEEPTQTYNRLKTLVNKIRSYGSTRWTDHDVVRLMLRSFTVLDPHLVNNICENPRYTKMTPKEILGKFISGRMMIKEARYVDDALNGPIQEPQTIALKATRSKEALPSKTALRGRKEHPNKTKTKGKRSCFKCGKIGHFIANCPDNDSDQEQGNKREKKKAYKKAKGEGHLGKEWDSDCSSSDSDNEGLTATAFNKSALFPNEHHTCLMAREKKVSTHNTSTYASSSDEESSDDEIDYSCLFKGLDRTKVDKINELIDALNDKNRLLEKQEDLLYEEHDKFVEAQKSLALEIKRNEMLSCELSTCHDSISSLKSINDDLSAKLEIANKSTSCVEHVVVCNRCKDFNVDACSEHLVSISKLNDEVASLNAQLKTSKSEFDKLKFARDAYTIGRHPSVKDGLGFKREVKNLTSHKASISAKEKGKAPMASSAQKNHAFMYHDKKHSRNIYRSYDAFDSHAMIASSSSIMHDRNLARKNVVHHMPRRNIVHRKVMNEPSTIYYACNASFAICRKDKKVYASGGSSWIIDSGCTNHMTGEKKMFSSYVKNKDPQGSIIFGDGNQGKVKGLGKIVISSEHSISNVFLVESLGYTLLSVSQLCNMGYNYLFTNVDVSVFRRSDGSLAFKGVLDGKLYLVDFAKEEAGLDACLIAKTSMGWLWHRRLAHVGMKNLHKLLKGEHVIGLTNLTFEKDRPCAACQAGKQVGSSHHAKNVMTTSRPLELLHMDLFGPVTYLSIGGRTLKCFLRRAQNEFELKVKKIRSDNGSEFKNLQVEEYLEEEGIKHEFSAPYTPQQNGVVERKNMTLLDMARTMLGEFKTPERFWTEAVSTACHAINRVYLHRLLKKTSYELLTGNKPNVSYFRVFGSKCYILVKKGRNSKFAPKAVEGFLLGYDSNTKAYRVFNKSSGLVEVSSNVVFDETNGSPREQVVDLDDVDEEDVPTAAIRTMAIGEVRPQEQGERDQSSSSTMVQPPTQDDEQVVPNGCEERFPQRANQGGGVRGATPWLRG

SEQ ID NO: 10032 - protein, 1354 aa, Zea mays
  Clone ID: TF_ZmC119_990.pep
MELVEGELGRFAMIRGEEPTQTYNRLKTLVNKIRSYGSTRWTDHDFVRLMLRSFTVLDPHLVNNIRENPRYTKMSPEEILGKFVSGRMMIKEARYVDDALNGPIHEPQTVALKATRSKEALPSKVAQVESAVLNDEEMALIIKRFKTALKGRKEHPNRNKTKGKRSCFKCGKIGHFIANCPDNDSDQEKKSGKWEKKKNYKKAKGEAHLGKEWNSDCSSSDSDNEGLAATAFNKSSLFPNEHHTCLMAKEKKGLDRTKVDKINELIDALNDKNRLLEKQEDLLYEEHDKFVSAQNSLALEVKRNEMLSYELSTCHETISTLKSANNDLNAKLEVSSKPNSCVEHIMICNRCKDFNVDACSEHLVCISKLNDEVASLNAQLKTSKSEFDKLKFARDAYTIGRHPSIKDGLGFKREVKNLTSHKASISAKEKGKASMASSAQKNHAFMYHDRRHSRNGYRSYDTFSHAMVASSSSIIHDRNLARRNVINHMPRRNVAHVPRKTNSEPSTIYHALNASFAIYRKDRKIVARKLGAKCKGDKTCIWVPKDIVTNLVGPNKSWVYASGGSSWIIDSGCTNHMTGEKQMFTSYVKNKDSQDSIIFGDGNQGKVKGLGKIAISNEHSISNVFLVESLGYNLLSDKSETQGTLKRFLRRAQNEFELKVKKIRSDNGSEFKNLQVEEYLEEEGIKHKFSAPYTPQENGVVERKNRTLIDMARMMLGEFKTPERFWSEVVNTACHAINRVYLHRLLKKTSYELLTGNKLNVSYFRVFGSKCYIQVKKGRNSKFAPKAVEGFLLGYDSNTKAYRVFNKSSGLVEVSSDVVFDETNGSPREQVLDLDDVDEEDIPTAAIRTMAIGDVRPLEQKEQDQPSSSTMVHPPTQEDKQVHQEEACDQGGAQDDHLMEEEAQPAPPTQVRATIQRNHPVDQILGDISKGVTTRSRLVNFCEHYSFVSSIEPFRVEEALLDPDWLLAMQEELNNFKRNEVWTLVPRPKKNVVGTKWVFRNKQDEHGVVTRNKARLGKRLCPSRRLFQMDVKSAFLNGPIKEEVYVEQPPGFEDERYPDHVCKLSKALYGLKQAPRAWYECLRDFLIANAFKVGKADPTLFTKTCDGDLFVCQIYVDDIIFGSTNQKSCEEFSRVMTQKFEMSMMGELSYFLGFQVKQLKDGTFISLTKYTQDLIKRFGMKDAKPAKTPMGTDGHTDLNKGDSDYAGCKVDRKSTSGTCQFLGRSLVSWSSKKQTSVALSTAEAEYVAAGQCCAQLLWMRQTLRDFGYNLSKVPLLCDNESAIRIADNPVEHSRTKHIDIRHHFLRDHRQKGDIEVFHVSTENQLADIFTKPLDEKTFCRLRSELNVLDSRNLD

SEQ ID NO: 10033 - protein, 622 aa, Zea mays
  unsure (1)..(622): unsure at all Xaa locations
  Clone ID: TF_ZmC13103_7.pep
MDPKGKGIVINDKEKEFFVNEPRDDKSNDSGSGHSRKDGKKKKTRRIKEIVYYDSDESTSSQKDDDHNEYERKKPATRSKEALPSKVAQVEAAGLNNEEMALIIKRFKTVLKGRKGQPSKTKTKEKRSCFKCGKIGHFIANCPDNESDQEKGNKREKKKHYKKAKGEAHIGKEWDSDCSSSDSDNEGLAATAFNKSSLFPNERHTCLMAREKKVYASGGSSWIIDSGCTNHMTGEKKMFTSYVKNKDSQDSIIFGDGNQGKDKSETQGTLKRFLRRAQNEFELKVKKIRSDNGSEFKNLQVEEFLEEERIKHEFSAPYTPQQNGVVERKNRTLIDMARTMLGEFKTPERFWSEAVNTACHAINRVYLHRLLKKTSYELLTDNKPNXEEDVPTAAIRTMAIGEVRPQEQDERDQPSSSTTVHPPTQDDEQVHQKEACDQGGAQDDHVMGEEAQPAPPTQVRAMIQRDHPVDQILGDISKGVTTRSRLVNFCEHYSFASSIEPFRVEEALLDPDWVLAMQEELNNFKRNEVWTPVPRPKQNVVGTKWVFRNKQDEHGVVTRNKARLVAKGYAQVAGLDFEETFAPVARLESIRILLAYAAHHSFRLFQMDVKSAFLNGPIKEEV

SEQ ID NO: 10034 - protein, 2723 aa, Zea mays
  unsure (1)..(2723): unsure at all Xaa locations
  Clone ID: TF_ZmC29741_1.pep
MQEELNNFTRNEVWSLVQRPKQNVIETKWVFRNKQDENGVVTRNKARLVAQGYTQVEGLDFGETYAPVARLESIRILIAYATNHDFKLYQMDVKSAFLNGPLQERVYVEQPPGFEDPKKPNHVYLLHKALYGLKQAPRAWYDCLKDFLIKNGFTIGKADSTLFTRKVDNELFVCQIYVDDIIFGSTNEKFCEEFSKVMTNRFEMSMMGELKYFLGFQVKQLKEGTFLCQTKYTQDMLKKFGMEKAKHAKTPMSSNGHLDLNEEDYTDCKVDRKSTTGTCQFLGRSLVSWSSKKQNCVALSTAEAEYIAAGACCAQLLWMKQTLRDFGSAAAISFSPLSTPNSLEPSPFWKCGWRSVLPGVFPPSSSISLGDLDPIFGSRFYFLFLRMVRRRNPSVVESDSSDDQEIHGDTPPRSRSKRGRGSGNVMPGAEASGSQSARGRTSRTPSGRSRPATNPQAWEPASDDDGGKDDEVDLPPAQAPVIRGLVLHRAEAQCTGNEPVTDFTASGGSALLQDLRFQNPVLRIRDVRIDGNRFWTLHHVDFYNSVILPKKHQPILHQRYINWEGCEAIGDPEMSQALRACGRKQMKNIMTFQYDWNDEVIAQFYSTLWIKLAGVESHYNYPYLNFFIEGSWYKVSYRRFAHILGFSDNDISGDKIKIHDFRQPTRDEAKDLHLSESGKYWESTNIHKYYHYINSLCRMTLIPKGGNQMNILGESKVLLSFMKPNSSERVNVFDMIWQEIIHAACFPLKGCLHAPFIMKMIEVVTQFRFEKGTRHQSYTPFWIDPNNPAGRLRKAPSSSRGHTSAGPSAGAGAAAAAGGASRPSPGRGSPTPRGRGRGRGRGRGMGVRLAHGFAAFFSMCRNIAADVHEVARRQRETDDNLRRQASALGTPFAPRSPDVPLHPLLQMSTSGTSRRMGYLFHQPMTSKKKKLILMIRSSLTLPHITGIRANRPLTLRPRTRLAVLLLRPSLERNTLPPTWRNTSSLLIILLPTGDPWIGVSLSLFLVLGAKKGENVYYSVLYFCNEHLFVLASITKKGEIDDKSNDSGSGHRRKDGKKKKTRRIKEIVYYDDSDESTFSQKDDNHNDYERRKPVNSNFSFDYSCIPQSANAHLLSIPLGKPPHFDGEDYGFWSHKMRSHLFSLHPSIWEIVESGMHFDSSDSPLFINEQIHKNAQTTTVLLASLCRDEYHKVSGLDNTKQIWDTLKISHEGNDVTLLTKMELVEGELGRFAMIRGEEPTQTYNRLKTLINKIRSYGSTRWTDHDVVRLMLRSFTVLDPHLVNNIRENPRYTKMSPEEVLGKFVSGRMMIKEARYVDDALNGPINEPQPVALKATRSKEALPSKVAQIEAARLNDEEMALIIKRFKMALKGRKGQPSKIKAKGKRSCFKCGKIGHFIANCPDNESDQEHGSKREKKKNYKKAKGEAHLGKEWDSDCSSSDSDNEGLAATAFNKSSLFPNERHTCLMAREKKGLDRIKVDKINELIDALNDKNRLLEKQEDLLYEEHDKFVEAQKSHALEVKRNEMLFCELSSCHETISSLRSINDDLNAKIEIASKSTTCVENVVICNRCKDFDIDACSEHIASIAKLNDEMASLNAQLKASKSDFDKLKFARDAYTIGRHTSIKDGLGFKREAKNSTSHNDVISTNENGKALVASSTNMNHVFMYNDRRQSHKRCNTFDSLDCALYTSIATYIKDREILRKNGIHVPRKNVVHAARKVMNGPSTIYHALNASFAICRKDRKIVARKLGAKCKDVSVFRRSDGSLAFKGVLDDKLYLVDFAKEEAGLDACLIAKTSMGWLWHRRLAHVGMKNLHKLLKGEHVIGLTNVQFEKDRPCAACQAGKQVGGAHHSKNVMTTSRPLELLHMDLFGPVAYLSIGGSKYGLVIVDDFSRFTWVFFLQDKSETQGTLKRFLRRAQNEFELKVKKIRSDNGSEFKNLQVEEFLEEEGIKHEFSAPYTPQQNGVVERKNMTLIDMARTMLGEFKTPECFWSEAVNTACHAINRVYLHRLLKKTSYELLTGNKPNVSYFRVFGSKCYILVKKGRNSKFAPKAIEGFLLGYDSNTKAYRVFNKSSGLVEVSSDVVFDETNGSPREQVVDLDDVDEEDVPTAATRTMAIGDVRPQEQKEQDQPSSSTMVHPPTQDDEQVHQQEACDRGGAQDDHVMEEETQPAPPTQVRAMIQRDHPVDQILGDISKGVTTRSRLVNFCEHYSFVSSIEPFRVEEALLDPDWVLAMQEELNNFKRNEVWTLVPHPKQNVVGTKWVFRNKQDEHGVVTRNKARLVAKGYAQVAGLDFEETFAPVARLESIRILLAYAAHHSFRLFQMDVKSAFLNGPIKEEVYVEQPPGFEDERYPDHVCKLSKALYGLKQAPRAWYECLRDFLIGNAFKVGKADPTLFTKTCDGDLFVCQIYVDDIIFGSTNKKSCEEFSRVMTQKFEMSMMGELNYFLGFQVKQLKDGTFISQTKYTQDLLKRFGMKDAKPAKTPMGTDGHTDLNKGGNRVERXAYRSMIGSLLYLCASRPDIMLSVCMCARFQSDPKECHLVAVKRILRYLVATPCFGLWYPKGSTFDLIGYSDSDYAGCKVDRKSTSGTCQFLGRSLVSWNSKKQTFVALSTAEAEYVAVGQCCAQLLWMRQTLRDFGYNLSKVPLLCDKESVIRMTDTTNEQSHTKHIDIRHNFMGDHKQKGNMKVFHVSPDKKLTDISTKPLNDNTFCRLRSELNVLDSRNLD

SEQ ID NO: 10035 - protein, 2101 aa, Zea mays
  unsure (1)..(2101): unsure at all Xaa locations
  Clone ID: TF_ZmC29741_2.pep
MAPLYTSAVLGYASVRWLKAFSDEQCAGINHFVALYAVPVLIFHMVSTNDPYHMNERLIAADTLQKAVVLLALTAWAFWSHLSRRRGGRGKRQVVQGAESPIKWVVTNFSVASLPNTIIMGVPLLDGMYGPVSGGLMKQIVVMQFCIWYNVVIFLYEFMAARDGSARISPAVPATAGERVVDDENGGSSSVHRHAAADRSHHHHQVVVNIEITEVAPAPAAEAVVASSLMPAAATKEMSPEDDGDANKQVVVAVDVQPPVMHVVWMATKKLLQIPNTYASFLGLIWSLMAFKIGFSMPKIVSDSLFIIYTTAVGLSMFASGTFIARQSRFVPCGYTVASLSMLLKFLIGPVIMLIASLAIGMHGTLLHIAVVQASRPTAPNNVYIYAALPLAVTSFVYAEEYKVHADIMSTGSVPFKFISFSSVKRLSQKPYMCLDQRRQQSLIEVPFHTAYINKRTGRHVNRCSSYTISSYIDTWYPIYHYTVSEEKDTIVILVVTDTKESNSNHPNGLIPKSLRHNNVTLKGKCALGPFLSILVIECQHKCFCVNLCKVVDKVQTKSKGKIELEKRWLCTAKVCSVWVHRTVRCARLALANSLLSGLRRRCTEKESFVNELKDDKPTDSGSGHKWKDGKKKKTRRIKEIVYYDDIDESTSSQKDDYDYEKRKTVNSNFSFDYSRIPQSTNAHLLSIPLGKPPHFDGEDYGFWSHKMRSHLFSLHPSIWEIVESRMKFDSTDSPMFINEQIHKNAQATTVLLASLCRDEYNKVSGLDNAKQIWDTLKISYEGNDVTMLTKMELVEGELGRFAMIRGEEPTQTYNRLKTLVNKIRSYGSTRWTDHDVVRLMLRSFTVLDPHLVNNIRENPRYTKMSPEEVLGKFVSGRMMIKEARYVDDALNGPINEPQPVALKATRSKEALPSKVAQVEAAGLNDEEMTLIIKCFKTALKGRKGQPNKTKTKAKRSCFKCGKIGHFIANCPDNDSDQEKGNKREKKKNYKKAKGEAHLGKEWDSDCSYSDSDNEGLAATAFNKSSLFPNEHHTCLMAKEKKVYTRDTTYASSSDDDSSDDDEIDYSSLFKGLDRIKIGKINELIDALNDKNRLLEKQEDLLYEEHDKFVEAQKSHALEVKRNEMLSCELSTCHETISSLKSINDDLNAKLEKSSKLTSCVEHVVICTRCKDFNVDACSEHLVSIAKLNDEVASLNAQLKTSKSEFDKLKFARDAYTIGRHLSIKDGLGFKREAKNLTSHKAPISAKEKGKAPMASSAKKNHAFMYHDRRHSRNAYRSYDAFDSHDMFASSSSYMHGRNVVHHMPRRNVVNVPRKINEPSTIYYACNASFAICRKGKKVYASGGTSWIIDSGCTNHMTGEKRMFSSYIKNKDPQDSIIFGDGNQGKVKGLDVSVFRRCDGSLAFKGVLDGKLYLVDFAKEEAGLDACLIAKTSMGWLWHRRLAHVGMKNLRKLLKGEHVIGLTNVHFEKDRPCVACQAGKQVGSSHHTKNVMTTSRPLEMLHMDLFGPVAYLSIGGSKYGLVIVNDFSRFTWVFLLQDKSETQGTLKRFLRRAQNEFELKMKKIRSDNGSEFKNLQVEEFLEEEGIKHEFSAPYTPQQNGAVERKNRTLIDMARTMLGEFKTPERFWSEAVNTACHAINRVYLHRLLKRTSYELLTGNKPNVSYFRVFGSKCYILVKKGTTSKFAPKAVEGFLLGYDSNTKAYRVFNKSLGLVEVSSDVVFDETNGSPREQVVDLDDVDEEDVPTAAMRTMAIGDVRPQEQLEQDQPSSSTMVHPPTQDDEQVHQEEACDQGGAQDDHVMEEEAQPAPPXQVRATIQRKHPIDQILGDISKGXVEEALLDPDWVLAMQEELNNFKRNEVWTLVPRPNQNVVETKWVFRNKQDEHGVVTRNKARLVAKGYAQVAGLDFEETFAPVARLESIRILLAYAAHHSFKLFQMDVKSAFLNGPIKEEVYVEQPPGFEDEWYPDHVCKLSKALYGLKQAPRAWYECLRDFLIANAFKVGKANPTLFTKTCDGDLFVCQIYVDDIIFGSTNQKSCEEFSWVMTQKFEMSMMGELNYFLGFQVKQLKDGTFISQTKYTQDLLKRFGMKDAKPAKNLRLGS

SEQ ID NO: 10036 - protein, 957 aa, Zea mays
  Clone ID: TF_ZmC29741_31.pep
MDPKGKGIVINDKEKESFVNEPKDDKSNDSGPGHRRKDGKKKKTRRIKEIVYYDSDESSSSQKDDDNDYRKTVNSNFSFDYSRIPHNSNSHLLSIPLGKPPHFDGEDYGFWSHKMRSHLFSLHPSIWEIVENGMKFDSSDSPMLINEQIHRNAQATTVLLASLCREEYNKVSGLDNAKQIWDTLKISHEGNDVTMLTKMELVEGELGRFAMIRGEEPTQTYNRLKTLVNKIRSYGSTRWTDHDVVRLMLRSFTVLDPHLVNNIRENPRYTKMSPEEVLGKFVSGRMMIKEARYVDDALNGPIHEPQPIALKATRSKEALPSKVAQVEAAGLNNEEMALIIKRFKTALKGRKGQPSKTKTKEKRSCFKCGKIGHFIANCPDNDSDQEHGSKREKKKHYKKAKGEAHIGKEWDSDCSSSDSDNEGLAATAFNKSSLFPNERHTCLMAREKKVCNQNNVTYDSSSDDESSDDEIDYSSLFKGLDRTKVDKINELIDALNEKDRLLEKQEDLLYEEHDKFVEAQKSYALEVKRNEMLSCELSSCHETIFKLRSINDDLNAKLEIASKSTSCVENVVACTRCKDINIDAYSEHLACISKLNEEVASLNAQLKTSKSDFEKLKFARDAYTVGRHPSINDGLGFKREVKNLTSHKAPISAKEKGKAPMANSTKRNYAFLYHDRRQSRNAYRSYNAYDAFDSHAMVASSSSYVHDRNVSRKNVVHNMPRRNMINVPRKVNEPSTKYHALNASFAICRKDRKIIARKLGARCKGDKTCIWVPKDICANLVGPNMSWVYASGGSSWIIDSGCTNHMTGEKKMFTSYVKNKDSQDSIIFGDGNQGKVKGLGKIAISSEHSISNVFLVESLRYNLSSVSQLCNMGYNCLFINVDVSVFRRSYGSLAFKGVLDDKLYLVDFSKEEADLDACLIAKTSMGWLWHCRLAHVGIKNIHKLLKGEHVESRLEGG

SEQ ID NO: 10037 - protein, 666 aa, Zea mays
  Clone ID: TF_ZmC29741_45.pep
MDPKGKGIVINDKEKESFVNEPNDDKPTDSGSGHKRKDGKKKKTIRIKEIVYYDDSDESTSSQKNNDDNDYDKRKMVNTNFSFDYSRIPHSSNAHLLSIPLGKPPHFDGEDYGFWSHKMRSHMFSLHPSIWEIVENGMKFDSSDSPIFINEQIHKNAQATTVLLASLCRDDYHKVSGLDNAKQIWDTLKISHEGNNVTLQTKMELVEGELGRFAMIRGEEPTQTYNRLKTHINKIRSYGSTRWTDHDVVRLMLRSFTVLDPHLVNNIHENPRYTKMSPEEVLGKFVSGRMMINEARYVDDALNGPINEPQPFALKATRSKEALPSKVAQVEAAGLNDEEMALIIKRSKTTLKGHKGQPSKTKTKGKRSCFKCGKIGHFIANCPDNDSDQEQGNKREKKKTYKKAKGEAHLGKEWDSDCSSSDSDNEGLAATAFNKSSLFPNERHTCLMAKEKKLCTRNNATYDSSSDDESSDEEMDYSSLFKGLDRTKIDKINELIDALNEKDRLLEKQEDLLYEEHDKFVEAQKSHALEVKRNEMLSCELSSCHETISSLRSINDDLNAKLEIASKSNSCVEHVMICNRCKDFDIDACSEHLVSISKLNDELASLNAQLKTSKNEFDKLKFARDAYTIGRHPSIKDGLGFKREAKDLTSHKAPISAKEKGKAPMA

SEQ ID NO: 10038 - protein, 452 aa, Zea mays
  Clone ID: TF_ZmC29741_65.pep
MDPKGKGIVINDKEKESFVNEPRGDKSNDSGSGHRRKDGKKKKTRRIKEIVYYDSDESTSSQKDDDHNEYERKKPVNSNFSFDYSRIPQSTHAHLLSIPLGKPPHFDGEDYGFWSHKMRSHLFSLHPSIWEIVESGMHFDSADSPMFINEQIHKNAQATTVLLASLCRDEYHKVSGLDNAKQIWDTLKISHEGNDVTLLTKMELVEGELGRFAMIRGEEPTQTYNRLKTLINKIRSYGSTRWTDHDVVRLMLRSFTVLDPHLVNNIRENPRYTKMSPEEVLGKFVSGRMMIKEARYVDDALNGPIHEPQPLALKATRSKEALPSKVAQVEAAGLNNEEMALIIKRFKTALKGRKGQPSKTKAKGKRSCFKCGKIGHFIANCPDNESDQEQGSKREKKKHYRKAKGEAHIGKEWDSDCSSSDSDNEGLAATAFNKSSLFPNERHTCLMAREKK

SEQ ID NO: 10039 - protein, 1812 aa, Zea mays
  Clone ID: TF_ZmC4916_370.pep
MDPKGKGMVVDNNEKESIFNELKNDKSTDLGSSHKRKDGKKKKTRRIKEIVYYDSDESSSSQKDDDHNDYERRKPVNSNFSFDYSRIPQSSNSHLLPIPLGKPPHFDGEDYGFWSHKMRTHLFSLHPSIWEIVESGMQFDSSDSPMFINEQIHKNAQATTVLLASLCRDEYNKVSGLDNAKQIWDTLKISHEGNDITMLTKMELVEGELGRFAMIRGEEPTQTYNRLKTLINKIRSYGSTIWTDHDVVRLLLRSFTILDPHLVNNIRENPRYTKMSPEEVLGKFVSGRMMIKEARYVDDALNGPINEPQPFALKATRSKEALPSKVAQIEAAGLNDEEMALIIKCFKTVLKGHKGQPSKTKTKGKRSCFKCGKIGHFIANCPDNDSDQEQGNKREKKKNYKKAKGEAHLGKEWDSDCSSSDSDNEGLAATAFNKSTLFPNERHTCLMAREKKVCTRNSTYASSSEDESSDEDEVDYSCLFKGLDRTKVDKINELIDALNEKNILLEKQEDLLYEEHDKFVEAQKSLALEIKRNEMLACELSTCHDSISKLKSINDDLNAKLVEAHKSNSCVEHVEICTRCKDVDINACSEHLVSISKLNDELASLNAQLKTSKSEFEKLKFARDAYTIGRHPSIKDGLGFKREAKSLTSHKTPISTKEKGKAPMANSVKKNHAFMYYDRRYSRNAFRGHNVFDSHAYDSYAMTASSSHVMHGRNVLRKNVVHQMPRRNVVHNAPRKVVNEPSTIYCALNASFAICRKDKKIVARKLGAKCKGDKACIWVPKDICTNLVGPNMSWVYASGGSSWIIDSGCTNHMTGEKKMFTSYVKNKDSQDSIVFGDGNQGKVKGLVESLGYNLLSVSQLCNMGYNCLFTNVDVSVFRRSDGSLAFKGVLDGKLYLVDFAKEEAGLDACLIAKTSMGWLWHRRLAHVGMKNLHKLLKGEHVIGLTNVQFEKDRPCAACQAGKQVGGAHHSKNVMTTSRPLELLHMDLFGPVAYLSIGGSKYGLVIVDDFSRFTWVFFLQDKSETQGTLKRFLKRAQNEFELKVKKIRSDNGSEFKNLQVEEFLEEEGIKHEFSAPYTPQQNGVVERKNRTLIDMARTMLGEFKTPERFWSEAVNTACHAINRVYLHRLLKKTSYELLTGNKPNVSYFRVFGSKCYILVKKGRNSKFAPKAVEGFLLGYDSNTKAYRVFNKSSGLVEVSSDVVFDETNGSPREQVVDCDDVDEEDVPTAAIRTMAIGEVRPQEQDERDQPSSSTTVHPPTQDNEQVHQKEACVQGGAQDDHVMEEEAQPAPPTQVRAVIQRDHPVDQILGDISKGVTTRSRLVNFCEHYSFVSSIEPFRVEEALLDPDWVLAMQEELNNFKRNEVWTLVPRPKQNVVGTKWVFRNKQDEHGVVTRNKARLVAKGYAQVTGLDFQETFAPVARLESIRILLAYAAHHSFRLYQMDVKSAFLNGPIKEEVYVEQPPGFEDERYPDHVGKADPTLFTKTCDGDLFVCQIYVDDIIFGSTNQKSCEEFSRVMTQKFEMSMMGELNYFLGFQVKQLKDGTFISQTKYTQDLLKRFGMKDAKPAKTPMGTDGHTDLNKGGKSVDQKAYRSMIGSLLYLCASRPDIMFSVCMCARFQSDPKECHLVAVKRILRYLVATPCFGIWYPKGSNFDLIGYSDSDYAGCKVDRKSTSGTCQFLGRSLVSWNSKKQTSVALSTAEAEYVAAGQCCAQLLWMRQTLRDFGYNLSKVPLLCDNESAIRMAENPVEHSRTKHIDIRHHFLRDHQQKGDIEVFHVSTENQLADIFTKPLDEKTFCRLRSELNVLDSRNLD

SEQ ID NO: 10040 - protein, 1179 aa, Zea mays
  Clone ID: TF_ZmC4916_384.pep
MDPKGKGIVIKATRSKEALPSKVAQVETAGLNEEEMALIIKRFKTALKGRKEHPNKNKTKGKRSCFKCGKIGHFIANCPDNDSDQEKKSGKWENKKNYKKAKGEAHLGKEWDSDCSSSDSDNEGLAATAFNKSSLFPNEHHTCLMAREKKGLDRTKVDKINELIDALNDKNRLLEKQEDLLYEEHDKFVEAQKSLALEIKRNEMLSCELSTCHETISTLKGANDDLNAKLEVAIKSNSCVEHVMICNRDAYMIGRHPSIKDGLGFKREVKNLTSHKASISAKEKGKAPMGSSAQKNHAFMYHDRRHSRNGYRSYDTFDSHAMIASSSSIMHDRNLARRNVVHVPRKTNSEPSTIYHALNASFAIYRNDRKIVARKLGAKCKGDKTCIWVPKDIVTNLVGPNKSWVYASGGSSWIIDSGCTNHMTGEKRMFSSYVKNRDSQDSIIFGDGNQGKVKGLGKIAISNEHSISNVFLVESLGYNLLSISQLCNMGYNCLFTNIDVSVFRRSDGSLAFKGVLDDKLYLVDFAKEEDKSETQGTLKRFLRRAQNEFELKVKKIRSDNGSEFKNLQVEEYLEEEGIKHEFSAPYTPQLNGVVERKNRTLIDMARTVLGEFKTPERFWSEAVNTACHAINRVYLHRLLKKTSYELLTGNKPNVSYFRVFGSKCYILVKKGRNSKFAPKAVEGFLLGYDSNTKAYRVFNKSSGLVEVSSDVVFDETNGSPREQVVDLDDVDEEDVPTAAIRTMAIGDPFRVEEALLDPDWVLAMQEELNNFKRNEVCTLVPRPKQNVVGTKWVFRNKQDEHGVVTRNKARLVAKGYAQVAGLDFEETFAPMARLESIRILLAYAAHHSFRSFQMDVKSAFLNGPIKEEVYVEQPPGFEDERYPDHVCKLSKALYGLKQAPRAWYECLRDFLIANAFKVGKADPTLFTKTCDGDLFVCQIYVDDIIFGSTNQKSCEEFSRVMTQKFDMSMMGELSYFLGFQVKQLKDGTFISQTKYTQDLIKRFGMKDAKPAKTPMGTDRHTDLNKGDSDYAGCKVDRKSTSGTCQFLGRSLVSWSSKKQTSVALSTAEAEYVAAGQCCAQLLWMRQTLRDFGYNLSKVPLLCDNESAIRIADNPVEHSRTKHIDIRHHFLRDHQQKGDIEVFHVSTENQLADIFTKPLDEKTFCRLRSELNVLDSRNLD

SEQ ID NO: 10041 - protein, 1647 aa, Zea mays
  Clone ID: TF_ZmC4916_395.pep
MDPKGKGIVINDKEKESFVNEPKDDKSNDSGSGHRRKDGKKKKTRRIKEIVYYDSDESTSSDKDDDYDKQKTVNSNFSFDYSRIPHSSNSHLLSIPLGKPPHFDGEDYGFWSHKMRSHLFSLHPSIWEIVENGMKFDSSDSPMFINEQIHKNAQATTVLLASLCRDEYNKVSGLDNAKQIWDTLKISHEGNDITMLTKMELVEGELGRFAMIRGEEPTQTYNRLKTLINKIRSYGSTRWTDHDVVRLMLRSFTVLDPHLVNNIRENPRYTKMTPEEVLGKFVSGRMMIKEARYVDDALNGPINEHQPLALKATRSKEALPSKVAQIEAAGLNDEEMALIIKRFKTVLKGHKGQPSKTKTKGKRSCFKCGKIGHFIANCPDNDSDQEQGNKREKKKNYKKAKGEAHIGKEWDSDCSSDSDNEGLAATAFNKSSLFPNERHTCLMAREKKVSTRDSTYASSSDNESSDDDIDYSCLFKGLDRSKIDKINELIDALNDKNVLLEKQEDLLYEEHDKFVEAQKSLALEIKRNEILSCELSTCHDSIASLKSKNDDLNAKLEKSSKSTSCVEHVEICTRCKDFDVDACSDHLVSISKLTEELASLNAQLKTSKNEFDKLKFARDAYTIGRHPSIKDGLGFKREAKNLTSHKTPIPAKEKGKAPMATSVKKNHAFMYHDKKNSRNAYDSYAMTASSSHVVHDRNIGRRNVVHNMPRRNVPRKVNEPSTIYHALNASFAIYRKDRKVYASGGSSWIIDSGCTNHMTGEKKMFTSYVKNKDSQDSIIFGDGNQGKVKGLDVSVFRRSDGSLAFKGVLDGKLYLVDFAKEEDKSETQGTLKRFLRRAQNEFELKVKNIRSDNGSEFKNLQVEEFLEEEGIKHEFSAPYTPQQNGVVERKNRTLIDMARTMLGEFKTPERFWSEAVNTACHAINRVYLHRLLKKTSYELLTGNKPNVSYFRVFGSKCYILVKKGRNSKFAPKAVEGFLLGYDSNTKAYRVFNKSSGLVEVSSDVVFDETNGSPREQVVDCDDVDEEDVPTAAIRTMAIGEVRPQEQDERDQPSSSTMVLPPTQDDEQVHQQEADDQGGAQDDHVMEEDAQPAPPAQVRAMIQRDHPVDQILGDISKGVTTRSRLVNFCEHYSFVSSIEPFRVEEALLDPDWVLAMQEELNNFKRNEVWTLVPRPKQNVVGTKWVFRNKQDEHGVVTRNKARLVAKGYAQVAGLDFEETFAPVARLESIRILLAYAAHHSFRLYQMDVKSAFLNGPIKEEVYVEQPPGFEDERYPNHVCKLSKALYGLKQAPRAWYECLRDFLIANAFKVGKADPTLFTKTCNGDLFVCQIYVDDIIFGSTNQKSCEEFSRVMTQKFEMSMMGELNYFLGFQVKQLKDGTFISQTKYTQDLLKRFGMKDAKPAKTPMGTDGHTDLNKGGKSVDQKAYRSMIGSLLYLCASRPDIMLSVCMCARFQSDPKECHLVAVKRILRYLVATPCFGLWYPKGSTFDLVGYSDSDYAGCKVDRKSTSGTCQFLGRSLVSWNSKKQTSVALSTAEAEYVAAGQCCAQLLWMRQTLWDFGYNLSKVPLLCDNESAIRMAENPVEHSRTKHIDIRHHFLRDHQQKGDIEVFHVSTENQLADIFTKPLDEKTFCRLRSELNVLDSRNLD

SEQ ID NO: 10042 - protein, 1708 aa, Zea mays
  Clone ID: TF_ZmC4916_397.pep
MDPKGKGMVVNDKEKETIFNEPRDNKATDSGSSQKKKEGKKKRCIKKIVYYDDNDESSSSQKYNDDNDYEKKKTINSNFSFDYSRIPKSTNGHLLSIPLGKPPHFDGEDYGFWSHKMRSHLFSLHPSIWEIVESGMQFYSTDSPIFINEQIHKNAQATTVLLASLCRDEYHKVSGLDNTKQIWDTLKISHEGNDVTMLTKMELVEGELGRFTMIRGEEPTQTYNRIKTLVNKIRSYGSMRWTDHDVVRLMLRSFTVLDPHLVNNIRENPRYTKITPEEILGKFVSERMMIKEARYVDDALNGPIHEPQTVALKATRSKEVLPSKVAQVEAAGLNEEEMALIFKRFKTALRGRKEHPNKNKTKGKRSCFKCGKIGHFIANCPDNDSDQEQEKKREKKKAYKKAKGEAHLGKEWDSDCSSSDSDNEGLAASAFNKSSLFPNEHHTCLMAKEKKVNTRKTTYASSSDDESSDDEIDYASLFKGLERTKIDKINELIDALNDKNRLLEKQEDLLYEEHDKVVEAQKSLALEVKRNEMLSCELSTCHETISSLKSVNDDLNAKIEVANRSNSCVEHVVICNRCKDFDVDACSEHLVSIAKLNDEVASLNAQLKTSKNEFDKLKFARDAYTIGRHPSIKDGLGFKREAKNLTSHKAPISAKEKGKAPMANSAQKNHAFMYHDRRYSRNVHYDRSYNDVVSHAMIASSSSIMHDRSLARKNVIYHVPRRNVHVPRKINEPSTIYHACNASFAICRKDKKVYASGGSSWIIDIGCTNHMTGEKKMFTSYVKNKDSQDSIIFGDGNQGKVKGLGKIAISSEHSISNVFLVESLGYNLLSVSQLCNMGYNCLFTNVDVSVFRRSDGSLAFKGVLDDKLYLVDFAKEEAGLDACLIAKTSMGWLWHRRLAHVGMKNLHKLLKGEHVIGLTNDKSETQGTLKRFLRRAQNEFELKQNGVVERKNRTLIDMARTMLGEFKTPERFWSEAVNTACHAINRVYLHRLLKKTSYELLTGNKPNVSYFRVFGSKCYILVKKGRNSKFSPKAIEGFLLGYDSNTKAYRVFNKSSGLVEVSSDVVFDETNGSPREQVVDLDDVDEEDVPTAAIRTMAIGDVRPQEQTEQDQPSSSTMVQPPTQDDEQVHQEEACDQGGAQDDHVIEEEAPQAPPTQVRATIQRNYPVDQILGDISKGVTTRSRIVNFCEHYSFVSSIEPFRVEEALLVPDWVLAMQEELNNFKRNEVWTLVPRPKQNVVGTKWVFHNKQDKHRVVTRNKARLVAKGYAQVAGLDFEETFAPVARLESIRILLAYAAHHSFRLFQMDVKSAFLNGPIKEEVYVEQPPGFEDERYPDHVCKLSKALYGLKQAPRAWYECLRDFLIANSFKVGKADPTLFTKTCDGDLFVCQIYVDDIIFGSTNQKYCEEFSRVMTQKFEMSMMDELDYFLGFQVKQLKDDTFISQTKYTQDLLKRFGMKDAKPAKTPMGTDGHVDLNKGGKSVDQKAYRSMIGSLLYLCASRPDIMLSVCMCARFQSDPRECHLVAVNRILRYLVATPCFGIWYPKVSTFDLIGYSDSDYAGCKVDRKSTSGTCQFLGRSLVSWSSKKQTFVALSTAETEYVAAGQCCAQLLWMRQTLRDFGYNLSKVPLLCDNESAIRMADNPVEHSRTKHIDIRHHFLRDHQQKGDIEVFYVSTENQLDDIFTKPLDEKTFCRLRSELNVLDSRNLD

SEQ ID NO: 10043 - protein, 1657 aa, Zea mays
  Clone ID: TF_ZmC4916_405.pep
MDPKGKGMVINDKEKESFVNEPNDDKPTDSGSGRKRKDGRKKKARRIKEIVYYDSDESSSSQKDDDDYDRRKTVNSNFSFDYSRIPHSSNAQLLPIRLGKPPHFDGEDYGFWSHKMRTHLFSLHPSIWEIVESGMKFDSSDSPMFINEQIHKNAQATTVLLASLCRDEYHKVSGLDNAKQIWDTLKISHEGNDVTLLTKMELVEGELGRFAMIRGEEPTQTYNRLKTLINKIRSYGSTRWTDHDVVRLMLRSFTVLDPHLVNNIRENPRYTKMSPEEVLGKFVSGRMMIKEARYVDDALNGSINEPQPLALKATRSKEALPSKVAQVEAAGLNNEEMALIIKRFKTALKGRKGQPSKTKAKGKRSCFKCGKIGHFIANCPDNDSDQEHGSKREKKKHYKKAKGEAHIGKEWDSDCSSSDSDNEGLAATAFNKSSLFPNECHTCLMAREKKVSNQNNVTYDSSSDDESSDEEIDYSSLFKGMDRTKVDKINELIDALNEKDRLLEKQEDLLYEEHDKFVEAQKSYALEVKRNEVLSSELSSCHETIATLKGVNNDLNAKLEVASKSNSCVEHVMVCTRCKDFNVDACSEHLVSISKLNDEVASLNAQLKTSKSEFDKLKFARDAYTIGRHPSIKDGLGYKREAKNLTSHKAPISAKEKGKASMASSVQKNHAFMYYDRRQPRNAYRSCNAYNAFDSHAMFASSSSYVHDRNVGRRNVVHNMPRRNVVNVPRKVNEPSTIYHALNASFAICRKDRKVIARKLGAKCKGDKTCIWVPKTIVTNLVGPNKSWVYASGGSSWIIDSGCTNHMTGEKKMFTSYVKNKDSQDSIIFGDGNQGKVKGLDVSVFRRSDDSLAFKGVLDDKLYLVDFAKEEAGLDACLIAKTSMGWLWHRRLAHVGMKNLHKLLKGEHVIGLTNVQFEKIDLVQLVKQDKSETQGTLKRFLRRAQNEFELKVKKIRSDNGSEFKNLQVEEFLEEEGIKHEFSAPYTPQQNGVVERKNRTLIDMARTMLGEFKTPEVYLHRLLKKTSYELLTGNKPNVSYFRVFGSKCYILVKKGRNSKFAPKAVEGFLLGYDSNIKAYRVFNKSSGLVEVSSNVVFDETNGSPREQVVDCDDVDEEDVPTAAIRTMAIGVVRPQEQDERDQPSSSTTVHPPTQDDEQVHQKEACDQGGAQDDQVMEEEAQPAPPTQVRTEELNNFKRNEVWTLVPRPKQNVVGTKWVFRNKQDEHGVVTRNKARLVAKGYAQVAGLDFEETLYQMDVKSAFLNGPIKEEVYVEQPPGFEDERYPDHVCKLSKALYGLKQAPRAWYECLRDFLIVNAFKVGKADPTLFTKTCDGDLFVCQIYVDDIIFGSTNQKSCEEFSRVMTQKFEMSMMGELNYFLGFQVKQLKDGIFISQTKYTQDLLKRFGMKDAKPAKTPMGTDGHTDLNKGGKSVDQKVYRSMIGSLLYLCASRPDIMLSVCMCARFQSDPKECHLVAVKRILRYLVATPCFGLWYPKGSTFDLVGYSDSDYAGCKVDRKSTSGTCQFLGRSLVSWNSKKQTSVALSTAEAEYVAAGQCCAQLLWMRQTLRDFGYNLSKVPLLCDNESAIRMAENPVEHSRTKHIDIRHHFLRDHQQKGDIKVFHVSTENQLADIFTKPLDEKTFCRLRSELNILDSRNLD

SEQ ID NO: 10044 - protein, 1673 aa, Zea mays
  unsure (1)..(1673): unsure at all Xaa locations
  Clone ID: TF_ZmC4916_407.pep
MDPKEKGMVVNDNEKESIFNEPKDDKANDSGSSQKKKDGKKKRCIKKIVYYDSDESSSSQKDDEYEEKNKTVNSNFSFDYSRIPHNSNAHMLSIPLGKPPHFDGEDYGFWSHKMRSHLFSLHPSMWEIVENGMQFDSSDNSMFINEQIHKNAQATTVLLASLCREEYNKVSGLDNAKQIWDTLKISHEGNNATMLTKMELVEGELGRFAMIRGEEPTQTYNRLKTLVNKIRSYGSTRWTDHDVIRLMLRSFTVLDPHLVNSIRENPRYIKMTPEEILGKFVSGRMMIKEARYVDEALNGPMPIYEPQKVALKATSSRETLPSKVAQVEVAGLNEDEMALIIKRFKTALKGRKEHPNKSKTKGKRSCFKCGKIGHFIANCPDNDSDQEQGKNGKRENKKVYKKAKGEAHLGKEWDSPPRPSTNRLSSQTSITPASWQRRKRCKNFNVDACSEHLISISKLNDEVASLNAQLKTSKDDFDKLKFARDAYTIGRHPSIKDGLGFKREAKNLTSQGAPIFNKEKGKAPMTSNSQNNYAFIYNRKFSRNAYHNRSCNAYDSNAMIASSSSFVHGRDMPKKNVIHHMPRRNVVHVPRIASNCNTQIVRAVNNLPFEARLMRSCSNPPPRSAPMTETNQGIKTPIDPAATLEPPSSKPGRVSGCPIGISGTSREIRCMGSDQLRGKWVTRLVGKDAQPLQSVKLVYASGGSSWIIDSGCTNHMTGEKKMFTSYVKNKDSQDSIIFGDGNQGKVKGLGKIAISSEHSISNVFLVESLGYNLLSVSQLCNMGYNCLFTNVDVSVFRRSDGSLAFKGVLDNKLYLVDFAKEEAGLDACLIAKTSMGWLWHRRLAHVGMKNLHKLLKGEHVLGLTNVTFEKDRPCAACQAGKQVGSAHHNKNVMTTSRPLELLHMDLFGPVAYLSIGGSKYGLVIVDDFSRFTWVFFLQDKSEIQGTLKRFLRRAQNGFELKVKKIRSDXERKNRTLIDMARTMLGEFKTPERFWSKAVNTXCHAINRVYLHRLLKKTSYELLTGNKPNVSYFRVFGSKCYILVKKGRNSKFAPKVVEGFLLGYDSNTKAYRVFNKSSGLVEVSSDVVFDETNGSPREQVDLDDVDEEDVPTTAIRTMAIGDVRPQEQKEQDQPSSSTMVHPPTQDDEQVHQEEACDQGGAQDDHVMEEEAPQAPPTQVRATIQRNHPANQILGDISKGVTTRSRLANFCEHYSFVSSIEPFKVEEALLDPDWVLAMQEELNNFKRNEVWTLVPHPKQNVVGTKWVFRNKQDEHGVVTRNKARLVAKGYAQVAGLDFEETFAPVARLESIRILLAYAAHHSFRLFQMDVKSAFLNGPIKEEVYVEQPPGFADERYPDHVCKLSKALYGLNQAPRAWYECLRDFLIANAFKVGKADPTLFTKTCDGDLFVCQIYVDDIIFGSTNQKSCEEFSRVMTQKFEMSMMGELNYFLGFQVKQLKDGTFISQTKYTQDLIKRFGMKDAKPAKTPMGTDRHVDLNKGVATPCFGIWYPKGSTFDLIGYSDSDYAGCKVDRKSTSGTCQFLGRSLVSWSSKKQTSVALSTAEAEYVAAGQCCAQLLWMRQTLRDFGYNLSKVPLLCDNESAIRMTDNPVEHSRTKHIDIRHHFLRDHQQKGDIEVFYVSTENQLADIFTKPLDESTFCRLRSELNVLDSRNLD

SEQ ID NO: 10045 - protein, 1660 aa, Zea mays
  Clone ID: TF_ZmC4916_410.pep
MDPKGKGIVINDKEKESFVNEPRDDKSNDSGSGHRRKDGKKKKTRRIKEIVYYDSDESTSSQKDDDHNEYERKKPVNSNFSFDYSRIPQSTNAHLLSIPLGKPPHFDGEDYGFWSHKMRSHLFSLHPSIWEIVESGMHFDSTDSPMFINEQIHKNAQATTVLLASLCRDEYHKVSGLDNAKQIWDTLKISHEGNDVTLLTKMELVEGELGRFAMIRGEEPTQTYNRLKTLINKIRSYGSTRWTDHDVVRLMLRSFTVLDPHLVNNIRENPRYTKMSPEEVLGKFVSGRMMIKEARYVDDALNGPIHEPQPIALKATRSKEALPSKVAQVEAAGLNNEEMALIIKRFKTALKGRKGQPSKTKTKEKRSCFKCGKIGHFIANCPDNESDQEKGNKREKKKHYKKAKGEAHIGKEWDSDCSSSDSDNEGLAATAFNKSSLFPNERHTCLMAREKKVSTHDTSTYASSSEDESSDDDEIDYSCLFKGLDRSKINKINELIDALNDKNRLLEKQEDLLYEEHDKFVSAQNSLALEIKRNEMLSSELSTCHESISKLKSVNDDLNAKLEIASKSTSCVEIVETCNRCKDFDIDACSEHLVSISKLNDELASLNAQLKTSKSNFDKLKFARDAYTIGRHPSIKDGLGYKKEAKNLTSHKAPISAKEKGKAPMASSVQKNHAFMYHDRRQSRNAYRRCNAYDAFDSHDMFASSSSYVHDRNVERFMHPGGSSWIIDSGCTNHMTGEKKMFTSYVKNKDSQDSIIFGDGNQGKVKGLGKIAISNEHSISNVFLVESLGYNLLSVSQLCNMGYNCLFTNVDVSVFRRSDGSLAFKGVLDDKLYLVDFAKEEAGLDACLIAKTSMGWLWHRCLAHVGMKNLHKLLKGEHVIGLTNVQFEKDRPCAACQAGKQVGGAHHSKNVMTTSRPLELLHMDLFGPVAYLSIGGSKYGLVIVDDFSRFTWVFFLQDKSETQGTLKRFLRRAQNEFELKVKKIRSDNGSEFKNLQVEEFLEEEGIKHEFSAPYTPQQNGVVERKNRTLIDMARTMLGEFKTPVRFWSEAVNTACHAVNRVYLHRLLKKTSYELLTGNKPNVSYFRVFGSRCYILVKKGRTSKFAPKAVEGFLLGYDSNTKAYRVFNKSSGLVEVSSDVVFDETNGSPREQVVDCDDVDEEDVPTTAIRTMVIGEVRPQEQDERDQPSSSTTVHPPTQDDEQDEHGVVTGNKARLVAKGYAQVTGLDFEETFAPVARLESIRILLAYAAHHSFRLFQMDVKSAFLNGPIKEEVYVEQPPGFEDERYPDHVCKLSKALYGLKQAPRAWYECLRDFLIANDFKVGKVDPTLFTKTCDGDLFVCQIYVDDIIFGSTNQKSCEEFSRVMTQKFEMSMMGELNYFLGFQVKQLKDGTFISQTKYTQDLLKRFGMKDAKPAKTPMGTDGHTDLNKGGKSVDQKAYRSMIGSLLYLCASRPDIMLSVCMCARFQSDPKECHLVAVKRILRYLVATPCFELWYPKGSTFDLVGYSDSDYAGCKVDRKSTSGTCQFLGRSLVSWNSKKQTSVALSTAEAEYVAAGQCCAQLLWMRQTLRDFGYNLSKVPLLCDNESAIRMAENPVEHSRTKHIDIRHHFLRDHQQKGDIKVFHVSTENQLADIFTKPLDEKTFCRLRSELNVLDSRNLD

SEQ ID NO: 10046 - protein, 1515 aa, Zea mays
  Clone ID: TF_ZmC4916_413.pep
MDPKGKGMVINDKEKESFVNEPKDNKPTDSGSSHKKKDGKKKRHIKKIVYYDDSDESSSSQKDDYEKKKTVNSNFSFDYSRIPQSSNAHFLSIPLGKPPHFDGEDYGFWSHKMRSHLFSLHPSIWEIVENGMQFDTSLCRDEYHKVSGLDNAKQIWDTLKISHEGNDVTMLTKMELVEGELGRFAMIRGEEPTQTYNRLKTLINKIRSYGSTRWTDHDVVRLMLRSFTILDPHLVNNIRENPRYTKMSPEEILGKFVSGRMMIKEARYVDDALNDPIHEPQTVALKATRSKEALPSKVAQVEAAGLNEEEMALIIKRFKTTLKGRKEHPNKNKTKGKRSCFKCGKIGHFIANCPDNDSDQEQEKKREKKKSYKKAKGEAHLGKEWDSDCSSSDSDNEGLAASAFNKTSLFPNEHHTCLMAKEKKGCLHGWYPSIKDGLGFKREAKNLTSHKAPIPAKEKGKAPMTNSVQKNHAFMYHDRRHSRDVHYNRSYNSLASHAMIASSSSNVYGRNMPRKNVAHAPRKVIAKKVGAKCKGDKTCIWVPKAIVTNLVGPNKSWVYASGGSSWIIDSGCTNHMTGEKKMFSSYVKNKDSQDSIIFGDGNQGKVKGLGKIAISSEHSISNVFLVESLGYNLLSVSQLCNMGYNRLFTNVDVSVFRRSDGSLAFKGVLDDKLYLVDFAKEEAGLDACLIAKTSMGWLWHRRLAHVGMKNLHKLLKGEHVIGLTNVTFEKDRPCAACQAGKQVGSSHHTKNVMTTSRPLELLHMDLFGPVAYLSIGGSKYGLVIVDDFSRFTWVFFLQDKSETQGTLKRFLRRAQNEFELKKNGVVERKNRTLIDMARTMLGEFKTPERFWSEAVNTACHAINRVYLHRLLKKTSYELLTGNKPNVSYFRVFGSKCYILVKKGRNSKFAPKAVEGFLLGYDSNIKAYRVFNKSSGLVEVSSDVVFDETNGSPREQVVDLDDVDEEDVPTAAIRTMAIGDVRPQEQKEQDQPSSSTMVHPPTQDDEQPFRVEEALLDPDWVLAMQEELNNFKRNEVWTLVPRPKQNVVGTKWVFRNKQDEHGVVTRNKARLVAKGYAQVAGLDFEETFAPMARLESIRILLAYAAHHSFRLFQMDVKSAFLNGPIKEEVYVEQPPGFEDEWYPDHVCKLSKALYGLKQAPRAWYECLRDFLIANAFKVGKADPTLFTKTCEGDLFVCQIYVDDIIFGSTNQKSCEEFSKVMAQKFEMSMMGELNYFLGFQVKQLKDGTFISQMKYMQDLLKRFGMKDAKPAKTPMGTDGHVDLNKGGKSVDQKAYRSMIGSLLYLCASRPDIMLSVCMCARFQSDPRECHLVAVKRILRYLVATLCLGIWYPKGSTFDLIGYSDSNYAGCKVNRKSTSGTCQFLGRSLVSWSSKKQTSVALSTAEAEYVAAGQCCAQLLWMRQTLRDFGYNLSKVPLLCDNESAIRMADNLVEHNRTKHIDIRHHFLRDHQQKGDIEVFYVSTENQLADIFTKPLDESTFCRLRSELNVLDSRNLD

SEQ ID NO: 10047 - protein, 1750 aa, Zea mays
  Clone ID: TF_ZmC4916_416.pep
MDPKGKGIVINDKEKESFVNEPKDDKSNDSGSGHRRKDGKKKTRRIKEIVYYDSDESSSSQKDDDNDYRKTIVENGMKFDSSDSPMLINEQIHRNAQATTVLLASLCREEYNKESGLDNAKQIWDTLKISHEGNDVTMLTKMELVEGELGRFAMIRGEEPTQTYNRLKTLVNKIRSYGSTRWMDHDIVRLMLRSFTVLDPHLVNNIRENPRYTKMSPEEILGKFVSGRMMIKEARYVDDALNGPIHEPQPIALKASRSKEALPSKVAQIEAAGLNDEEMALIIKRFKTALRGRKEHPNKTKTKGKRSCFKCGKIGHFIANCPDNDSDQEKKSGKWEKKKNYKKAKGEAHIGKEWDSDCSSSDSDNEGLAATAFNKSSLFPNEHHTCLMAKEKKVSTRNSTYASSSEDESSDDEIDYSCLFKGLDRSKIDKINELIDALNDKNRLLEKQEDLLYEEHDKFVEAQKTLALEIKRNEMLACELSTCHDSISKLKSINDDLNAKLVEAQKSNSCVEHVEICTRCKDVDINACSEHLVSISKLNDELASLNAQLKTSKSEFEKLKFTRDAYTIGRHPSIKDGLGFKREAKNLTSHKTPISTKEKGKAPMANSVKKNHAFMYYDRRYSRNAFRSNDVFDSHAYDSYAMTASSSSYMHGRSMTRRNAIHHVPRKNTIHAPRKVVNEPSTIYCALNASFAICRKDRKIVARKLGAKCKGDKTCIWVPKDICTNLVYASGGSSWIIDSGCTNHMTGEKKMFTSYVKNKDSQDSIIFGDGNQGKVKGLDVFVFRRSDGSLAFKGVLDGKLYLVDFAREEAGLDACLIAKTSMGWLWHRRLAHVGMKNLHKLLKGEHVIGLTNVQFEKDRPCAACQAGKQVGGAHHSKNVMTTSRPLELLHMDLFGPVAYLSIGGSKYGLVIVDDFSRFTWVFFLQDKSETQGTLKRFLRRAQNEFELKVKKIRSDNGSEFKNLQVEEFLEEEGIKHEFSAPYTPQQNGVVERKNRTLIDMARTMLGEFKTPEHFWSEAVNTACHTINRVYLHRLLKKTSYELLTGNKPNVSYFRVFGSKCYILVKKGRNSKFAPKAVEGFLLGYDSNTKAYRVFNKSSGLVEVSSDVVFDETNGSPREQVVDLDDVDEEDVPTATIRTMTIGDVRPREQLEQDQPSSSTMVNPPTQDDEQVPQVEAHDQGGAQDVQVEEEEAPQAPPTQVRAVIQRDHPVDQILGDISKGVTTRSRLVNFCEHYSFVSSIEPFRVEEALLDPDWVLAMQEELNNFKRNEVWTLVPRPKQNVVGTKWVFRNKQDEHGVVTRNKARLVAKGYAQVAGLDFEETFAPVARLESIRILLAYAAHHSFRLFQMDVKSAFLNGPIKEEVYVEQPPGFEDERYPDHVCKLSKALYGLKQAPRAWYECLRDFLIANAFKVGKADPTLFTKTCDGDLFVCQIYVDDIIFGSTNKKSCEEFSRVMTQKFEMSMMGELNYFLGFQVKQLKDGTFISQTKYTQDLLKRFGMKDAKPAKTPMGTDGHTDLNKGGKSVDQKAYRSMIGSLLYLCASRPDIMLSVCMCARFQSDPKECHLVAVKRILRYLVATPCFGIWYPKGSTFDLIGYSDSDYAGCKVDRKSTSGTCQFLGRSLVSWNSKKQTSVALSTAEAEYVAAGQCCAQLLWMRQTLRDFGYNLSKVPLLCDNESAIRMAENPVEHSRTKHIDIRHHFLRDHQQKGDIEVFHVSTENQLADILTKPLDEKTFCRLRSELNVLDSRNLD

SEQ ID NO: 10048 - protein, 1808 aa, Zea mays
  Clone ID: TF_ZmC4916_417.pep
MDPKGKGIVINDKEKESFVNEPKDDKSNDSGSGHRRKDGKKKKTRRIKEIVYYDSDESSSSQKDDDNDYRKTINSNFSFDYSRIPHSSNSHLLSIPLGKPPHFDGEDYGFWSHKMRSHLFSLHPSIWEIVENGMKFDSSDSPMLINEQIHRNAQATTVLLASLCREEYNKVSGLDNAKQIWDTLKISHEGNDVTMLTKMELVEGELGRFAMIRGEEPTQTYNRLKTLVNKIRSYGSTRWTDHDVVRLMLRSFTVLDPHLVNNIRENPRYTKMSPEEILGKFVSGRMMIKEARYVDDALNGPIHEPQPIALKASRSKEALPSKVAQIEAAGLNDEEMALIIKRFKTALRGRKEHPNKTKTKGKRSCFKCGKIGHFIANCPDNDSDQEKKSGKWEKKKNYKKAKGEAHIGKEWDSDCSSSDSDNEGLAATAFNKSTLFPNERHTCLMAKEKKVCTRNSTYASSSEDESSDEDEVDYSCLFKGLDRSKIDKINELIDALNEKNILLEKQEDSLYEEHDKFVEAQKSLALEIKRNEMLACEVSTCHDSISNLKSINDDLNAKLVEANKSNSCVKHVEICTRCKDVDINACSEHLVYISKLSDEVASLNAQLKTSKSDFEKLKFARDAYTVGRHPSIKDGLGFKREAKNLTSHKAPIPAKEKGKAPMATSAKRNHAFLYHDKRQTRSYDAFDSYVCDSHAMFAPSSSYVYDRNVTRRNVVPKRNVANVHRKVVNEPSTIYCALNASFAICRKDRKVIARKLGAKCKGDKTCIWVPKEIVTNLVGPNKSWVYASGGSSWIIDSGCTNHMTGEKKMFTSYVKNKDSQDSIIFGDGNQGKVKGLDVFVFRRSDGSLAFKGVLDGKLYLVDFAKEEAGLDACLIAKTSMGWLWHRRLAHVGMKNLHKLLKGEHVIGLTNVQFEKDRPCAACQAGKQVGGAHHSKNVMTTSRPLELLHMDLFGPIAYLSIGGSKYGLVIVDDFSRFTWVFFLQDKSETQGTLKRFLRRAQNEFELKVKKIRSDNGSEFKNLQVEEFLEEEGIKHEFSAPYTPQQNGVVERKNRTLIDMARTMLGEFKTSECFWSEAVNTACHAINRVYLHRLLKKTSYELLTGNKPNVSYFRVFGSKCYILVKKGRTSKFAPKAVEGFLLGYDSNTKAYRVFNKSSGLVEVSSDVVFDETNGSPREQVVDLDDVDEEDVPTAAIRTMAIGEVWPQEQNERDQPSSSTMVHPPTQDDEQVHQQEACDQGGAQDDHVMEEEAQPAPPTQVRAVIQRDHPVDQILGDISKGVTTRSRLVNFCEHYSFVSSIEPFRVEEALLDPDWVLAMQEELNNFKRNEVWTLVPRPKQNVVGTKWVFRNKQDEHGVVTRNKARLVAKGYAQVAGLDFEETFAPVARLESIRILLAYVAHHSFRLFQMDVKSAFLNGPIKEEVYVEQPPGFEDERYPDHVCKLSKALYGLKQAPRAWYECLRDFLITNAFKVGKADPTLFTKTCDGDLFVCQIYVDDIIFGSTNKKSCEEFSRVMTQKFEMSMMGELNYFLGFQVKQLKEGTFISQTKYTQDLLKRFGMKDAKPAKTPMGTDGHTDLNKGGKSVDQKAYRSMIGSLLYLCASRPDIMLSVCMCARFQSDPKECHLVAVKRILRYLVATPCFGLWYPKGSTFDLIGYSDSDYAGCKVDRKSTSGTCQFLGRSLVSWNSKKQTSVALSTAEAEYVAAGQCCAQLLWMRQTLRDFGYNLSKVPLLCDNESAIRMAENPVEHSRTKHIDIRHHFLRDHQQKGDIEVFHVSTENQLADIFTKPLDEKTFCRLRSELNVLDSQNLD

SEQ ID NO: 10049 - protein, 1656 aa, Zea mays
  Clone ID: TF_ZmC4916_438.pep
MDPKGKGIVINDKDKESFVNEPKDDKPTDSGSGHKRRDGKKKKTRRIKEIVYYDDSDESSSSQKDNDDNDYDKRKTVNSNFSFDYSCIPHSSNAHLLSIPIGKPPHFDGEDYGFWSQKMRSHLFSLHPSIWEIVESGMKFDSSDSPMFINEQIHKNAQTTTVLLASLCREEYNKVSGLDNAKQIWDTLGISHEGNDVTMLTKMELVEGELGRFAMIRGEDPTQTYNRLKTLINKIRSYGSTRWTDHDIVRLMLRSFTVLDPHLVNNIRENPRYTKMSPEEVLGKFVSGRMMIKEARYMDDAMNGPIHEPQPIALKASRSKEALPSKVAQVEAAGLNDEEMALIIKRFKTVLKGRKEHPKKTKTKGKRSCFKCGKIGHFIANCPDNDSDQEQGNKREKKNYKKAKGEAHLGKEWDSDCSSSDSDNEGLAATAFNKSSLFPNKHHTCLMAKEKKGLDRTKVDKINELIDALNDKNRCKDFDVDACSKHLASISKLNDEVASLNAQLKTSKSDFDKLKFARDAYTIGRHPSIKDGLGFKREAKNLTSHKAPISAKEKGKAPMASSTKKNHAFMYHDRRYSRNAYRSYDTYDSYAMTASSSHVVHDRDMPRRNVVPRKINEPSTIYHACNASFAICRKDKKVYASGGSSWIIDSGCTNHMTGEKKMFTSYVKNKDPQDSIIFGDGNQGKVKGFGKIAISNEHSISNVFLVESLGYNLLSVSQLCNMGYNCLFTNIDVSVFRRCDGSLAFKGVLDDKLYLVDFAKEEAGLDACLIAKTCMGWLWHRRLAHVGMKNLHKLLKGEHVIGLTNVHFEKDRPYAACQAGKQVGGAHHSKNVMTTSRPLELLHMDLFGTVAYLSIGGSKYGLVIVDDFSRFTWVFFLQDKSKTQGTLKRFLRRAQNEFELKRKNRMLIDMARTMLGEFKTPEHFWSEAGNTACHAINRVYLHRLLKKTSYELLTGNKPNVSYFRVFGSKCYILVKKGRNSKFAPKAVEGFLLGYDSNTKAYRVFNKSSGLVEVSSDVVFDETNGSPTEQVVDFDDVDEEEVPTAAIRTMAIGDVRPQEQDERDQPSSSTMVHPPTQDDEQEACDQGGAQDDHVMEEEAQLAPPTQVRAMIQRDHLVDQILGDISKGVTTRSRLVNFCEHYSFVSFIEPFRVEEALLDPDWVLAMQEELNNFKRNEVWTLVPRPKQNVVGTKWVFRNKQDEHGVVTRNKARLVAKGYAQVAGLDFEETFAPVARLESIRILLAYAAHHSFRLFQMDVKSAFLNEPIKEEVYVEQPPGFEDERYPDHVCKLSKALYGLKQAPRAWYECLRDFLIANAFKVGKADPTLFTKTCDGDLFVCQIYVDDIIFGSTNQKSCEEFSRVMTQKFEMSMMGELNYFLGFQVKQLKDGTFISQTKYMQDLLKRFEMKDAKPAKTLMRTDRHTDLNKGGKSVDQKAYRSMIGSLLYLCASRPDIMLSVCMCARFQSDPKECHLVAVKRIFRYLVATPCFGIRYPKGSTFDLIGYSDSDYVGCKVDRKSTLGTCQFLGRSLVSWNSKKQTFVALSTAEAEYVAAGQCCAQLLWMRQTLRDFRYNLSKVPLLCDNESAIRMAENPVEHSRTKHIDIRHHFLRDHQQKGDIEVFHVSTENQLADIFTKPLDEKTFCRLRSELNVLDSRNLD

SEQ ID NO: 10050 - protein, 1838 aa, Zea mays
  Clone ID: TF_ZmC4916_444.pep
MDPKGKGIVINDKEKESFVNEPKDDKSNDSGSGHRRKDGKKKKTRRIKEIVYYDSDESSSSQKDDDNDYRKTVNSNFSFDYSCIPHSSNSHLLSIPLGKPPHFDGEDYGFWSHKMRSHLFSLHPSIWEIVENGMKFDSSDSPMFINEQIHKNAQATTVLLASLCRDEYNKVSGLDNAKQIWDTLKISHEGNDITMLTKMELVEGELGRFAMIRGEEPTQTYNRLKTLINKIRSYGSTRWTDHDVGRLMLRSFTVLDPHLVNNIRENPRYTKMTPEEVLGKFVSGRMMIKEARYVDDALNGPINEPQPIALKATRSKEALPSKVAQVEAAGLNNEEMALIIKRFKTALKGRKGQPNKTKTKEKRSCFKCGKIGHFIANCPDNESDQEKEDKREKKKHYKKAKGEAHIGKEWDSDCSSSDSDNEGLAATAFNKSTLFPNERHTCLMAREKKVCTQNPTYASFSEDESSDDDEIDYSCLFKGLDRSKIDKINELIDALNDKNRLLEKQEDLLYEEHDKFVEAQKSHALEVKRNEMLSCELSSCHETISSLKSINDDLNAKLEKSSKLTSCVEHVVICTRCKDFNVDACSEHLECISKLNDEVASLNAQLKTSKSDLDKLKFARDAYTIGRHPSIKDGLGFKREVKNLTSHKAPISAKEKGKAPMASSVQKNHAFMYHDRRQTRNAYRSFNAYDDFDSHVMFASSSSYVHDRNVDRRNVVHNMPRRNVVNVPRKVMNGPSTIYHALNASFAICRKDRKIVARKLGAKCKGDKTCIWVPKEICANLVGPNMSWVYASGGSSWIIDSGCTNHMTGEKKMFTSYVRNKDSQDSIIFGDGNQGKVKGLVESLGYNLLSVSQLCNMGYNCLFTNVDVSVFRRSDGSLAFKGVLDGKLYLVDFAKEEAGLDACLIAKTSMGWLWHRRLAHVGMKNLHKLLKGEHVIGLTNVHFEKDRPCAACQAGKQVGGAHHSKNVMTTSRPLELLHMDLFGPVAYLSIGGSKYGLVIVDDFSRFTWVFFLQDKSETQGTLKRFLRRAQNEFELKVKKIRSDNGSEFKNLQVEEFLEEEGIKHEFSAPYTPQQNGVVERKNRTLIDMARTMLGEFKTPERFWSEAVNTACHAINRVYLHRLLKKTSYELLTGNKPNVSYFRVFGSKCYILVKKGRNSKFAPKAVEGFLLGYDSNTKAYRVFNKSSGLVEVSSDVVFDETNGSPREQVVDCDDVDEEDVPTAAIRTMAIGEVRPQEQDERDQPSSSTMVHPPTQDDEQVHHQEACDQGGAQDDHVMEEEAELAPPTQVRAMIQRDHPVDQILGDISKGVTTRSRLVNFCEHYSFVSSIEPFRVEEALLDPDWVLAMQEELNNFKRNEVWTLVPRPKQNVVGTKWVFRNKQDEHGVVTRNKARLVAKGYAQVAGLDFEETFAPVARLESIRILLAYAAHHSFRLYQMDVKSAFLNGPIKEEVYVEQPPGFEDERYPDHVCKLSKALYGLKQAPRAWYECLRDFLIVNAFKVGKADPTLFTKTCDGDLFVCQIYVDDIIFGSTNQKSCEEFSRVMTQKFEMSMMGELNYFLGFQVKQLKDGTFISQTKYTQDLLKRFGMKDAKPAKTPMGTDGHTDLNKGGKSVDQKAYRSMIGSLLYLCASRPDIMLSVCMCARLQSDPKECHLVAVKRILRYLVATPCLGLWYPKGSTFDLVGYSDSDYAGCKVDRKSTSGMCQFLGRSLVSWNSKKQTSVALSTAEAEYVAAGQCCTQLLWMRQTLRDFGYNLSKVPLLCDNESAIRMAENPVEHSRTKHIDIRHHFLRDHQQKGDIEVFHVSTENQLADIFTKPLDEKTFCRLRSELNVLDSRNLD

SEQ ID NO: 10051 - protein, 1616 aa, Zea mays
  Clone ID: TF_ZmC4916_448.pep
MSPEEVLGKFVSGRMMIKEARYVDDALNGPIHEPQPIALKATRSKEALPSKVAQIEAVGLNDEEMALIIKRFKTVLKGHKGQPSKTKAKGKRSCFKCGKIGHFIANCPDNDSDQEQGNKREKKKNYKKAKGEAHLGKEWDSDCSSSDSDNEGLAATAFNKSTLFPNECHTCLMAREKKVCTRNSTYASSSEDESSDEDEVDYSCLFKGLDRTKVDKINELIDALNDKNILLEKQEDLLYEEHDKFVEAQRSHALEVKRNEILSCELSSCHDTISKLRSINDDLNAKLEIASKSTSCVENVVACSRCKDINIDVYSEHLACISKLNEEVASLNAQLKTSKSDFEKLKFARDAYTVGRHPSIKDGLGFKKEAKNLTSHKAPISAKEKGKAPMASSTKRNHAFIYNDRRQTRNACRSYNAYDDFNSHAMFASSSSFMHGRNMPRKNIIHAPKKVVNEPSTIYCALNASFAICRKDKKIVARKLGAKCKGDKTCIWVPKDICTNLVGPNMSWVYASRGSSWIIDSGCTNHMTGEKKMFTSYVKNKDSQDSIIFGDGNQGKGDVGVPPKPRLSLPSVAVAEPEPRGRARRKSFGRGQGGVRALGSGEAEFRRLPGVSPSPSPGVGRSGVRRLPGLSPSPSPGVGRSGVRRLPGLSPSPSPGVGRSGVRRLPGLSPSPSPGVGRSGVRRLPGLSPSLSPGVGRSGVRRLPVGVAQAALSFCQTGQWSGGVTAVTSALPRARVRIEVSGHLCVKCPCNLVSRCGDLVKVASERSQGLGRAGDVSAIKRGPRARRKSLEDKSETQGTLKRFLRRAQNEFELKVKKIRSDNGSEFKNLQVEEFLEEEGIKHEFSAPYTPQQNGVVERKNRTLIDMARTMLGEFKTPECFWTEAVNTACHAINRVYLHRLLKKTSYELLTGNKPNVSYFRVFGSKCYILVKKGRNSKFAPKAVEGFLLGYDSNTKAYRVFNKSSGLVEVSSDVVFDETNGSPREQVVDLDDVDEEDVPTAAMRTMAIGDVRPQEHLERDQPSSSTMVHPPTQDDEQVHQQEACDQGGAQVDHVMEEEAQPAPPTQVRAMIQRDHPVDQILGDISKGVTTRSRLVNFCEHYSFVSSIEPFRVEEALLDPDWVLAMHEELNNFKRNEVWTLVPRPKQNVVGTKWVFRNKQDEHGVVTRNKARLVAKGYAQVAGLDFEETFAPVARLESIRILLAYAAHHSFRLYQMDVKSAFLNGPIKEEVYVEQPPGFEDERYPDHVCKLSKALYGLKQAPRAWYECLRDFLIVNAFKVGKADPTLFTKTCDGDLFVCQIYVDDIIFGSTNQKSCEEFSRVMTQKFEMSMMGELNYFLGFQVKQLKDDTFISQTKYTQDLLKRFGMKDAKPAKTPMGTDGHTDLNKGGKSVDQKAYRSMIGSLLYLCASRPDIMLSVCMCARFQSDPKECHLVAVKRILRYLVATPCFGLWYPKGSTFDLVGYSDSDYAGCKVDRKSTSGTCQFLGRSLVSWNSKKQTSVALSTAEAEYVAAGQCCAQLLWMRQTLRDFGYNLSKVPLLCDNESAIRMAENPVEHSRTKHIDIRHHFLRDHQQKGDIEVFHVSTENQLADIFTKPLDEKTFCRLRSELNVLDSRNLD

SEQ ID NO: 10052 - protein, 693 aa, Zea mays
  Clone ID: TF_ZmC4916_451.pep
MDPKGKGIVINDKEKESFVNEPRDDKSNNSGSGHKRKDGKKKKTRRIKEIVYYDSDESSSSQKDDDNDYRKTVNSNFSFDYSRIPHSSNSHLLSIPLGKPPHFDGEDYGFWSHKMRSHLFSLHPSIWEIVENGMKFDSSDSPMFINEQIHKNAQATTVLLASLCREEYNKVSGLDNAKQIWDTLKISHEGNDITMLTKMELVEGELGRFAMIRGEEPTQTYNRLKTLINKIRSYGSTRWTDHDVVRLMLRSFTVLDPHLVNNIRENPRYTMMTPEEVLGKFVSGRMMIKEARYVDDALNGPLHESQPIALKATRSKEALPSKVAQIEAAGLNDEEMALIIKRFKTVLKGHKGQPSKTKTKGKRSCFKCGKIGHFIANCPDNDSDQEQGNKREKKKNYKKAKGEAHLGKEWDSDCSSSDSDNEGLAATAFNKSALFPNEHHTCLMAREKKVITHNANTYDSSSDDESSEDEIDYSSLFKGLDRTKIAKINELIDALNEKDRILEKQEDLLYEEHDKFVSAQNSLALEVKRNGILSGELSTCNETISSLKGEIDVLTAKLEVASNSCVENITICTRCKDFDVNACSEHLVSISKLNDEVASLNAQLKTSKSEVDKIKFARDAYTVGRHPSIKDGLGFKREAKNLTSHKAPILVKEKGKAPMASSAKRNHAFLYHDKRHARNAYNNFDSHAYDSHA

SEQ ID NO: 10053 - protein, 1360 aa, Zea mays
  unsure (1)..(1360): unsure at all Xaa locations
  Clone ID: TF_ZmC4916_456.pep
MDPKGKGIVINDKEESFVNEPREDMSNDSGSGHIRKDGKKKKTRRIKEIVYYDSDESTSSQKDDDHNEYERKKPVNSNFSFDYSRIPQSTNAHLLSIPLGKPPHFDGEDYGFWSHKMRSHLFSLHPSIWEIVESGMHFDSTDSPMFINEQIHKNAQATTVLLASLCRDEYHKVSGLDNAKQIWDTLKISHEGNDVTLLTKMELVEGELGRFAMIRGEEPTQTYNWLKTLINKIRSYGSTRWTDHDVVRLMLRSFTVLDPHLVNNIRENPRYTKMSPEEVLGKFVSGRMMIKEARYVDDALNGPIHEPQPTALKATRSKEALPSKVAQVEAAGLNNEEMALIIKRFKTALKGRKGQPSKTKTKEKRSCFKCGKIGHFIANCPDNESDQEKGNKREKKKHYKKAKGEAHIGKEWDSDCSSSDSDNEGLATTAFNKSSLFPNERHTCLMAREKKVSTHDTSTYASSSEDESSDDDEIDYSCLFKGLDRSKINKINELIDALNDKNRLLEKQEDLLYEEHDKFVSAQNSLALEIKRNEILSSELSTCHESISKLKSVNDDLNAKLEIASKSTSCVEIVETCNRCKDFDIDACSEHLVLISKLNDELSSLNAQLKTSKSNFDKLKFARDAYTIGRHPSIKDGLGYKKEAKNLTSHKAPISAKEKGKAPYGYSSYVHDRNVGRRNVVHNMPRRNVVNRKVYASGGSSWIIDSGCTNHMTGEKKMFTSYVKNKDSQDSIIFGDGNQGKDKSENQGTLKRFLRRAQDEFELKVKKIRSDNGSEFKNLQVEEFLEEEGIKHEFSAPYTPQQNGVVERKNRTLIDMARTMLGEFKTPERFWSEAVNTACHAINRVYLHRILKKTSYELLTGNKPNVSYFRIFGSKCYILVKKGRNSKFAPKAVEGFLLGYDSNTKAYRVFNKSSGLVEVSSDVVFDETNGSPREQVVDLDDVDEEDVPTAAIHTMAIGDVRPQEHLEQDQPSSSTMVHPPTQGDEQVPQVEAHDPGGAQDVQVEEEEAPQAPLTQVRATIQRDHPVDQILGDISKGVTTRSRLVNFCEHYSFVSSIEPFRVEEALLDPDWVLAMQEELNNFKRNEVWTLVPRPKXNVVGTKWVFRNKQDDHGVVTRNKARLVAKGYAQVAGLDFEETFAPVARLESICILLAYAAHHSFRLYQMDVKSAFLNGPIKEEVYVEQPPGFEDERYPDHVCKLSKALYGLKQAPRAWYECLRDFLIANAFKVGKADPTLFTKTCDGDLFVCQIYVDDIIFGSTNQKSCEEFSRVMTQKFEMSMMGELNYFLGFQVKQLKDGTFISQTKYTQDLLKRFGMKDAKPAKTPMGTDGHTDLNKGXRPDIMLSVCMCARFQSDPKECHL

SEQ ID NO: 10054 - protein, 1843 aa, Zea mays
  Clone ID: TF_ZmC4916_458.pep
MDPKGKGMVVDNNEKESIFNEPKNDKSTDLGSSHKRKDGKKKKTRRIKEIVYYDSDESSSSQKDDDHNDYEQRKPVNSNFSFDYSRIPQSSNSHLLSIPLGKPPHFDGEDYGFWSHKMRSHLFSLHPSIWEIVDSGMHFNSSDSPIFINEQIHKNAQATTVLLASLCRDEYNKVSGLDNAKQIWDTLKISHEGNDATLLTKMELVEGELGRFAMIRGEEPTQTYNRLKTLINKIRSYGSTRWTDHDVVRLMLRSFTVLDPHLVNNIRENPRYTKMSPEEVLGKFVSGRMMIKEARYVDDALNGPINEPQPFALKATRSKEVLPSKVAQIEAAGLNDEEMALIIKRFKTVLKGHKGQPSKTKTKGKRSCFKCGKIGHFIANCPDNDSDQEQGNKREKKKNYKKAKGEAHLGKEWDSDCSSSDSDNEGLAATAFNKSTLFPNERHTCLMAREKKVCTRNSTYASSSEDESSDEDEVDYSCLFKGLDRSKIDKINELIDALNEKNILLEKQEDLLYEEHDKFVEAQKSLALEIKRNEMLACELSTCHDSISKLKSINDDLNAKLVEAHKSNSCVEHVEICTRCKDVDINACSEHLVSISKLNDELASLNAQLKTSKSDFDKLKFARDAYMVGRHPSIKDGLGFKREAKNLTSHKTPISTKEKGKAPMANSVKKNHAFMYYDRRYSRNAFRGHDVFDSHAYDSYAMTASSSHVMHGRNMLRRNVVHQMPIKNITHAPRKVVNELSTIYCALNASFAICRKDKKIVARKLGARCKGDKTCIWVPKDICANLVGPNMSWVYASGGSSWIIDSGCTNHMTGEKKMFTSYVKSKDSQDSIVFGDGNQGKVKGLVESLGYNLLSVSQLCNMGYNCLFTNVDVSVFRRSDDSLAFKGVLDGKLYLVDFAKEEAGLDACLIAKTCMGWLWHRRLAHVGMKNLHKLLKGEHVIGLTNVKFEKDRPCAACQAGKQVGGAHHSKNVMTTSRPLELLHMDLFGPVAYLSIGGSKYGLVIVDDFSRFTWVFFLQDKSETQGTLKRFLRRAQNEFELKVKKIRSDNGSEFKNLQVEEFLEEEGIKHEFSAPYTPQQNGVVERKNRTLIDMARTMLGEFKTPERFWSEAVNTACHAINRVYLHRLLKKTSYELLTGNKPNVSYFRVFGSKCYILVKKVRNSKFAPKAVEGFLLGYDSNTKAYRVFNKSSGLVEVSSDVVFDETNGSPREQVVDLDDVDEEDVPTAAIRTMAIGDVRPQEQEEQDQPSSSTMVNPPTQDDEQVHQQEACDQGGAQDDHVMEEEAQLAPPTQVRTMIQRDHPVDQILGDISKGVTTRSRLVNFCEHYSFVSSIEPFRVEEALLDPDWVLAMQEELNNFKRNEVWTLVPRPKQNVVGTKWVFRNKQDEHGVVTRNKARLVAKGYAQVAGLDFEETFAPVARLESIRILLAYAAHHSFRLYQMDVKSAFLNGPIKEEVYVEQPPGFEDERYPDHVCKLSKALYGLKQAPRAWYECLRDFLIVNAFKVGKADPTLFTKTCDGDLFVCQIYVDDIIFGSTNQKSCEEFSRVMTQKFEMSMMGELNYFLGFQVKQLKDGTFISQTKYTQDLLKRFGMKDAKPAKTPMGTDGHTDLNKGGKSVDQKAYRSMIGSLLYLCASRPDIMLSVCMCARFQSDPKECHLVAVKRILRYLVATPCLGLWYPKGSTFDLVGYSDSDYAGCKVDRKSTSGTCQFLGRSLVSWNSKKQTSVALSTAEAEYVAAGQCCAQLLWMRQTLRDFGYNLSKVPLLCDNESAIRMAENPVEHSRTKHIDIRHHFLRDHQQKGDIEVFHVSTENQLADIFTKPLDEKTFCRLRSELNVLDSRNLD

SEQ ID NO: 10055 - protein, 1696 aa, Zea mays
  Clone ID: TF_ZmC4916_459.pep
MDPKGKGIVINDKEKESFVNELKDDKPTDSGSGHRRKEGKKKKTRRIKEIVYYDDSDESTSSQKDDDHNDYEQRKPVNSNFSFDYSRIPQSSNSHLLSIPLGKPPHFDGEDYGFWSHKMRSHLFSLHPSIWEIVDSGMHFNSSDSPIFINEQIHKNAQATTVLLASLCRDEYNKVSGLDNAKQIWDTLKISHEGNDATLLTKMELVEGELGRFAMIRGEEPTQTYNRLKTLINKIRSYGSTRWTDHDVVRLMLRSFTVLDPHLVNNIRENPRYTKMSPEEILGKFVSGRMMIKEARYVDDALNGPIHEPQPIALKASRSKEALPSKVAQIEAAGLNDEEMALIIKRFKTALRGRKEHPNKTKTKGKRSCFKCGKIGHFIANCPDNDSDQEKKSGKWEKKKNYKKTKGEAHIGKEWDSDCSSSDSDNEGLAATAFNKSTLFPNERHTCLMAKEKKVCTRNSTYASSSEDESSDEDEVDYSCLFKGLDRSKIDKINELIDALNEKNILLEKQEDLLYEEHDKFVEAQKSLALEIKRNEMLACEVSTCHDSISNLKSINDDLNAKLVEANKSNSCVKHVEICTRCKDVDINACSEHLVYISKLSDEVASLNAQLKTSKSDFEKLKFARDAYTVGRHPSIKDGLGFKREAKNLTSHKAPIPAKEKGKAPMATSAKRNHAFLYHDKRQTRSYDAFDSYVYDSHAMFAPSSSYVYDRNVTRRNVVPKRNVANVHRKVVNEPSTIYCALNASFAICRKDRKVIARKLGAKCKGDKTCIWVPKEIVTNLVGPNKSWVYASGGSSWIIDSGCTNHMTGEKKMFTSYVKNKDSQDSIIFGDGNQGKVKGLDVSVFRRSDGSLAFKGVLDGKLYLVDFAKEEEKSETQGTLKRFLRRAQNEFELKVKKIRSDNGSEFKNLQVEEFLEEEGIKHEFSAPYTPQQNGVVERKNRTLIDMARTMLGEFKTPECFWTEAVNTACHAINRVYLHRLLKKTSYELLTGNKPNVSYFRVFGSKCYILVKKGRNSKFAPKAVEGFLLGYDSNTKAYRVFNKSSGLVEVSSDVVFDETNGSPREQVVDCDDVDEEDVPTAAIRTMAIGEVRPQEQDKRDQPSSSTMVHPPTKDDEQVPQVEALDQGGAQDDQVMEEEAQPAPPTQVRAMIQRDHPVDQILGDISKGVTTRSRLVNFCEHYSFVSSIEPFRVEEALLDPDWVLAMQEELNNFKRNEVWTLVPRPKQNVVGTKWVFRNKQDEHGVVTRNKARLVAKGYAQVAGLDFEETFAPVARLESIRILLAYAAHHSFRLYQMDVKSAFLNGPIKEEVYVEQPPGFEDERYPDHVCKLSKALYGLKQAPRAWYECLRDFLLANAFKVGKADPTLFTKTCDGDLFVCQIYVDDIIFGSTNQKSCEEFSRVMTQKFEMSMMGELNYFLGFQVKQLKDGTFISQTKYTQDLLKRFGMKDAKPAKTPMGTDGHTDLNKGGKSVDQKAYRSMIGSLLYLCASRPDIMLSVCMCARFQSDPKECHLVAVKRILRYLVATPCFGLWYPKGSTFDLVGYSDSDYAGCKVDRKSTSGTCQFLGRSLVSWNSKKQTSVALSTAEAEYVAAGQCCAQLLWMRQTLRDFGYNLSKVPLLCDNESAIRMAENPVEHSRTKHIDIRHHFLRDHQQKGDLEVFHVSTENQLADIFTKPLDEKTFCRLRSELNVIDSRNLD

SEQ ID NO: 10056 - protein, 900 aa, Zea mays
  unsure (1)..(900): unsure at all Xaa locations
  Clone ID: TF_ZmC5924_1.pep
MDPKGKGMVINDKEKESFINEPKDDKPTDSGSSHKKKDGKKKRRIKKIVYYDSDESSSSQRDDDDEKKKTVNSNFSFDYSRISQTSNAHLLSIPLASLCRDEYHKVSGLDNAKQIWDTLKISHEGNDVTMLTKMELVEGELGRFAMIRGEEPTQTYNRLKTLVNKIRSYGSTRWTDHDVVHQNDARGNTRKVXSGRMMIKEARYVDEALNGPIHEPQTVALKATSSSEALPSKVAQVEAARLNEDEMALIIKRFKTALKGRKEHPNKSKTKGKRSCFKCGKIGHFIANCPDNDSDQEQGKSRKWEKKKAYKKVKGEAHLGKEWDSDCSSSDSDNEGLAASAFNKSALFPNEHHTCLMAKEKKVNTRSLDRTKIDKINELIDALNEKNRLLEKQEDLLYEEHDKFVSVQKSLALEVKRNEMLSCELSTCHESISSLKSVNDDLNAKLEVANKSSSCIEHVVICNRCKEFNVDACVEHLTSIAKLNGEVASLNAQLKTSKNDFDKLKFARDAYTIGRHPSIKDGLGFKREAKNLTSQGAPIFNKEKGKAPMTSNSQKNHAFMYHDRKYSRNSHYNRSYNVFDSHAMIASSSSFVHDRDMPKKNIIHRRRNFVSHAPSKVCNGSTTVFHACNAKFVLSCINEKSWVYASGGSSWIIDSGCTNHMTGEKKMFTSYVKNKDSQDSIIFGDGNQGKVKGLGKIAISSEHSISNVFLVESLGYNLLSVSQLCNMGYNCLFTNVDVSIFRRCDGSLAFKGVLDDKLYLVDFSKEEAGLDACLIAKTSMGWLWHRRLAHVGMKNLHKLLKGEHVLGLTNVSFDKDRPFSASHDSPWISLTCTMHSCFPTRSIQCQRGVAKTAANHTCKCKRVSEVNQYNMNPLVLLNLVTTSLMASTVKRRTPQKNNSN

SEQ ID NO: 10057 - protein, 239 aa, Zea mays
  unsure (1)..(239): unsure at all Xaa locations
  Clone ID: TF_ZmC5924_19.pep
MTPEEILGKFVSGRMMIKEARCVDDALNGPIHEPQTVALKATRSKEMLPSKVAQVEAAGLNEEEMALIIKRFKTALRGRKEHPNKTKTKGKRSCFKCGKIGHFIANCPDNDSDQEQGNKRKKKKAYKKAKGEAHLGKEWDSDCSSSDSDNXGLAATAFNKSALFPNEHHTCLMAREKKVSTRDTSTYTSSSDEESSDDEIDYSCLFKGLDRTNIDKINELIDALNGKNRLLEKQEISCI

SEQ ID NO: 10058 - protein, 410 aa, Zea mays
  Clone ID: TF_ZmC5924_5.pep
MELVEGELGRFAMIRGEEPTQTYNRLKTLVNKIRSYGSTRWTDHDVVRLMLRYTKMTPEEILGKFVSGRMMIKEARYVDEALNGPMSIHEPQTVALKATSSREALPSKVAQVEAAGLNEDEMALIIKRFKTTLKGCKEHPNKSKTKGKRSCFKCGKIGHFIANCPDNDSDQEQVKNGKRENKKVYKKAKGEAHIGKEWDSDCSSSDSDDEELAATAFNKSSLFPNEHHTCLMAKEKKVYASGGSSWIIDSGCTNHMTGEKKMFTSYAKNKDSQDSIIFGDGNQGKDKSETQGTLKRFLRRAQNEFELKVKKIRSDNGSEFKNLQVEEYLEEEGVKHEFSAPYTPQQNGVEELNNFKRNEVWTLVPRPKQNVVGTKWVFRNKQDEHGVVTRNKARLVAKGYAQVAGCFKWM

SEQ ID NO: 10059 - protein, 419 aa, Zea mays
  Clone ID: TF_ZmC951_381.pep
MDPKGKGIVINDKEKESFVNEPKDDKSNDSGSGHRRKDGKKKKTRRIKEIVYYDSDESSSSQKDDDNDYRKTTVLRGHKGQPSKTKTKGKRSCFKCGKIGHFIANCPDNDSDQEKGNKREKKKHYKKAKGEAHLGKEWDSDCSSSDSDNEGLAATAFNKSTLFPNERHTCLMAREKKSKSDRQSGLAKGATANSAPPDPRARTRAKTRKTANSAPPDPRARTRAKTRKTANSAPPDPRARTRAKTRKTANSAPPDPRARTRAKTRKTANSAPPDPRARTRAKTRKTANSAPPDPRARTRAKTRKTANSAPPGPRARTRAKTRKTTKLRLARPQGSDSALASAERLPTRPTPGLGLRPGLGRTTSASPDPLARARPRQQKADSTSASEETPRRRKQDNVSRDSTAPTAVPPSGSAAPPTA

SEQ ID NO: 10060 - protein, 1114 aa, Zea mays
  Clone ID: TF_ZM3613.C2.o2.fg.pep
MDPKGKRMVINDKEKECFINEPKDDKPTDSGSSHKKKDGKKKRRIKKIVYYDSDESSSSQRDDDDEKKKTDTLKISHEGNDATMITKMELVECELGRFAMIRGEEPTQTYNRLKTLVNKIRSYGSTRWTDHDVVRLMLRSFTVLDPHLVNSIRENPRYTKMMLEEILGKFVSGRMMIKETRYVDEALNGPMPIHEPQTVALKETSSREGLPSKAAQVEAAGLNEDEMALIIKRFKTALKGRKEHPNKSNTKGKRSCFKCGKIGHFIANCPDNDSDQEQGKNGKRENKKIYKKAKGEAHLGKEWDSDCSSSDSDDEGLAATAFNKSSLFPNEHHTCLMAKEKKVSTQNTIAYASSSDDESSDDEVDYASLFKGLDRTKIDKINELIDALNEKNRLLEKQEDLLYEEHDKFVSVQKSLALEVKRNEMLSCELSTCHESISSLKSVNDDLNAKLEVANKSSSCIEHVVICNRCKDFNVDACVEHLTSIAKLNGEVASLNAQLNTSKNNFDKLKFARGAYTIGRHPSIKDGLGFKREAKNLTSQRAPIFNKEKGKAPMANSSQKNHAFIYDRKFSRNAYHNRSCNAYDSHAMIASSSSVVHDVSVFRRCDGLLAFKGVLDGKLYLVDFSKEEAGLNACLIAKTSMGCLWHRRLAHVGMKNLHKLLKGEHVLGLTNVTFEKDRPCAACQAGKQVGSSHHSKNVMTTSRPLELLHMDLFGPVAYLSIGGSKYGLVIVDDFSCFTWVFFLQDKTETQGTLKCFLRRAQNEFELKVKKIRSDNGSEFKNLQVEEYLEEEGIKHEFSAPYTPQQNGVVERKNRTLIDMARTMLGEFKTPERFWSEAVNTACHAINRVYLHRLLKKTSYELLTGNKPNVSYFCVFGSKCYILVKKGRNSKFAPKAVEGFLLGYDSNTKAYRVFNKSSGLVEFSSDVVFDETNGSPREQVDLDDVDEEYVPTAAIRTMAIGDVRPQEQKEQDQPYSSTMVHPPTQTDDQVQEEACDQGGAQDDHVMEEEAPQAPPTQVRETIQRNHPVDQILGDISKGVTTRSRLANFCEHYSFISSIEPFRVEEALVDPDWVLAMQEELNSFKRNEVWTLGVGHAGRAQPLDFIVLTLNQVLWL

SEQ ID NO: 10061 - protein, 643 aa, Zea mays
  Clone ID: TF_ZM3613.C7.o2.fg.pep
MDPKGKGIVINDKEKESFVNEPKDDKPTDSGSGHRRKEGKKKKTRRIKEIVYYDDSDESSSSQKDNDDNDYRKTVNSNFSFDYSRIPHSSNSHLLSIPLGKPPHFDGEDYGFWSHKMRSHLFSLHPSIWEIVENGMKFDSSDSPMFINEQIHKNAQATTVLLASLCRDEYNKVSGLDNAKQIWDTLKISHEGNDVTLLTKTELVEGELGRFAMIRGEEPTQTYNRLKTLINKIRSYGSTRWTDHDVVRLMLRSFTVLDPHLVNNIRENPRYTKMSPEEVLGKFVSGRMMIKEARYVDDALNGPINEPQPLALKATRSKEALPSKVAQIEAAGLNDEEMALIIKRFKTVLKGHKGQPSKTKTKGKRSCFKCGKIGHFIANCPDNDSDQEQGNKREKKKNYKKAKGEAHIGKEWDSDCSSSDSDNEGLAATAFNKSSLFPNEHHTCLMAREKKVITRNASTYDSSSDESSDDDDIDYSSLFKGLDRTKIDKINELIDALNEKDRLLEKQEDLLYEEHDKFVEAQKSYALEVKRNEMLSFELSTCHETISTLKGVNNDLNAKLEVANKSNSCVEHVEICTRCKDFDIDACSEHLVSISKLNDELASLNAQLKTSKNDFDKLKFARDAYTIGRHPSIKDGLGFKRGS

SEQ ID NO: 10062 - protein, 707 aa, Zea mays
  Clone ID: TF_ZM3615.C2.o1.fg.pep
MDPKGKGIVINDKEKESFVNEPRDDKSNDSGSGHRRKDGKKKKTRHIKEIDYYDSDESTSSQKDDDHNDYEKKKPINSNFSFDYSRIPHSSSSHLLSIPLGKPPHFDGEDYEFWSHKMRSHLFSLHPSIWEIVESGMHFDSSDSPMFINEQIHKNAQATTVLLASLCRDEYNKVSGLDNAKQIWDTLKISHEGNDVTLLTKMELVEGELGRFAMIRGEEPTQTYNRLKTLINKIRSYGSTRWTDHDVVRLMLRSFTVLDPHLVNNIRENPRYTKMSPEEVLGKFVSGRMMIKEARYVDDALNGSINEPQPLALKATRSKEALPNKVAQIEAAGLNDEEMALIIKRFKTALKGRKGQPSKTKAKGKRSCFKCGKIGHFIANCPDNESDQELESKREKKKHYKKAKGEAHIGKEWDSDCSSSDSDNEGLAATAFNKSSLFPNEHHTCLMAKEKKVCTRESTTYSSSDDDSSDDNEIDYSSLFKGLDRIKIGKINELIDALNEKDRLLEKQEDLLYDEHDKFVEAQKSHALEVKRNEMLSCELSSCHETISSLRSINDDLNAKIASKSNSCVENVITCTRCKDINIDAYSEHLACISKLNEEVASLNTQLETSKSDFDKLKFARDAYTVGRHPSIKDELGFKREAKNLTSHKAPISAKEKGKAPMAKSTKRNHAFMYHDRRQTRNAYRSYNAYDDFNSHAMVASSSSYMH

SEQ ID NO: 10063 - protein, 1660 aa, Zea mays
  Clone ID: TF_ZM3619.C10.o1.fg.pep
MDPKGKGIVINDKEKESFVNEPKDDKPTDSGSGHRRKEGKKKKTRRIKEIIYYDDSDESTSSQKDDDNDYKKTVNSNFSFDYSRIQHSSNSHLLSIPLGKPPHFDGEDYGFWSHKMRSHLFSLHPSIWEIVENGMKFDSSDSPMFINEQIHKNAQATTVLLASLCREEYNKVSGLDNAKQIWDTLKISHEGNDITMLTKMELVEGELGRFAMIRGEEPTQTYNRLKTLINKIRSYGSTRWTDHDVVRLMLRSFTVLDPHLVNNIRENPRYTMMTPEEVLGKFVSGRMMIKEARYVDDALNGPLHESQPIALKATRSKESLPSKVAQVEAAGLNDEEMALIIKRFKTVLKGHKGQPSKTKTKGKRSCFKCGKIGHFIANCPDNDSDQEQGNKREKKKNYKKAKGEAHLGKEWDSDCSSSDSDNEGLAATAFNKSSLFPNEHHTCLMAREKKVITRNASTNDSSSDESSDDDDIDYSSLFKGLDRNKIDKINELIDALNEKDKLLEKQEDLLYEEHDKFVEAQRSHALEVKRNEMLSCELSSCHETISKLKSINDDLNAKLVEANRSNSCVEHVEICTRCKDVDINACSEHLVSISKLNDELASLNTQLKTSKSEFEKLKFARDAYTIGRHPSIKDGLGFKREAKNLTSHKTPISTKEKGKAPMANSVKKNHAFMYYDRRYSRNTFRGHDVFDSHAYDSYAMTASSSHVMHGRNVLRRNVVHQMPRRNVVRKVVNEPSTIYCALNASFAICRKDKKIVARKLGAKCKGDKTCIWVPKNICANLAGPNMSWVYASGGSSWIIDSGCTNHMTGEKKMFTSYVKNKDSQDSIIFGDGNQGKDKSETQGTLKRFLRRAQNEFELKVKKIRSDNGSEFKNLQVEEFLEEEGIKHEFSAPYTPQQNGVVKRKNRTLIDMARTMLGEFKTPECFWTEAVNTACHAINMVYLHRLLKKTSYELLTGNKPNVSYFRVFGSKCYILLKKGRNSKFAPKAVEGFLLGYDSNTKAYRVFNKSSGLVEVSSDVVFDETNGSPREQVIDCDVDEEDVPTTAIRTMAIGDVRPQEQYERDQPSSSTKVHPPTQDDEQVHQQEACDQGGAQVDNVMEEEAQPAPPTQVRAMIQRDHPVDQILGDISKGVTTRSRLVNFCEHYSFVSSIEPFRVEEALLDPDWVLAMQEELNNFKRNEVWTLVPRPKQNVVGTKWVFRNKQDEHGVVTRNKARLVAKGYAQVAGLDFEETFAPVARLESIRILLAYAAHHSFRLYQMDVKSAFLNGPIKEEVYVEQPPGFEDERYPDHVCKLSKALYGLKQAPRAWYECLRDFLIANAFKVGKADPTLFTKTCDGDLFVCQIYVDDIIFGSTNQKSCEEFSRVMTQKFEMSMMGELNYFLGFQVKQLKDGTFISQTKYTQDLLKRFGMKDAKPAKTPMGTDGHTDLNKGGKSVDQKAYRSMIGSLLYLCASRPDIMLSVCMCARFQSDPKECHLVAVKRILRYLVATPCFGLWYPKGSTFDLVGYSDSDYAGCKVDRKSTSGTCQFLGRSLVSWNSKKQTSVALSTAEAEYVAAGQCCAQLLWMRQTLRDFGYNLSKVPLLCDNESAIRMAENPVEHSRTKHIDIRHHFLRDHQQKGDIEVFHVSTENQLADIFTKPLDEKTFCRLRSELNVLDSRNLD

SEQ ID NO: 10064 - protein, 522 aa, Zea mays
  Clone ID: TF_ZM3639.C3.o2.fg.pep
MDSKGKGIVINDKEKESFVNEPRDDKSNDSGSGHRRKDGKKKKTRRIKEIVYYDSDESTSSQKDDDHNEYERKKPVNSNFSFDYSRIPQSTNAHLLSIPLGKPPHFDGEDYGFWSHKMRSHLFSLHPSIWEIVENGMHFDSTDSPMFINEQIHKNAQATTVLLASLCRDEYHKVSGLDNAKQIWDTLKISHEGNDVTLLTKMELVEGELGRFAMIRGEEPTQTYNRLKTLINKIRSYGSTRWTDHDIVRLMLRSFTVLDPHLVNNIRENPRYTKMSPEEVLGKFVSGRMMIKEARYVDDALNGPINEPQPLALKATRSKEALPSKVAQVEAAGLNNEEMALIIKRFKTALKGRKGQPSKTKAKGKRSCFKCGKIGHFIANCPDNDSDQEHGSKKERKKHYKKAKGEAHIGKEWDSDCSSSDSDNEGLAATAFNKSSFFPNERHTCLMAREKKVSNQNNVTYDSSSDDESSDEEIDYSSLFKGMDRTKVDKINELIDALNEKDRLLEKQEDLLYEEHDKFVEA

SEQ ID NO: 10065 - protein, 634 aa, Zea mays
  Clone ID: TF_ZM3639.C5.o5.fg.pep
MDPKGKGIVINDKEKESFVNEPRDDKSNDSGSGHRRKDGKKKKTRHIKEIVYYDSDESTSSQKDDDHNEYERKKPVNSNFSFDYSRIPQSTNAHLLSIPLGKPPHFDGEDYGFWSHKMRSHLFSLHPSIWEIVESGMHFDSTDNPMVINEQIHKNAQATTVLLASLCRDEYHKVSGLDNAKQIWDTLKISHEGNDVTLLTKMELVEGELGRFAMIRGEEPTQTYNRLKTLINKIRSYGSTRWTDHDVVRLMLRSFTVLDPHLVNNIRENPRYTKMSPEEVLGKFVSGRMMIKEARYVDDALNGPIHEPQPIALKATRSKEALPSKVAQVEAAGLNNEEMALIIKRFKTALKGRKGQPSKTKTKEKRSCFKCGKIGHFIANCPDNESDQEKGNKREKKKHYKKAKGEAHIGKEWDSDCSSSDSDNEGLAATAFNKSSLFPNERHTCLMAREKKVSNQNNVTYDSSSDDESSDEEIDYSSLFKGLDRTKVDKINELIDALNEKDRLLEKQEDLLYEEHDKFAEAQKSYALEVKRNEVLSSELSSCHETIAKLKSFNDDLNARLEVASKSNSCVEIVGTCNRCKDFDIDACSEHLVSISKLNDELASLNAQLKTSKSNFDKLKFARDAYTIGRHPLN

SEQ ID NO: 10066 - protein, 325 aa, Zea mays
  Clone ID: TF_ZM3642.C4.o6.fg.pep
MDPKGKRMVINDKEKECFINEPKDDKPTDSGSSHKKKDGKKKRRIKKIVYYDSDESSSSQRDDDDEKKKTDTLKISHEGNDATMITKMELVECELGRFAMIRGEEPTQTYNRLKTLVNKIRSYGSTRWTDHDVVRLMLRYTKMMLEEILGKFVSGRMMIKETRYVDEALNGPMPIHEPQTVALKETSSREGLPSKAAQVEAAGLNEDEMALIIKRFKTALKGRKEHPNKSNTKGKRSCFKCGKIGHFIANCPDNDSDQEQGKNGKRENKKIYKKAKGEAHLGKEWDSDCSSSDSDDEGLAATAFNKSSLFPNEHHTCLMAKEKKV

SEQ ID NO: 10067 - protein, 668 aa, Zea mays
  Clone ID: TF_ZM3650.C1.o1.fg.pep
MDPKGKGIVINDKEKESFVNEPKDDKPTDSGSGHRRKEGKKKKTRRIKEIVYYDDSDGSSSSQKDDDNDYRKTIHKNAQATTVLLASLCRDEYNKLVEGELGRFAMIRGEEPTQTYNRLKTLINKIRSYGSTRWTDHDVVRLLLRSFTILDPHLVNNIRENPRYTKMSPEEVLGKFVSGRMMIKEARYVDDALNGPIHEPQPIALKATRSKEALPSKVAQVEAAGLNNEEMALIIKRFKTALKGRKGQPSKTKTKEKRSCFKCGKIGHFIANCPDNESDQEKGDKREKKKHYKKAKGEAHIGKEWDSDCSSSDSDNEGLAATAFNKSTLFPNERHTCLMAREKKVSTRDTTYVSSSDDESSDEEIDYSSLFKGLDRNKIDKINELIDALNEKDRLLEKQEDLLYEEHDKFIEAQKSYALEVKRNEMLSFELSTCHETISTLKGVNNDLNAKLEVANKSNSCVEHVVICTRCKDFDIDACSEHLVSISKLNDELASLNAQLKTSKNDLDKLKFARDAYTIGRHPSIKDGLGFKREAKNLTSHKAPIPAKEKGKAPMASSVQKNHAFMYHDKRQTRNAYRSYNAYDDFDSHDMFVSSSSHMHGRNMSRRNAIHHCDTPVSPRVSLKQPNQKPSFYVNQSKHEHQNNLSEKEFTKYILKSVMIKTIETFER

SEQ ID NO: 10068 - protein, 860 aa, Zea mays
  Clone ID: TF_ZM3660.C5.o2.fg.pep
MDPKGKGIVINDKEKESFVNEPRDDKSNDSGSGHRRKDGKKKKTRRIKEIVYYDSDESTSSQKDDDHNDYEKKKPVNSNFSFDYSRIPHSSSSHLLSIPLGKPPHFDGEDYGFWSHKMRSHLFSLHPSIWEIVESGMHFDSSDSPMFINEQIHKNAQATTVLLASLCRDEYNKVSGLDNAKQIWDTLKISHEGNDVTLLTKMELVEGELGRFAMIRGEEPTQTYNRLKTLINKIRSYGSTRWTDHDVVRLMLRSFTVLDPHLVNNIRENPRYTKMSPEEVLGKFVSGRMMIKEARYVDDALNGPINEPQPLALKATRSKEALPNKVAQIEAAGLNDEEMALIIKRFKTALKGRKGQPSKTKAKGKRSCFKCGKIGHFIANCPDNESDQELGSKREKKKHYKKAKGEAHIGKEWDSDCSSSDSDNEGLTATAFNKSSLFPNEHHTCLMAKEKKVCTRESTTYSSSDDDSSDDNEIDYSSLFKGLDRIKIGKINELIDALNEKDRLLEKQEDLLYDEHDKFVEAQKSHALEVKRNEMLSCELSSCHETISSLRSINDDLNAKIASKSNSCVENVITCTRCKDINIDAYNEHLACISKLNEEVASLNTQLETSKSDFEKLKFARDAYTVGRHPSIKDGLGFKREAKNLTSHKAPISAKEKGKAPMAKSTKRNHAFMYHDRRQTRNAYRSYNAYDDFNSHAMVASSSSYMHGRNMSRRNTIYHVPRKNIIHAPRKVVNESSTIYCALNASFAICRKDRKIVARKLGAKCKGDKTCIWVPKDICTNLVGPNMSWVYASGGSSWIIDSGCTNHMTGEKKMFTSYVKNKDSQDSIIFGDGNQGKDKSETQGTLKRFLRRAQNEFELK

SEQ ID NO: 10069 - protein, 213 aa, Zea mays
  Clone ID: TF_ZM3970.C3.o1.fg.pep
MDPKGKGIVINDKEKEFFVNEPRDDKSNDSGSGHSRKDGKKKKTRRIKEIVYYDSDESTSSQKDDDHNEYERKKPATRSKEALPSKVAQVEAAGLNNEEMALIIKRFKTVLKGRKGQPSKTKTKEKRSCFKCGKIGHFIANCPDNESDQEKGNKREKKKHYKKAKGEAHIGKEWDSDCSSSDSDNEGLAATAFNKSSLFPNERHTCLMAREKK

SEQ ID NO: 10070 - protein, 711 aa, Zea mays
  Clone ID: TF_ZM4163.C9.o2.fg.pep
MIQVSQDHLFTLPLGALIVNEPKDDKPTDLGSGHKRKDGKKKKTRRIKEIVYYDDNDEFTSSQKDNGDNDYDKRKMVNSNFSFDYSRIPQSTNAHLLSIPLGKPPHFDGEDYRFWSHKMCSHLFSLHPSIWEIVENGMKFDSSDSPIFINEQIHKNAQATTVLLASLCRDEYHKVSGLDNAKQIWDTLKISHEGNDVTLLTKMELVEGELGRFAMIRGEEPTQTYNRLKTLINKIRSYGSTRWTDHDVVRLMLRSFTVLDPHLVNNICENPRYTKMSPEEVLGKFVSGRMMIKEARYVDDALNGPIHEPQPIALKATRSKEALPSKVAQVEAAGLNDEEMALIIKRFKTALKGHKGQPSKTKTKGKRSCFKCGKIGHFIANCPDNDSDQEQGNKREKKKAYKKAKGEAHLGKEWDSHCSSSDSDDERLAATAFNKSSLFPNERHTCLMAKEKKVCNRNNAAYESSSDDESSDEEINYSSLFKGLDRNKVDKINELIDALNEKDRLLEKQEDLLYEEHDKFVEAQKSHALEVKRNEMLSCELSSCHETISSLRSINDSLNAKLEIASKSNSCVEHVMICNRCKDFDTDACSEHLVSISKLNDELASLNAQLKTSKSDFDKLKFARDAYTIGRHPSIKDGLGFKREAKNLTSHKAPISIKEKGKAPMAKSAKKNHAFMYHYRRQSYRSCNAYDAFDSHAMCASSSSYMHGRDM

SEQ ID NO: 10071 - protein, 834 aa, Zea mays
  Clone ID: TF_ZM4290.C9.o7.fg.pep
MDPKGKGIVINDKEKESFVNEPKDDKSNDSGSGHRRKDGKKKKTRRIKEIVYYDSDESSSSQRDDDHNDYEQRKPVNSNFSFDYSRIPQSSNSHLLSIPLGKPPHFDGEDYGFWSHKMRSHLFSLHPSIWEIVDSGMHFNSSDSPIFINEQIHKNAQATTVLLASLCRDEYNKVSGLDNAKQIWDTLKISHEGNDATLLTKMELVEGELGRFAMIRGEEPTQTYNRLKTLINKIRSYGSTRWTDHDVVRLMLRSFTVLDPHLVNNIRENPRYTKMTPEEVLGKFVSGRMMIKEARYVDDALNGPINEHQPLALKATRSKEALPSKVAQIEAAGLNDEEMALIIKRFKTVLKGHKGQPSKTKTKGKRSCFKCGKIGHFIANCPDNDSDQEQGNKREKKKNYKKAKGEAHIGKEWDSDCSSDSDNEGLAATAFNKSSLFPNERHTCLMAREKKVITRNDVTYDSSSDDESSDDEIDYSSLFKGLDRNKIDKINELIDALNEKDRLLEKQEDLLYEEHDKFVEAQKSLALEIKRNEMLSCELSTCHDSISSLKSINDDLNAKLEKSSKSTSCVEHVVICTRCKDFDIDACSEHLVSISKLNDEVASLNAQLKASKSEFDKLKFARDAYTVGRHPSIKDGLGFKREAKNLTSHKAPIYVKEKGKAPMASSAKKNHAFLYYDRRHARNAYNDFDSHAYDSYAMTASSSHVVHDRKVYASGGSSWIIDSGCTNHMTGEKKMFTSYVKNKDSQDSIIFGDGNQGKMCLSLEEVMVLGAFVLRRYFRIQNYEYGARPGRSLNQTKVECSRSCAQGSFGAMAEGGTDLKMKRLRGPRQISISR

SEQ ID NO: 10072 - protein, 1544 aa, Zea mays
  Clone ID: TF_ZM4318.C3.o5.fg.pep
MDPKGKGIVINDKEKESFVNEPKDDKSNDSGSGHRQKDGKKKKTRRIKEIVYYDSDESSSSQKDDDNDYRKTVNSNFSFDYSRIPHNSNSHLLSIPLGKPPHFDGEDYRFWSHKMRSHLFSLHPSIWEIVENGMKFDSSDSPMLINEQIHRNAQATTVLLASLCREEYNKVSGLDNAKQIWDTLKISHEGNDVTMLTKMELVEGELGRFAMIRGEEPTQTYNRLKTLVNKIRSYGSTRWTDHDVVRLMLRSFTVLDPHLVNNIRENPRYTKMSPEEVLGKFVSGRMMIKEARYVDDALNGPIHEPQPIALKATRSKEALPSKVAQVEAAGLNNEEMALIIKRFKTALKGRKGQPSKTKTKEKRSCFKCGKIGHFIANCPDNESDQEKGDKREKKKHYKKAKGEAHLGKEWDSDCSSSDSDNEGLAATAFNKSSLFPNERHTCLMAREKKVCTQNSTYASSSEDESSDEDEVDYSCLFKGLDRTKVDKINELIDALNEKNILLEKQEDLLYEEHDKFVEAQRSHALEVKRNEMLSCELSSCHDAISKLRSINDDFNAKLEIASKSTSCVENVVACTKCKDINIDACSEHLACISKLNEEVASLNAQLNTSKSDFEKLKFARDAYTVGRHPSIKDGLGFKREAKNLTSHKAPISAKEKGKAPMASSTKRNHAFIYHDRRQTRNAYRSYNPYDDFNSHAMFASSSSCMHGRNMPRKNAMPRKNIIHALGKKDRKAYASGGSSWIIDSGCTNHMTGEKKMFTSYVKNKDSQDSIIFGDGNQGKDKSETQGTLKRFLRRAQNEFELKVKKIRSDNGSEFKNLQVEEFLEEEGIKHEFSAPYTPQQNGVVERKNRTLIDMARTMLGEVYLHRLLKKTSYELLTGNKPNVSYFRVFGSKCYILVKKGRNSKFAPKAVEGFLLGYDSNTKAYRVFNKSSGLVEVSRDVVFDETNGSPREQVVDCDDVDEEDVPTAAIRTMAIGEVRPQEQDEQDQPSSSTMVLPPTQDDEQVHQQEACDQGGAQVDHVMEEEAQPAPQTQVRAMIQRDHPVDQILGDISKGEELNNFKRNEVWTLVPRPKQNVVGTKWVFRNKQDEHGVVTRNKARLVAKGYAQVAGLDFEETFAPVARLESIRILLAYVAHHSFRLFQMDVKSAFLNGPIKEEVYVEQPPGFEDERYPDHVCKLSKALYGLKQAPRAWYECLRDFLIVNAFKVGKADPTLFTKTCDGDLFVCQIYVDDIIFGSTNQKSCEEFSRVMTQKFEMSMMGELNYFLGFQVKQLKDGTFISQTKYTQDLLKRFGMKDAKPAKTPMGTDGHTDLNKGGKSVDQKAYRSMIGSLLYLCASRPDIMLSVCMCARFQSDPKECHLVAVKRILRYLVATPCFGLWYPKGSTFDLVGYSDSDYAGCKVDRKSTSGTCQFLGRSLVSWNSKKQTSVALSTAEAEYVAAGQCCAQLLWMRQTLRDFGYNLSKVPLLCDNESAIRMAENPVEHNRTKHIDIRHHFLRDHQQKGDIEVFHVSTENQLADIFTKPLDEKTFCRLRSELNVLDSRNLD

SEQ ID NO: 10073 - protein, 1576 aa, Zea mays
  Clone ID: TF_ZM4325.C1.o23.fg.pep
MDPKGNGIVINDKEKESFVNEPKDDKPIDSGSGHKRKDGKKKKTRRIKEIIYYDDSDESSSSQKDDYDYEKRKTVNSNFSFDYSRIPQSTNAHLLSIPLGKPPHFDGEDYGFWSHKMRSHLFSLHPSIWEIVESGMKFDSTDSPMFINEQIHKNAQATTVLLASLCRDEYHKVSGLDNAKQIWDTLKISHEGNNITMLTKMELVEGELGRFAMIRGDEPTQTYNRLKTLVNKIRSYGSTRWTDHDIVRLMLRSFTVLDPHLVNNIRENPRYTKMSPEEILGKFVSGRMMIKEARYVDDELNGPIQEPQTIALKATRSKEALPSKVAQVEAAGLNDEEMALIIKRFKTTLKGRKGQPSKTKTKGKRSCFKCGKIGHFIANCPDNDSDQEQGNKREKKKAYKKAKGETHLGNEWDSDCSSSDSDNEGLAATAFTKSSLFPNERHTCLMAKDKKVCTRDNTTYASSSEDESSDDDEIDYSCLFKGLDRTKVDKINELIDALNDKNRLLEKQEDLLYEEHDKFVEAQKSLALEIKRNEMLSCELSTCHETISSLKDVNNDLNAKLEVANRSNSCVEHVVICTRCKDFNVDACSEHLVSIAKLNDELASLNAQLKTSKSEFDKLKFARDAYTIGRHPSIKDGLGFKREAKNLTSHKAPISAKEKGKTPMASSAKKTMLSCIMIGDILGMPIEVMMLLILMPCLLLVLPICMVYASGGSSWIIDSGCTNHMTGEKRMFSSYVKNKDPQDSIIFGDGNQGKVKGLDVSVFRRCDGSLAFKGVLDDKLYLVDFAKEEASLDACLIAKTCMGWLWHRRLAHVGMKNLHKLLKGEHIDLVQLVKQDKSETQGTLKRFLRRAQNEFELKVKKIRSDNGSEFKNLQVEEFLEEEGIKHEFSAPYTPQQNGVVERKNRTLIDMARTMLGEFKTPERFWSEAVNTACHAINRLYLHRLLKKTLYELLTGNKPNVSYFRVFGSKCYILVKKGRNSKFAPKAVEGFLLGYDSNTKAYRVFNKSSGLVEVSSDVVFDETNGSPREQVVDLDDVDEEDVPTAAIRTMAIGDVRPQEQTEQDQPSSSTMVHPPTQDDEQPFRVEEALLDLDWVLAMQEELNNFKRNEVWTLVPCPKQNVVGTKWVFRNKQDEHEVVIRNKARLVAKGYAQVTGLDFEETFAPVARLESIRILLAYAAHHSFRLFQMDVKSAFLNGPIKEEVYVEQPPGFEDERYPDHVCKLSKALYGLKQAPRAWYECIRDFLIANAFKVGKADPTLFTKTCDGDLFVCQIYVDDIIFGSTNQKSCEEFSRLNYFLGFQVKQLKDGTFISQTKYTQDLLKRFGMKDTKPAKTPMGTDGHTDLNKGGKSVDQKAYLSMIGSLLYLCASRPDIMLSVCMCARFQSDPRECHLVAVKRILRYLVATPCFGIWYPKGSTFDLIGYSDSDYAGCKVDRKSTSGTCQFLGRSLVSWNSKKQTSVALSTAEAEYVAAGQCCAQLLWMSQTLWDFGYNLSKVPLLCDNESAIRIADNPVEHSRTKHIDIRHHFLRDHQQKGDIEVFYINTENQLADIFTKPLDEKTFCRLRSELNVLDSRNLD

SEQ ID NO: 10074 - protein, 1318 aa, Zea mays
  Clone ID: TF_ZM4326.C1.o5.fg.pep
MEPKGKGIVINDKEKESFVNELKDDKPTDSGSGHRRKEGKKKKTRRIKEIVYYDDSDESTSSQKDDDHNDYEQRKPVNSNFSFDYSRIPQSSNSHLLSIPLGKPPHFDGEDHGFWSHKMRSHLFSLHPSIWEIVDSGMHFNSSDSPIFINEQIHKNAQATTVLLASLCRDEYNKVSGLDNAKQIWDTLKISHEGNDATLLTKIELVEGELGRFAMIRGEEPTQTYNRLKTLINKIRSYGSTRWTDHDVVRLMLRSFTVLDPHLVNNIRENPRYTKMSPEEVLGKFVSGRMMIKEARYVDDALNGPINEPQPFALKASRSKEALPSKVAQIEAVGLNDEEMALIIKRFKTVLKGHKGQPSKTKTKGKRSCFKCGKIGHFIANCPDNDSDQEMGNKREKKKHYKKAKGEAHLGKEWDSDCSSSDSDNEGLAATAFNKSTLFPNERHTCLMAREKKVCTRNSTYASSSEDESSDEDEVDYSCLFKGLDRSKIDKINELIDALNEKNILLEKQEDLLYEEHDKFVEAQKSLALEIKRNEMLACEVSTCHDSISNLKSINDDLNAKLVEANKSNSCVEYVEICTRCKDIDINACSEHLVSISKLNDELASLNAQLKTSKSNFDKLKFARDAYTVGRHPSIKDGLGFKREAKNLTSHKAPIPTKEKGKAPMATSAKKNHAFLYHDRRQTRNAYRSYNEYDDFSHAMFASSSSYVHDRNVGRRDVVHNMPRRNVVNIPRKVNEPSTIYHALNASFAICRKDRKVYASGGSSWIIDSGCTNHMTGEKKMFTSYVKNKDSQDSIIFGDGNQGKVKGLGKIAISNEHSISNVFLVESLGYNLLSVSQLCNMGYNCLFKNVVGTKWVFRNKQDEHGVVTRNKARLVAKGYAQVAGLDFEETFAPVARIESIRILLAYATHHSFRLYQMDVKSAFLNGPIKEEVYVEQPPGFEDERYPDHVCKLSKALYGLKQAPRAWYECLRDFLIANAFKVGKADPTLFTKTCDGDLFVCQIYVDDIIFGSTNQKSCEEFSRVMTHKFEMSMMGKLNYFLGFQVKQLKDGTFISQTKYTQDLLKRFGMKDAKPAKTPMGTDGHTDLNKGGKSVDQKAYRSMIGSLLYLCASRPDIMLSVCMCARFQSDPKECHLVAVKRILRYLVATPCFGLWYPKGSTFDLVGYSDSDYAGCKVDRKSTSGTCQFLGRSLVSWNSKKQTSVALSTAEAEYAAGQCCAQLLWMRQTLRDFGYNLSKVPLLCDNESAIRMAENPVEHSRTKHIDIRHHFLRDHQQKGDIEVFHVSTENQLADIFTKPLDEKTFCRLRSELNVLDSRNLD

SEQ ID NO: 10075 - protein, 1815 aa, Zea mays
  Clone ID: TF_ZM4333.C5.o2.fg.pep
MDPKGKGIVINDKEKESFVNEPRDDKSNDSGSGHRRKDGKKKKTRRIKEIVYYDSDESTSSQKDDDHNEYEKKKPVNSNFSFDYSRIPQSTNAHLLSIPLGKPPHFDGEDYGFWSHKMRSHLFSLHPSIWEIVESGMHFDSTDSPMFINEQIHKNAQATTVLLASLCRDEYHKVSGLDNAKQIWDTLKISHEGNDVTLLTKMELVEGELGWFAMIRGEEPTQTYNRLKTLINKIRSYGSTRWTDHDVVRLMLRSFTVLDPHLVNNIRENPRYTKMSPEEVLGKFVSGRMMIKEARYVDNALNGPINEPQPLALKAMRNKEALPSKVAQVEAAGLNNEEMALIIKRFKTALKGRKGQPSKTKTKEKRSCFKCGKIGHFIANCPDNESDQEKGNKREKKKHYKKAKGEAHIGKEWDSDCSSSDSDNEGLAATAFNKSSLFPNERHTCLMAREKKVSTRDSTYASSSDNESSDDDDIDYSCLFKGLDRSKIDKINELIDALNDKNRLLEKQEDLLYEEHDKFVNAQNSYALEVKRNEVLSSELSSCHETITTLKSVNDDLNAKLEGASKNSCVEHVEICTRCKDFDVDTCSKHLVSISNLNDEVASLNAQLKTSKSEFDKLKFARDAYTIGRHPSIKDGLGFKREAKNLTSHKAPIPAKEKGKAPMATSAKRNHAFLYHDRKNSRNAFRSYDAFDSHAYDSCTMTASSSHVMHDRKVGRRNVIHNMPRRNVVNIPRKVNEPSTIYHALNASFAICRKDRNVIARKLGAKCKGDKTCIWVPKTIVTNLVGPNKSWVYASGGSSWIIDSGCTNHMTGEKKMFTSYVKNKDSQDSIIFGDGNQGKVKGLDVSVFRRRDGSLAFKGVLDGKLYLVDFAKEEAGLDACLIAKTSMGWLWHRRLAHVGMKNLHKLLKGEHVIGLTNVQFEKDRPCAACQAGKQVGGAHHSKNVMTTSRPLELLHMDLFGPVAYLSIGGSKYGLVIVDDFSRFTWVFFLQDKSETQGTLKRFLRRAQNEFELKVKKIRSDNGSEFKNLQVEEFLEEEGIKHEFSAPYTPQQNGVVERKNKTLIDMARTMLGEFKTPERFWSEAVNTACHAINRVYLHRLLKKTSYELLTGNKPNVSYFRVFGSKCYILVKKGRNSKFAPKAVEGFLLGYDSNTKAYRVFNKSSGLVEVSSDVVFDETNGSPREQVVDCDDVDEEDVPTAAIRTMAIGEVRPQEQDERDQPSSSTKVHPPTQDDEQVHQKEACDQGGAQDNQEMEEETQPAPPIQVRAMIQRDHPVDQILGDISKGVTTRSRLVNFCEHYSFVSSIEPFRVEEALLDPDWVLAMQEELNNFKRNEVWTLVPHPKQNVVGTKWVFRNKQDEHGVVTRNKARLVAKGYAQVAGLDFEETFAPVARLESIRILLAYAAHHSFRLYQMDVKSAFLNGPIKEEVYVEQPPGFEDERYPDHVCKLSKALYGLKQAPRAWYECLRDFLIVNAFKVGKADPTLFTKTCDGDLFVCQIYVDDIIFGSTNQKSCEEFSRVMTQKFEMSMMGELNYFLGFQVKQLKDGTFISQTKYTQDLLKRFGMKDAKPAKTPMGTDGHTDLNKGGKSVDQKAYRSMIGSLLYLCASRPDIMLSVCMCARFQSDPKECHLVAVKRILRYLVATPCFGLWYPKGSTFDLVGYSDSDYAGCKVDRKSTSGTCQFLGRSLVSWNSKKQTSVALSTAETEYVAAGQCCAQLLWMRQTLRDFGYNLSKVPLLCDNESAIRMAENPVEHSRTKHIDIRHHFLRDHQQKGDIEVFHVSTENQLADIFTKPLDEKTFCRLRSELNVLDSRNLD

SEQ ID NO: 10076 - protein, 1754 aa, Zea mays
  Clone ID: TF_ZM4352.C4.o3.fg.pep
MDPKGKGIVINDKEKESFVNEPKDDKSNDSGSGHRRKDGKKKKTRRIKEIVYYDSDESSSSQNDDDNDYRKTVNSNFSFDYSRIPHSSNSHLLSIPLGKPPHFDGEDYGFWSHKMRSHLFSLHPSIWEIVENGMKFDSSDSPMFINEQIHKNAQATTVLLASLCRDEYNKVSGLDNAKQIWDTLKISHEGNDITMLTKMELVEGELGRFAMIRGEEPTQTYNRLKTLINKIRSYGSTRWTDHDVVRLMLRSFTVLDPHLVNNIRENPRYTKMTPEEVLGKFVSGRMMIKEARYVDDALNGPINEHQPLALKATSSKVAQIEAAGLNDEEMALIIKRFKTVLKGHKGQPSKTKTKRKRSCFKCGKIGHFIANCPDNDSDQEQGNKREKKKNYKKAKDEAHIGKEWDSDCSSDSDNEGLAATAFNKSSLFPNERHTCLMAREKKVSTRDSTYASSSDNESSDDDDIDYSCLFKGLDRSKIDKINELIDALNDKNVLLEKQEDLLYEEHDKFVEAQKSLALEIKRNEMLSCELSTCHDSIASLKSKNDDLNAKLEKSSKSTSCVEHVEICTRCKDFDVDACSDHLVSISKLTEELASLNAQLKTSKNEFDKLKFARDAYTIGRHPSIKDGLGFKREAKNLTSHKTPIPAKEKGKAPMATSVKKNHAFLYHDRKNSRNAFRSYDAYDSHAYDSYAMTASSSHVVHDRNVGRRNVVNIPRKVNEPSTIYHVLNASFAIYRKDRKVYASGGSSWIIDSGCTNHMTGEKKMFTSYVKNNDSQDSIIFGDGNQGKVKGLVESLGYNLLSVSQLCNMGYNCLFTNEDVSVFRRSDGSLAFKGVLDGKLYLVDFAKEEAGLDACLIAKTSMGWLWHRRLAHVGMKNLHKLLKGEHVIGLTNVQFEKDRPCAACQAGKQVGGAHHSKNVMTTSRPLELLHMDLFGPVAYLSIGGSKYGLVIVDDFSRFTWVFFLQDKSETQGTLKRFLRRAQNEFELKVKKIRSDNGSEFKNLQVEEFLEEEGIKHEFSAPYTPHQNGVVERKNRTLIDMARTMLGEFKTPERFWSEAVNTACHAINRVYLHRLLKKTSYELLTGNKPNVSYFRVFGSKCYILVKKGRNSKFAPKAVEGFLLGYDSNTKAYRVFNKSSGLVEVSSDVVFDETNGSPREQVVDCDDVDEEDVPTAPIRTMAIGEMRPQEQDERDEPSSSTMVLPPTQDDEQEACDQGGAQDDHVMEEDAQPAPPTQVRAMIQRDHPVDQILGDISKGVTTRSRLVNFCEHYSFVSSIEPFRVEEALLDPDWVLAMQEELNNFKRNEVWTLVPRPKQNVVGTKWVFRNKQDEHGVVTRNKARLVAKGYAQVAGLDFEETFAPVARLESIRILLAYAAHHSFRLYQMDVKSAFLNGPIKEEVYVEQPPGFEDERYPDHVCKLSKALYGLKQAPRAWYECLRDFLIVNAFKVGKADPTLFTKTCNGDLFVCQIYVDDIIFGSTNQESCEEFSRVMTQKFEMSMMGELNYFLGFQVKQLKDGTFISQTKYTQDLLKRFGMKDAKPAKTPMGTDRHTDLNKGGKSVDQKAYRSMIGSLLYLCASRPDIMLSVCMCARFQSNPKECHLVAVKRILRYLVATTCFGLWYPKGSTFDLVGYSDSDYAGCKVDRKSTSGTCQFLGRSLVSWNSKKQTSVALSTAEAEYVAAGQCCAQLLWMRQTLRDFGYNLSKVPLLCDNESAIRMAENPVEHSRTKHIDIRHHFLRDHQQKGDIEVFHVSTEN

SEQ ID NO: 10077 - protein, 357 aa, Zea mays
  Clone ID: TF_ZM4398.C1.o6.fg.pep
MTPEEILGKFVSGRMMIKEARYVDDALNGPIHEPQAIALKATSSREALPSKVVQIEAAGLNEDEMALIIKRFKTALKGRKEHPNKSKTKGKRSCFKCGKIGHFIANCPDNDSDQEQEKKREKKKAYKKAKGEAHLGKEWDSDCSSSDSGNEGLATSAFNKSSLFPNEHHTCLMAKEKKVYASGGSSWIIDRGCTNHMTGEKKMFSSYIKNKDSQDSIIFGDGNQDKDKSKTQGTLKRFLRRAQNEFELKVKKIRSDNGSEFKNLQVEEYLEEEGIKHEFSAPYTPQQNGVMKKTFQRSQYVPRRLAMCDHRNKRSKINLLPQQWCIPQLKMMNRFINKRRVIKGEHKMIMLWRKKHN

SEQ ID NO: 10078 - protein, 517 aa, Zea mays
  unsure (1)..(517): unsure at all Xaa locations
  Clone ID: TF_ZM4447.C1.o26.fg.pep
MDPKGKGIAINDKEKESFVNEPKDDKPTDSGSGHRRKEGKKKKTRRIKEIVYYDDSDESTSSQKDDDHNDYERRKSVNSNFSFDYSRIPQSANAHLLSIPLGKPPHFDGEDYGFWSHKMRSHLFSLHPSIWEIVESGMHFDSSDSPMFINEQIHKNAQATTVLLASLCRDEYHKXYTKMSPEEVLGKFVSGRMMIKEXKTTLKGRKGQPSKTKAKGKRSCFKCGKIGHFIANCPDNESDQEHGSKREKKKNYKKAKGEAHLGKEWDSDCSSSDSDNEGIAATAFNKSSLFRNERHTCLMAREKKVCSRNSTYASSSEDESSDEDEIDYSCLFKGLDRTKVDKINELIDALNDKNRLLEKQEDLLYEEHDKFVEAQKSHALEVKRNEMLSCELSSCHETISSLRSINDDLNAKIEIASKSTTCVENVVICNRCKDFDIDACSEHIASIAKLNDEMASLNAQLKASKSDFDKLKFARDAYTIGRHPSIKDGLGFKREAKNLTSHKAPISAKEKGKAPMT

SEQ ID NO: 10079 - protein, 1351 aa, Zea mays
  unsure (1)..(1351): unsure at all Xaa locations
  Clone ID: TF_ZM4449.C5.o10.fg.pep
MDPKGKGMVVDNNEKESIFNEPKNDKDEYNKVSGLDNAKQIWDTLKISHEGNDITMLTKMELVEGELGRFAMIRGEEPTQTYNRLKTLINKIRSYGSTRWTDHDVVRLLLRSFTILDPHLVNNIRENPRYTKMSPEEVLGKFVSGQMMIKEARYVDDALNGPINEPQPLALKATRSKEALPSKVAQIEAAGLNDEEMALIIKRFKTVLKGHKGQPSKTKTKGKRSCFKCGKIGHFIANCPDNNSDQEQENKREKKKNYKKAKGEAHLGKEWDSDCSSSDSDNEGLAATAFNKSSLFPNERHTCLMAREKKVSTRDSTYASSSNDESSDDDDIDYSCLFKGLDRNKIDKINELIDALNEKDKLLEKQEDLLYEEHDKFVEAQRSHALEVKRNEMLSCELSSCHETISKLRSINDDLNAKLEIASKSTSCVENVMTCTRCKDINLDAYGEHLACISKLNEEVASLNAQLKTSKSDFEKLKFARDAYTVGRHPSIKDGLGFKREVKNLTSHKASISAKEKGKAPMASSVQKNHAFIYHDRRQSRNAYRSYNAYDDFDSHAMFASSSSYMHGRNMSRKNAIHHMPRKNVIHAPRKVVNEPSTIYCALNASFAICRKDKKIVARKLGAKCKGDKTCIWVPKDICTNLVGPNMSWVYASGGSSWIIDSGCTNHMTGEKKMFTSYVKNKDSQDSIIFGDGNQGKDKSETQGTLKRFLRRAQNEFELKVKKIRSDNGSEFKNLQVEEFLEEEGIKHEFSAPYTPQQNGVVERKNMTLIDMARTMLGEFKTPECFWSEAVNTACHAINXDEEDVPTAAIRTMAIGEVRPQEQDERDQPSSSTMVHSPTQDDEQXVEEALLDPDWVLAMQEELNNFKRNEVWTLVPRPKQNVVGTKWVFRNKQDEHGVVTRNKARLVAKGYAQVAGLDFEETFAPVARLESIRILLAYAAHHSFRLYQMDVKSAFLNGPIKEEVYVEQPPGFEDERYPDDVCKLSKALYGLKQAPRAWYECLRDFLIANAFKVGKADPTLFTKTCDGDLFVCQIYVDDIIFGSTNKKSCEEFSWVMTQKFEMSMMGELNYFLGFQVKQLKDGTFISQTKYTQDLLKRFGMKDAKPAKTPMGTDGHTDLNKGGKSVDQKAYRSMIGSLLYLCASRPDIMLSVCMCARFQSDPKECHLVAVKRILRYLVATPCFGLWYPKGSTFDLIGYSDSDYAGCKVDRKSTSGTCQFLGRSLVSWNSKKQTSVALSTAEAEYVAAGQCCAQLLWMRQTLRDFGYNLSKVPLLCDNESAIRMAENPVEHSRTKHIDIRHHFLRDHQQKEDIEVFHVSTENQLADIFTKPLDEKTFCRLRSELNVLDSRNLD

SEQ ID NO: 10080 - protein, 572 aa, Zea mays
  Clone ID: TF_ZM4449.C5.o3.fg.pep
MDPKGKGIVINDKEKESFVNEPRDDKSNDSGSGHRRKDGKKKKTRRIKEIVYYDSDESTSSQKDDDHNEYERKKPVNSNFSFDYSRIPQSTNAHLLSIPLGKPPHFDGEDYGFWSHKMRSHLFSLHPSIWEIVESGMHFDSTDSPMFINEQIHKNAQATTVLLASLCRDEYHKVSGLDNAKQIWDTLKISHEGNDVTLLTKMELVEGELGRFAMIRGEEPTQTYNRLKTLINKIRSYGSTRWTDHDVVRLMLRSFTVLDPHLVNNIRENPRYTKMSPEEVLGKFVSGRMMIKEARYVDDALNGPIHEPQPIALKATRIKEALPSKVAQVEAAGLNNEMALIIKRFKTALKGRKGQPSKTKTKEKRSCFKCGKIGHFIANCPDNESDQEKGNKREKKKHYKKAKGEAHIGKEWDSDCSSSDSDNEGLAATAFNKSSLFPNERHTCLMAREKKVSTHDTSTYASSSEDESSDDDEIDYSCLFKGLDRSKINKINELIDALNDKNRLLEKQEDLLYEEHDKFVSAQNSLALEIKRNEMLSSELSTCHESISKLKSVNDDLNAKLEIASKSTSCVV

SEQ ID NO: 10081 - protein, 1842 aa, Zea mays
  Clone ID: TF_ZM4451.C1.o17.fg.pep
MDPKGKGIVINDKEKESFVNEPRDDKSNDSGSGHRRKDGKKKKTRHIKEIVYYDSDESTSSQKDDDHNEYERKKPVNSNFSFDYSRIPQSTNAHLLSIPLGKPPHFDGEDYRFWSHKMRSHLFSLHPSIWEIVESGMHFDSTDSPMFINEQIHKNAQATTVLLASLCRDEYHKVSGLDNAKQIWDTLKISHEGNDVTLLTKMELVEGELGRFAMIRGEEPTQTYNRLKTLINKIRSYGSTRWTDHDVVRLMLRSFTVLDPHLVNNIRENPRYTKMSPEEVLGKFVSGRMMIKEARYVDDALNGPIHEPQPNALKATRSKEALPSKVAQVEAAGLNNEEMALIIKRFKTALKGRKGQPSKTKTKEKRSCFKCGKIGHFIANCPDNESDQEKGNKREKKKHYKKAKGEAHIRKEWDSDCSSSDSDNEGLAATAFSKSSLFPNERHTCLMAREKKVSTHNTSTYASSSEDESSDDDEIDYSCLFKGLDRSKINKFNELIDALNDKNRLLEKQEDLLYEEHDKFVSAQNSLALEIKRNEMLSSELSTCHESISKLKSVNVDLNAKLEIASKSTSCVEIVETCNRCKDFDIDGCSDHLVSISKLNEELASLNAQLKTSKNEFDKLKFARDAYTIGRHPSIKDGLGYKREAKDLTSHKAPISAKEKGKAPMASSTKRNHAFMYHDRRQTRNAYRSYNAYDDFDSHAMFASSSSYMHGRNMSRRNAIHHVPRKNIIHAPRKIVNEPSTIYCALNASFAICRKDRKIVARKLGAKCKGDKTCIWVPKDICTNLVGPNMSWVYASGGSSWIIDSGCTNHMTGEKKMFTSYVKNKDSQDSIIFGDGNQGKVKGLVESLGYNLLSVSQLCNMGYNCLFTNVDVSVFRRSDGSLAFKGVLDGKLYLVDFAKEEAGLDACLIAKTSMGWLWHRRLAHVGMKNLHKLLKGEHVIGLTNVQFKKDRPCAACQAGKQVGGAHHSKNVMTTSRPLELLHMDLFGPVAYLSIGGSKYGLVIVDDFSRFTWVFFLQDKSETQGTLKRFLRRAQNEFELKVKKIRSDNRSEFKNLQVEEFLEEEGIKHEFSAPYTPQQNGVVERKNRTLIDMARTMLGEFKTPERFWSEAVNTACHAINRVYLHRLLKKTSYELLTGNKPNVSYFRVFGSRCYILVKKGRNSKFAPKAVEGFLLGYDSNTKAYRVFNKSSGLVEVSSDVVFDETNGSPREQVVDYDDVDEEDVPTAAIRTMAIGEVRPQEQDERDQPSSSTTVHPPTQDVEQVLQKEACDQGGAQDDHVMEEEVQPAPPTQVRAVIQRDHPVDQILGDISKGVTTRSRLVNFCEHYSFVSSIEPYRVEEALLDPDWILAMQEELNNFKRNEVWTLVPRPKQNVVGTKWVFRNKQDEHGVVTRNKARLVAKGYAQVAGLDFEETFAPVARLESIRILLAYATHHSFRLYQMDVKSAFLNGPIKEEVYVEQPPGFEDERYPDHVCKLSKALYGLKQAPRAWYECLRDFLIANAFKVGKADPTLFTKTCNGDLFVCQIYVDDIIFGSTNQKSCEEFSRLMTQKFEMSMMAELNYFLGFQVKQLKDGTFISQTKYTQDLLKRFGMKDAKPAKTPMGTDGHTDLNKGGKSVDQKAYRSMIGSLLYLCASRPDIMLSVCMCARFQSDPKECHLVAVKRILRYLVATPCFGLWYPKGSTFDLVGYSDSDYAGCKVDRKSTSGTCQFLGRSLVSWNSKKQTSVALSTAEAEYVAAGQCCAQLLWMRQTLRDFGYNLSKVPLLCDNESAIRMAENPVEHSRTKHIDIRHHFLRDHQQKGDIEVFHVSTENQLADIFTKPLDEKTFCRLRSELNVLDSRNLD

SEQ ID NO: 10082 - protein, 1239 aa, Zea mays
  Clone ID: TF_ZM4455.C2.o3.fg.pep
MDPKGKGMVVNDKEKESFVNDPKDDKPTDSGMSHKRKDGKKKKTRRIKEIVYYDDSDESSSSQKDDDNDYEKKKTVNSNFSFDYSRIPQSSNTHFLSIPLGKPPHFDGEDYEFWSHKMRSHLFSLHPSICEIVENGMHFDSTDSPMFINEQNHKNAQATTVLLASLCREEYNKVSGLDNAKQIWDTLKISHEGNDVTMLTKMELVEGELGRFAMIRGEEPNQTYNRLKTLINKIRSYGSTRWTDHDVVRLLLRSFTVLDPHLVNNIRENPRYTKMSPEEVLGKFVSGRMMIKEARYVDDALNGPIHEPQTVALKETRSKEALPSKVAQVDATGLNEEEMALIIKLFKTALKGRKEHPNKNKTKGKRSCFKCGKIGHFIANCPDNNSDQEQDKKREKKKAYRKAKGEAHLGKEWDSDCSSSDSDNEGLAASAFNKSSLFPNEHYSSLFKGLDRNKIDKINKLIDALNDKNRLLEKQEDLLYEEHDKFVEAQKSLALEVKRNEMLSCELSTCHESISNLKSINDDLNAKLEVANRSNSCVEHVVICNRCKDFNVDACSEHLVSIAKLNDEVASLNAQLKTSKDEFDKLKFARDAYTIGRHPSIKDGLGFKREAKNLTSHKAPIPAKEKGKAPMTNSCQKNHAFMYHDRKFSRNAHYDRSFNAYNSNAMIASSSSIMHNRNLTRKNVMPRRNVVHVPSKVNNEPSTIYHACNASFAICRKDRKVIARKLGAKCKGDKTCIWVPKDIVTNLVGPNKSWVYASGGSSWIIDSGCTNHMTGEKKMFTSYIKNKDSQDSIIFGDRNQGKVKGLGKIAISSEHSISNVFLVESLGYNLLSVSQLCNMGYNCLFTNVDVSVFRRSDGSLAFKGVLDDKLYLVDFAKEEAGLDACLIAKTSMGWLWHRRLAHVGMKNLHKLLKGEHVIGLTNVTFEKDRPRAACQAGKQVGSSHHTKNVMTTSRPLELLHMDLFGPVAYLSIGGSKYGLVIVDDFSCFTWVFFLQDKSETQGTLKRFLRRAQNEFELKVKKIRSDNGSEFKNLQVEEYLEEEGIKHEFSAPYTPQQNGVVERKNRTLIDMARTMLGEFKTPERFWSEAVNTTCHAMNRVYLHRLLKKTSYELLTGNKPNVSYFRVFGSKCYILVKKGRNSKFAPKAVEGFLLGYDSNTKAYRVFNKSLGLVEVSSDVVFDETNGSPREQVVDLDDVDEEDVPTAAIRTMAIGDVRPQEQKEQDQPSSSTMVHPPTQDDK

SEQ ID NO: 10083 - protein, 627 aa, Zea mays
  Clone ID: TF_ZM4548.C4.o1.fg.pep
MDPKGKGIVINNKEKESFVNEPKDDKSNDSGSGHKRKDGKKKKTRRIKEIVYYDSDESSSSQKDDDHNDYEQRKPVNSNFSFDYSRIPQSSNSHLLSIPLGKPPHFDGEDYGFWSHKMRSHLFSLHPSIWEIVDSGMHFNSSDSPIFINEQIHKNAQATTVLLASLCREEYNKVSGLDNAKQIWDTLKISHEGNDVTMLTKMELVEGELGRFAMIRGEEPTQTYNRLKTLVNKIRSYGSTRWTDHDVVRLMLRSFTILDPHLVNNIRENPRYTKMSPEEVLGKFVSGRMMIKEARYVDDALNGPIHEPQPIALKATRSKEALPSKVAQVEAAGLNNEEMALIIKRFKTALKGRKGQPSKTKTKEKRSCFKCGKIGHFIANCPDNESDQEKGDKREKKKHYKKAKGEAHLGKEWDSDCSSSDSDNEGLAATAFNKSTLFPNERHTCLMAREKKVCTRNSTYASSSEDESSDEDEVDYSCLFKGLDRSKIDKINELIDALNENNILLEKQEDLLYEEHDKFVEAQKSLALEIKRNEMLACEVSTCHDSISNLKSINDDLNAKLVEANKSNSCVEYVEICTRCKDIDINACSEHLVSISKLNDELASLNAQLKTSKSNFDKLKFARDAYT

SEQ ID NO: 10084 - protein, 1706 aa, Zea mays
  Clone ID: TF_ZM4580.C3.o9.fg.pep
MDPKGKGIVINDKEKESFVNEPRDDKSNDSGHRRKDGKKKKTRRIKEIVYYDSDESTSSQKDDDHNEYERKKPIHKNAQATTVLLASLCRDEYHKVSGLDNAKQIWDTLKISHEGNDVTLLTKMELVEGELGRFAMIRGEEPTQTYNRLKTLINKIRSYGSTRWTDHDVVRLMLRSFTVLDPHLVNNIRENPRYTKMSPEEVLGKFVSGRMMIKEARYVDDALNGPIHEPQPIALKATRSKEALPSKVAQVEAVGLNNEEMTLIIKRFKTALKGRKGQPSKTKTKEKRSCFKCGKIGHFIANCPDNESDQEKGNKREKKKHYKKAKDEAHIGKEWDSDCSSSDSDNEGLAATAFNKSSLFPNERHTCLMAREKKVSTHDTSTYASSSEDESSDDDEIDYSCLFKGLDRSKINKINELIDALNDKNRLLEKQEDLLYEEHDKFVSAQNSLALEIKRNEMLSSELSTCHESISKLKSVNDDLNAKLEIASKSTSCVEIVETCNRCKDFDIDACSEHLVSISKLNDELASLNAQLKTSKSNFDKLKFARDAYTIGRHPSIKDGLGYKKEAKNLTSHKAPISAKEKGKVPMDSSVQKNHAFMYHDRRQSRNAYRRCNAYGTFDSHDMFASSSSYVHDRNVGRRNVVHNMPRRNVVNVPRKVYASGGSSWIIDSGCTNHMTGEKKMFTSYVKNKDSQDSIIFGDRNQGKVKGLVESLGYNLLFVSQLCNMGYNCLFTNVDVSVFRRSDGSLAFKGVLDDKLYLVDFAKEEAGLDACLIAKTSMGWLWHRRLAHVGMKNLHKLLKGEHVIGLTNVQFEKDRPCAACQAGKQVGGAHHSKNVMTTSRPLELLHMDLFGPVAYLSIGGSKYGLVIVDDFSRFTWVFFLQDKSETQGTLKRFLRRAQNEFELKVKKIRSDNGSEFKNLQVEEFLEEEGIKHEFSAPYTPQQNGVVERKNRTLIDMARTMLGEFKTPECFWSEAVNTACHAINRVYLHRLLKKTSYELLTGNKPNVSYFRVFGSKCYILVKKGRNSKFAPKAVEGFLLGYDSNTKAYRFFNKSSGLVEVSSDVVFDETNGSPREQVVDLDDVDEEDVPTAAIRTMAIGDVRPQEQDEQDQPSSSTMVHPPTQDDEQVHQQEACDQGGAQDDHVMGEEAQPAPPTQVRAMIQRDHPVDQILCDISKGVTTRSRLVNFCEHYSFVSSIEPFRVEEALLDPDWVLAMQEELNNFKRNEVWTLVPRPKQNVVGTKWVFRNKQDEHGVVTRNKARLVAKGYAQVAGLDFEETFAPVARLESIRILLAYAAHHSFRLYQMDVKSAFLNGPIKEEVYVEQPPGFEDERYPDHVCKLSKALYGLKQAPRAWYECLRDFLITNAFKVGKADPTLFTKTCNGDLFVCQIYVDDIIFGSTNKKSCEEFNRVMTQKFEMSMMDELNYFLGFQVKQLKDGTFISQTKYTQDLLKRFGMKDAKPAKTPMGTDGHTDLNKGGKSVDQKAYRSMIGSLLYLCASRPDIMLSVCMCARFQSDPKECHLVAVQRILRYLVATPCFGLWYPKGSTFDLIGYSDSDYAGCKVDRKSTSGTCQFLGRSLVSWNSKKQTSVALSTAEAEYVAAGQCCAQLLWMRQTLRDFGYNLSKVPLLCDNESAIRMAENPVEHSRTKHIDIRHHFLRDHQQKGDIEVFHVSTENQLADIFTKPLDEKTFCRLRSELNVLDSRNLD

SEQ ID NO: 10085 - protein, 793 aa, Zea mays
  unsure (1)..(793): unsure at all Xaa locations
  Clone ID: TF_ZM4589.C1.o1.fg.pep
MDPKGKGTVVNNNEKESIFNEPKDDKPTDSGSSHKRRDGKKKTRRIKEIVYYDSDESSSSQKYDDDYEKKKTVNSNFSFDYSRIPQCAYAHLLSIPLGKPPHFDGEDYGFWSHKMRSHLFSLHPSIWEIVESGMKFDSSNSPLFINEQIHKNAQATNVLLASLCRDEYHKVSGLDNAKQIWDTLKISHEGNDVTMLTKMQLVEGELGRFAMIRGEEPTQTYNRLKTLVNKIRSYGSTRWTDHDVVRLMLRSFTVLDPHLVNNIRENPSGRMMIKEARYVDDALNGPIQEPQTIALKATRSKEALPSKVAQIEAAELNDEEMALIIKRFKTALRGRKEHPNKTKTKGKRSCFKCGKIGHFIANCPDNDSDLEKKSGKWEKKKNYKKAKGEAHIGKEWDSDCSTSDSDNEGLAATAFNKSSLFPNEHHTCLMAKEKKGLDRSKIDKINELIDALNDKNRLLEKQEDLLYEERDKFVSAQNSLALEIKRNEMLSCELSTCHESISNLRSVNDDLNAKLEIASKSNSCVENVVTCTRCKDINIDACSEHLARISKLNDEVASLNAQLKTSKSDFNKLKFARDAYTVGRHPSIKDGLGFKREAKNLTSHKAPIPAKEKGKAPMASSAKKNHAFMYXDRRHARNANRSYDAFDSYVYDSHAMFASSSSYKHDRDMSRRNVVXLRRRNVVNVPRKVNGPSTIYHALNASIAICRKDKKIVARKLGAKCKGDKTCFWVPKDICANLVGPNMSWVYASGGSSWIIDSGCTNHMTGEKKMFTSYVKNKDSQDSIIFGDGNQGK

SEQ ID NO: 10086 - protein, 1553 aa, Zea mays
  unsure (1)..(1553): unsure at all Xaa locations
  Clone ID: TF_ZM4611.C1.o2.fg.pep
MDPRGKGTVVNDKEKESFVNEPKDDKPTDSSSGHKQRDGKKKKKTRRIKEIVYYDDNDESSSSQKDDDNVYENKKTINSNFSFDYSRIPQSTNAHLLSIPLASLCRDEYHKVSGLDNAKQIWDTLKISHEGNDVTILTKMELVEGELGRFAMIRGEEPTQTYNRLKTLVNKIRSYGSTRWTDHDVVHEDDARGDPWKVRXGWMMIKEARYVDDALNGPIQEPQTIALKATRSKEALPSKVAQVEAAGLNEEEMTLIIKRFKTTLKGRKEHPNKNKTKGKRSCFKCGKIGHFIANCPDNDSDQEKKSGKWEKKKNYKKAKGEAHLGKEWDSDCSSSDSDNEGLAATAFNKSSLFPNEHHTCLMAREKKVSTRLDRTKVDKINELIDALNDKNMLLEKQENLLYEEHDKFVSAQSSLALEVKRNEMLSCELSTCHETISTLKGINDDLNAKLEVANKSNSCVEHVIICNRCKDFNVDACSEHLACISKLNDEVASLNAQLKTSKSEFDKLKFARDAYTIGRHPSIKDGLGFKREVKNLTSQKASISAKEKGKAPMASSAQKNHAFMYHDRRHSRNDYRSYNDFDSHAMVASSSSIMHDRNLARRNVINNMPRRNVVHVPRKTNSEPSTIYHALNASFAIXPNMSWVYASGGSSWIIDSGCTNHMTGEKMMFSSYVKNKDPQDSIIFGDGNQGKVKGLGKIAISNEHSISNVFLVESLGYNLLSTLCSLSSRETGGKLSSCQKCDDNIKTPGVTSYGPLRTRRLSKHXEEDKSETQGTLXRFLRRAQNEFELKVKKIRSDNGSEFKNLQVEEYLEEEGIKHEFSAPYAPQQNGVVERKNRTLIDMARTMLGAFKTLECFWSEAVNTACHAINRVYLHRLLKKTSYELLTGNKPNVSYFRVFGSKCYILVKKGRNFKFAPKAVEGFLLGYDSNTKAYRVFNKSSGLVEVSSDVVFDETNGSPREQVVDLDDVDEEDVPTTAMRTMAIGDVRPMEQKEQDQPSSSTMVHPPTQEDEQVHQEEACDQGGAQDDHVMEEETQPTPPTQVRAMIQRDHPVDQILGDISKGVTTRSHLVNFFCTLVPRPKQNVVGTKWVFRNKQDEHGVVTRNKARLVAKGYAQVAGLDFEETFAPVARLESIRILLAYAAHHSFRLFQMDVKSAFLNGPIKEEVYVEQPPGFEDERYPDHVCKLSKALYGLKKAPRAWYECLRDFLIANAFKVGKVDPTLFTKTCDGDLFVCQIYVDDIIFGSTNQKSCEDFSRVMTQKFEMSMMGELSYFLGFQVRQLKDGTFISQTKYTQDLIKRFGMKDAKPAKTPMGTDGYTDLNKGGKSVDQKAYRSMIGSLLYLCASRPDIMLSVCMCARFQSDPRECHLVAVKRILRYLVATPCFGIWYPKGSTFDLIGYSDSDYAGCKVDRKSTSGTCQFLGRSLVSWSFKKQTSVALSTTEAEYVATGQCCAQLLWMRQTLRDFGYNLSKVPLLCDNESAIRMADNPVEHSRTKHIDIRHHFLRDHQQKGDIEVFHVSTENQLADIFTKPLDEKTFCRLRSELNVLDSRNLD

SEQ ID NO: 10087 - protein, 1594 aa, Zea mays
  Clone ID: TF_ZM4612.C4.o3.fg.pep
MDPKGKGMVVDNNEKESIFNEPKNDKSTDLGSSHKRKDGKKKKTRRIKEIVYYDSDESSSSQKDDDNDYRKTVNSNFSFDYSRIPHNSNSHLLSIPLGKPPHFDGEDYGFWSHKMRSHLFSLHPSIWEIVENGMKFDSSDSPMFVNEQIHKNAQATTVLLASLCRDKYNKVSGLDNAKQIWDTLKISHEGNDITMLTKMELVEGELGRFATIRGEEPTQTYNRLKTLINKIMSYGSTRWTDHDVVRLLLRSFTILDPHLVNNIRENPRYTKMSPEEVLGNFVSGRMMIKEARYVDDALNGPINEPQPLALKATRSKEALPSKVAQIEAAGLNDEEMALIIKRFKTVLKGHKGQPSKTKTKGKRSCFKCGKIGHFIANCPDNDSNQEQENKREKKKNYKKAKGEAHLGKEWDSDCSSSDSDNEGLAATAFNKSSLFPNERHTCLMAREKKVSTRDSTYASSSDNESSDDDDIDYSCLFKGLDRSKIDKINELIDALNDKNRLLEKQEDLLYEEHDKFVEAQKSLALEIKRNEMLSCEVSTCHDSISSLKSINDDLNAKLERSSKSTSCVEHVVICTRCKDFDIDACSEHLVSISKLNDELASLNAQLKTSKSEFDKLKFARDAYTIGRHPSIKDGLGFKREAKNLTSHKTPISAKEKGKAPMASRDKLEMLIEVIINVARRNAIHHVPRKNVLYAPRKVVNEPSTVYCALNASFAICRKDRKVYASGGSSWIIDSGCTNHMTGEKKMFTSYVKNKDSQDSIIFGDGNQGKDKSETQGTLKRFLRRAQNEFELKVKKIRSDNGSEFKNLQVEEFLEEEGIKHEFSAPYTPQQNGVVERKNRTLIDMVRTMLGEFKTPECFWTEAVNTACHAINRVYLHRLLKKTSYELLTGNKPNVSYFRVFGSKCYILVKKGRNSKFAPKAVEGFLLGYDSNTKAYRVFNKSSGLVEVSSDVVFDETNGSPREQVVDLDDVDEEDVSTAAIRTMAIGDVRPQEQDEQDQPSSSTMVHPPTQDDEQVHQQEACDQGGAQDDHVMEEEAEPAPPTQVRAVIQRDHPVDQILGDISKGVTTRSRLVNFCEHYSFVSSIEPFRVEEALLDPDWVLAMQEELNNFKRNEVWTLVPRPKQNVVGTKWVFRNKQDEHGVVTRNKTRLVAKGYAQVAGLDFEETFAPVARLESIRILLAYAAHHSFRLFQMDVKSAFLNGPIKEEVYVEQPPGFEDERYPDHVCKLSKALYGLKQAPRAWYECLRDFLSANAFKVGKADPTLFTKTCDGDLFVCQIYVDDIIFGSTNKKSCEEFSRVMTQKFEMSMMGELNYFLGFQVKQLKDGTFISQTKYTQDLLKRFGMKDAKPAKTPMGTDGHTDLNKGGKSVDQKAYRSMIGSLLYLCASRPDIMLSVCMCARFQSDPKECHLVAVKRILRYLVATPCFGLWYPKGSTFDLIGYSDSDYAGCKVDRKSTSGTCQFLGRSLVSWNSKKQTSVALSTAEAEYVAAGQCCAQLLWMRQTLRDFGYNLSKVPLLCDNESAIRMAENPVEHSRTKHIDIRHHFLRDHQQKGDIEVFHVSTENQLADIFTKPLDEKTFCRLRSELNVLDSRNLD

SEQ ID NO: 10088 - protein, 1516 aa, Zea mays
  unsure (1)..(1516): unsure at all Xaa locations
  Clone ID: TF_ZM4613.C2.o1.fg.pep
MDPRGKGMVVNDKEKESFVNDPKDDKPTDSGSSHKRKDGKNKKTRRIKEIVYYDDSDESSSSQKDDDNYEKKKPVNSNFSFDYSRIPQNKNAHLLSIPLXVEGELGRFAMIRGEEPTQTYNRLKTLVNKIRSYGSXALNGPIHEPQTVALKATRSKEVLPSKVAQVEAAGLNEEEMALIIKCFKTALRGRKEHPNKTKTKGKRSCFKCGKIGHFIANCPDNDSDQEQGNKREKKKAYKKTKGEAHLGKEWDSDCSSSDSDNEGLAATAFNKSALFPNEHHTCLMAREKKIELRLIKINELIDALNDKNRLLEKQEDLLYEEHDKFVEAQKSLALEIKRNEMLSCELSICHDSISSLKSINDDLNAKLEIANKSTSCVEHVAICNRCKDFNVDACSEHLVSISNLNDEVASLNAQLKTSKSEFDKLKFARDAYTIGRHPSIKDGLGFKREVKNLTSHKASISAKEKGKAPMASSVQKNHAFMYHDRRHSRNVDRSYDAFDSHAMIASSSSIMHDRNLARKNVVHHMPRRNAHVPRKTSNEPSTIYHALNASFAICRKDKKVVARKLGAKCKGDKTCIWVPKTICLCIRGSSWIIDSGCTNHMTGEKRMFSSYVKNKDPQDSIIFGDGNQGKVKGLGKIAISSEHSISNVFLVESLGYNLLSVSQLCNMGYNGLFTNVDVSVFRRSDGSLAFKGVLDDKLYLVDFAKEEAGLDACLIAKTSMGWLWHRRLAHVGMKNLHKLLKGEHVIGLTNVTFEKDRPCAACQADKQVGSSHHAKNVMTTSRPLELLHMDLFGPVAYLSIGGSKYGLVIVDDFSRFTWVFFLQDKSETQGTLKRFLRRAQNEFELKVKKIRSDNGSEFKNLQVEEYLEEERIKHEFSAPYTPQQNGVVERKNRTLLDMARTMLSEFKTPERFWTEAVSTACHAINRVYLHRLLKKTSYELLTGNKPNVSYFRVFGSKCYILVKKGRNSKFAPKAVEGFLLGYDSNTKVYRVFNKSSGLVEVSSDVVFDETNGSPREQVVDLDDVDEEDVPTAAMRTMAIGDPFRVEEALLDPNWVLAMQEELNNFKRNEVWTLVPRPKQNVVGTKWVFRNKQDEXHGVVTRNKARLVAKGCXQMDVKSAFLNGPVKEEVYVEQPPGFEDERYPDHVCKLSKALYGLKQAPRAWYECLRDFLIANAFKVGKADPTMFTKTCDGDLFVCQIYVDDIIFGSTNQKSCEEFSRVMTQKFEMSMMGELSYFLGFQVKQLKDGTFISQTKYTQDLIKRFGMKDAKPAKTPMGTDGHTDLNKGGKSVDQKAYRSMIGSLLYLCASRPDIMLSVCMCARFQSDPRECHLVAVKRILRYLVATPCFGIWYPKGSTFDLIGYSDSDYAGCKVDRKSTSGTCQFLGRSLVSWSSKKQTSIALSTAEAGYVAAGQCCAQLLWMRQTLRDFGYNLSKVPLLCDNESAIRMADNPVEHSRTKHIDIRHHFLRDHQQKGDIEVFHVSTENQLADIFTKPLDESTFCKLRSELNVLDSRNLD

SEQ ID NO: 10089 - protein, 1431 aa, Zea mays
  Clone ID: TF_ZM4621.C2.o2.fg.pep
MDPKGKGMVVNDKEESFVNDPKDDKPTNSGSSHKRKDGTKKKTRRIKEIVYYDDSDESSSSQKDNDDNDYEKKKTVNSNFSFDYSRIPQSTIAHLLSIPLASLCRDEYHKVSGLGNAKQIWDTLKISHEGNDVTMLTKMELVEGELGRSFTVLDPHLVNNIRENPRYTKMTPEEILGKFVSGRMMIKEARYVDDALNGPIHEPQIVALKATRGKEVLPSKVAQVEAAGLNEEEMALIIKRFKTALRGRKEHPNKSKTKGKRSCFKCGKIGHFIANCPDNDSDQEQEKKREKKKNYKKAKGEAHLGKEWDSDCSSSDSDNEGLTASAFNKSSLFPNEHHTCLMAKEKKVCTRNNTTYASSSEDESSDDEIDYAYLFKGLDRTKIDKINELIDALNDKNRLLEKQEDLLYEEHDKVVEAQKSLALEVKRNEILSCELSTCHETISSLKSINDDLNAKLEIANKSTSCVDHVVICNRCKDFNVDACSEHLVCISKLSDEVASLNAQLKTSKSEFDKLKFARDAYTIGRHPSIKDGLGFKREAKSLTSHKAPISAKEKGKAPMTNSSQKNHAFIYGDKRYFRNVHRSCNDSNAMFASSSSYMHGRDMPRRNVHVPRKINEPSTIYHACNASFAICRKDKKVYASGGSSWIIDSGCTNHMTGEKKMFTSYVKNKDSQESIIFGDGNQGKVKGLGKIAISSEHSISNVFLVESLGYNLLSVSQLCNMGYNCLFTNVDVSVFRRSDGSLAFKGVLDGKLYLVDFAKEEAGLDACLIAKTSMGWLWHRRLAHVGMKNLHKLLKGEHVIGLTNVTFEKDRPCAACQAGKQVGSSHHTKNVMTTSRTLELLHMDLFGPVAYLSIGGSKYGLVIVDDFSRFTWVFFLQDKSKTQGTLKRFLKRAQNEFKLKKNGVVERKNRTLIDMARTMLGEFKTPERFWSEAMNTACHAINRVYLHRLLKKTSYELLTGNKPNVSYFRVFGSKCYILVKKGRNSKFAPKAVEGFLLGYDSNTKAYRVFNKSSGLVEVSSDVVFDETNGSPREQVVDLDDVDEEEVPTATIHTMAIVEVRPQEQKEQDQPSSSTMVHPPTQDDEQEELNNFKRNEVWTMVPRPKQNVVGTKWVFHNKQDEHGVVTRNKARLVAKGYAQVTGLDFEETFAPVAMLESIRMLLAYATHHSFRLFQMDVKSAFLNGPIKEEVYVEQPPGLEDERYPDHVCKLSKALYGLKQAPRAWYECLRDFLIANAFKVGKADPTLFTKTCDGDLFVCQIYVDDIIFGSTNQKSCEEFSRVMTQKFEMSMMGELNYFLRFQVKQLKDATFISQTKYTQDLLKRFGMKDAKPAKTPMGTDGHVDLNKGGKSVDQKAYRSMIGSLLYLCASRPDIMLSVCMCARFQSDPKECHLVAVKRILRYLVATPCFGIWYPKGSTFDLIGYSDSDYAGCK

SEQ ID NO: 10090 - protein, 677 aa, Zea mays
  Clone ID: TF_ZM4621.C6.o3.fg.pep
MDPKGKGMVVNDKEKESFVNDPKDDKPTDSGSSHKRKDGKKKKTRRIKEIVYYDDSDESSSSQKDNDDNDYEKKKTVNSNFSFDYSRIPQSTNAHLLSIPLGKPPHFDGEGYGFWSHKMHSHLFSLHPSIWEIVESGMKFDSTDSPIFINEQIHKNAQASTVLLASLCRDEYHKVSGLDNAKQIWDTLKISHEGNDVTMHTKMELVEGELGRFAMIRGEEPTQTYNRLKTLVNQIRSYGSTRWTDHDVVRLMLRSFTVLDPHLVNNIRENPRYTKMTPEEILGKFVSGRMMIKEARYVDDALNGPIHEPQTVALKATRGKEVLPSKVAQVEAMGLNEEEMALIIKCFKTALRGRKEHPNKSKTKGKRSCFKCGKIGHFIANCPDNDNDQEQEKKREKKNNYKKAKGEAHLGKEWDSDCSSSDSDNEGLTASAFNKSSLFPNEHHTCLMAKEKKVCTRNNTTYASSSEDESSDDEIDYAYLFKGLDRTKIDKINELIDALNDKNRLLEKQEDLLYEEHDKVVEAQKSLALEVKRNEMLSCELSTCHETISSLKSINDDLNAKLEIANKSTSCVNHVVICNRCKDFNVDACSEHLVCISKLSDEVASLNAQLKTSKSEFDKLKFARDAYTIGRHPSIKDGLGFKREAKSLTSHKAPISSKEKGKAPMTNSSQKNHAFIY

SEQ ID NO: 10091 - protein, 309 aa, Zea mays
  unsure (1)..(309): unsure at all Xaa locations
  Clone ID: TF_ZM4638.C8.o1.fg.pep
MMIKEARYVDDALNDPIHEPQTVALKATRSKEALPSKVAQVEAAGLNEEEMALIIKRFKTTLKGRKEHPNKNKTKGKRSCFKCGKIGHFIANCPDNDSDQEQEKKREKKKSYKKAKGEAHLGKEWDSDCSSSDSDNEGLAASAFNKTSLFPNEHHTCLMAKEKKDRLLEKQEDLLYEEHDKFVEAQNSLALEVKRNEMLSCELSTCHESISSLKGVNDDLNAKLEIASKSTSREEHVMICNRCKDFNVDACSEHLVCISKLNDEVASLNAQLKTSKNDFDKLKFARDAYTVGXPSIKDGLGFKREAKNL

SEQ ID NO: 10092 - protein, 1677 aa, Zea mays
  Clone ID: TF_ZM4679.C2.o9.fg.pep
MDPKGKGMMINDKEKESFLNEPKDDKPTDSSSSHKKKDGKKKRRIKKIVYYDSDESSSSQKDDDDEKKKTVNSNFSFGYSRIPQNSNAHLLSIPLGKPPHFDGEDYGFWSHKMRSHLFSLHPSIWEIVENGMQFDSMDNPMFINEQIHKNAQATTILLASLCREEYHKVGGLDNAKQIWDILKISHEGNDATMITKMELVEGELRRFTMIRGEEPTQTHNRLKTLVNKIRSYGSTRWRTTTSYTKMTPEEILGEFVSGRMMIKEARYVDEALNGPMPIHEPQTVALKATSSREGLPSKVAQVEAAELNKDEMALIIKRFKTALKGRKEHPNKSKTKGKRSCFKCGKIGHFIANCPDNDSDQEQGKNGKREKKKVSRRLRARHTLEKNGTRIVLRPTPTTKDSPPRPSSNRLSSPTSITLASWQRRRRCKDFNVDACVEHLTSITKLNGEVASLNAQLKTSKNDFDKLNIATDAYTVGRHPSIKDELGFKSGCTNHMTGENKMFTSYVKNKDSQDSIIFGDGSQGKVKGLGKIAISSEHSISNVFLVESLRRSDGSLAFKGVLDGKLYLVDFSKEEANLDACLIAKTSMGWLWHRRLAHVRMKNLHKLLKGEHVLGLTNVTFEKDRPCAACQAGKQVGSSHHSKNVMTTSRPLELLHMDLFGPVAYLSIEGSKYGLVIVDDFSRFTWVFFLQDKTETHGTLKRFLRRAQNEFELKVKKIRSDNGSEFKNLQVEEYLEEEGVKHEFSAPYTPQQNGVVERKNRTLLDMARTMLSEFKTPERFWTEAVNTACHAINRVYLHRLLKKTSYELLTVKKGRNSKFAPKAVEGFLLGYDSNTKAYRVFNKSSGLVEVSSNVVFDETNGSPREQIDLDDVDEEDVPTAAIRTMAIGDVRPQEQKEQDQPSSSTMVHPPTQDDEQVHQEEACDQGGAQDDHVMEEEAPQAPPTQVRATIQRNHPVDQILGDISKGVTTRSRLANFYEHYSFVSSIEPFRVEEALLDPDWVLAMQEELNNFKRNEVWTLVPRPKQNIVGTKWVFRNKQDEHGVETRNKARLVAKGYAQVAGLDFEETFAPVARVESIRILLAYAAHHSFKLFQMDVKSAFLNGPIKEDVYVEQPPGFEDERYPDHVCKLSKALYGLKQAPRAWYECLRDFLIANAFKVGKADPTLFTKTCDGDLFVCQIYVDDIIFGSTNQKSCEEFSRVMTQKFEMSMTGELNYFLGFQVKQLKDGTFISQTKYTHDLIKRFGMKDAKLAKTPMGTDRHVDLNKGGKSVDQKAYRSIIGSLLYLCASRPDIMLSVCMCARFQSDPRECHLVAVKRILRYLVATPCFGIWYPKGSTFELIGYSDSDYAGCKVDRKSTSGKCQFLGRSLVSWSYKKQTSVALSTAEAEYVAAGQCCVQLLCMRQTLRDFGYNLSKVPLLCYNESAIRMADNPVEHSRTKHIDIRHHFLRDHQQKGDIKVFYVSTENQLADIFTKPLDEKTFCRLRIRLGQEATVCKILLQQQLSSQSEDVTIRNALWEALQNSIALGPTRRRELSFEVGDYVYLKVSPIRGTKRFGVKGKLAPRYIGPYQIQARRGEVAYQLSLPENLSAVHDVFHVSQLKKCLRVPEEKLPTEDLEVQEDLTYIEKPTQILETANRVTRRNTIRMCKVKWGHHSEEATWEREDDLRAQYPELFASQP

SEQ ID NO: 10093 - protein, 991 aa, Zea mays
  Clone ID: TF_ZM4679.C4.o4.fg.pep
MHPKGKGMVINDKEKESFINEPKDDKPTDSGSSHKKKDGKKKRRIMKIVYYNSDESSSSQRDDDDEKKKMVNSNFSFYYSRIPQNSNAHLLSIPLGKPPHFDGEDYGFWSHKMCSHLFSLHPSIWEIVENGMQFDSTDNPMFINEHKNAQATTVLLASLCREEYHKVSGLDNAKKIWDTLKSSHEGNDVTMITKMEFVEGELGRFAMIRGEEPTQTYNRLKTLVNKIRSYGSTRWTDHDVVRLMLRSFTVLDPHLVNSIHENPRYTKMTPKEILRKFVSGRMMIKEARYVDEAFNGPMPIHEPQTIALKATSSREALPSKVAQVEAVRLNEEEMALIIKRFKTALKGRKEHPNKSKTKGKRSCFKCGKIGHFIANCPDNDSDQEQGKTGKRENKKVYKKAKGEAHLGKEWDSDCSSSDSDDEGLAATAFNKSSLFPNEHHTCLMAKEKKVSTRNTIAYASSSDGESSDDEVDYASLFKGLDRTKIDKINELIDALNEKNRLLEKQEDLLYEEHDKFVNVQKSLALEVKRNEMLSSELSTCHESISSLKSVNDDLNAKLEVANKSSSCIEHVVICNRCKDFNVDACVEHLTSIAKLNGEVASLNAQLKTSKNDFDKLKFARDAYTIGRHPSIKDGLGFKREAKNLTSQRAPIFNKEKGKAPMANSSQKNHAFIYDRKFSRNAYHNRSCNAYDSHAMIASSSSFVHGRDMPRRNVVNVPRKMHNENATDIHAYNSDFVLTCKNEKVVARKLGAKCKGDKACIWVPKAIVTNLVYASGGSSWIIDIGCTNHMTGEKKMFTSYVKNKDSQDSIIFGDGNQGKVKGLGKIAISSEHSISNVFLVESVGYNLLSVSQLCSMGYICLFNNVDVSVFRRCDGSLAFKGVLDGKLYLVDFSKEEAGLDACLIAKTSMGWLWHRRLAHVGMKNLHKLLKGEHVLGLKNVSFEKDRPCAACQAGKQVGSTHHSKNVMTTSRPLEMLHMDLFGPVAYLSIGGR

SEQ ID NO: 10094 - protein, 553 aa, Zea mays
  Clone ID: TF_ZM4681.C2.o6.fg.pep
MDPKGKGIVINDKEKESFINEPKDDKPTDSGSGHKRKDGKKKKTRRIKEIVYYDDNDESTSSQKDNDDNDYERRKPIHRNAQATTVLLASLCRDEYHKVSGLDNAKQIWDTLKISHEGNDVTLLTKMELVEGELGRFAMIRGEEPTQTYNRLKTLINKIRSYGSTRWTDHDIVRLMLRSFTVLDPHLVNNIRENPRYTKMSPEEVLGKFVSGRMMIKEARYVDDALNGPTHEPQPIALKATRSKETLPSKVAQVEAAGLNDEEMALIIKRFKTALKGRKGQPSKTKTKRKRSCFKCGKIGHFIANCPDNESDQEQGSKREKKKAYKKAKGEAHLGKEWDSDCSSSDSENEGLAATAFNKSSLFPNERHTCLMAKEKKVCTRDSTTYDSSSDDESSDEEIDYSSLFKGLDRTKVDKINELIDALNEKDRLLEKQEDLLYEEHDKFVEAQKSYALEVKRNEMLSYELSSYHETISSLRSMNDDLNAKLEIASKSNSCVEHVMICKRCKDFDIDACSEHLVSISKLNDEVASLSAQLKTSKNEFDKLKFARDAYTI

SEQ ID NO: 10095 - protein, 1650 aa, Zea mays
  Clone ID: TF_ZM4685.C2.o11.fg.pep
MDPKGKGMVVNDKEKESFVNDPKDDKPTDSGSGHKRKDGRKKKTRRIKEIVYYDSNESSSSQKDDDNDYKKKKTVNSNFSFDYSRIPQSSNAHLLSIPLGKPPHFDGEDYRFWSHKMRSHLFSLHPSIWEIVENGMHFDSTDSPMFINEQIHKNAQATTVLLASLCRDEYHKVSGLDNAKQIWDTLKISHEGNDVTMLTKMELVEGKLGRFAMIRGEEPTQMYNRLKTLVNKIRSYGSTRWTDHDVVRLMLRSFTVLDPHLVNNIRENPRYTKMTPEEILGKFVSGRMMIKEARYVDDALNGPIHEPQTVALKATRSKEALPSKVAQVEAAGLNDEEMTLIIKRFKTMLRGRKEHPNKTKTKAKRSCFKCGKIGHFIANCPDNDSDQEQGNKREKKKAYKKANGEAHLGKEWDSDCSSSDSDNEGLAATALQQVGPLPQRASHLPHGKGKEEHVVVCNRCKDFNVDACSKHLVSISKLNDEVASLNAQLKTSKSEFDKLKFARDAYTIGRHPSIKDGLGFKREVKNLTSHKASISAKEKGKAPMASSTQKNHAFMYHDRRHSRNAFRSYDAFDSHATIASSSSIMHDRNLARKNVVYHMPRRNIVHVPRKVMNEPSTIYYACNASFAICRKDKKIIDSGCTNHMTGEKRMFSSYVKNKDPQDSIIFGDGNQGKVKGLGKIAISSEHSISNVFLVESLGYNLLSVSQLCNMGYNYLFTNVDVSVFRRSDGSLAFKGVLDDKLYLVDFAKEEVGLDACLIAKTSMDWLWHRRLAHVGMKNLHKLLKGEHVIGLTNVTFEKVRPCAACQAGKQVGSSHHAKNVMTTSRPLELLHMDLFGPVAYLSIGGRTLKRFLSRAQNEFELKVKKIRSDNGSEFKNLQVEEYLEEEGIKHEFSAPYTPQQNGVVERKNRTLLDMARTMLGEFKTPERFWTEAVSTACHAINRVYLHRLLKKTSYELNCKCYILVKKGRNSKFAPKAVEGFLLGYDSNTKAYRVFNKSSGLVEVSRDIVFDETNGSPREQVVDLDDVDEEDVPMAAIRTMAIGDVRPQEQNEQDQPSSSTMVHPPTQDDEQVHQEEACDQGGAQDVHVIEEEAQPTPPTQVRATIQRNHPIDQILGDISKGVTTRSRLVNFCEHYSFVSSIEPFRVEEALLDPDWVLAMQEELYNFKRNEVWTLVPRPKQNVVGTKWVFRNKQDEHGMVTRNKARLVAKGYAQVAGLDFEETFAPVARLESIRILLAYAAHHSFRLFQMDVKSAFLNGPIKEEVYVEQPPGFKDERYPDHVCKLSKALYGLKQAPRAWYECLRDFLIANDFKVGKADPTLFTKTCNGDLFVCQIYVDVIIFGSTNQKSCEEFSRVMTQKFEMSMMGELSYFLGFQVKQLKDGTFISQTKYTQDLIKRFGMKDAKPAKTPMGTDGHTNLNKGGKSVDQKAYQSMIGSLLYLCASRLDIMLSVCMRARFQSDPRECHLVAVKRILRYLVATPCFGIWYPKGSTFNLIGYSDSDYAGCKVDRKSTSGTCQFLGRSLVSWSSKKQTSVALSTAEAEYVAAGQCCAQLLWIRQTLRDFGYNLSKVPLLCDNESVIHMADNPVEHSRTKHIDIRHHFLRDHQQKGDIEVFYVSTENQLADIFTKPLDESTFCRLRSELNVLDSRNLD

SEQ ID NO: 10096 - protein, 982 aa, Zea mays
  unsure (1)..(982): unsure at all Xaa locations
  Clone ID: TF_ZM4687.C1.o5.fg.pep
MDPKGMGMVVNDKEESFVNDPKDDKPTDSGSGHKRKDGRKKNIRRIKEIVYYDSDESSSSQKDDDNDYEKKKTVNSNFSFDYSRIPQSSNAHLLSIPLATTVLLASLCRDEYHKVSGLDNAKEIWDTLKISHEGNDVTMLTKMELVEGELGRFAMIRGEEPTQTYNRLKTLVNKIRSYGSTRWTDHDVVRLMLRYFTILDPHLVNNIRENPRYTKMTPEEILGKFVSERMMIKEARYVDDALNGPIHEPQTVALKAMRSKEVLPSKVAQVEAAGLNEEEKALIIKRFKTALRGRKEHPNKTKTKGKRSCFKCGKIGHFIANCPDNDSDQEQGNKREKKKAYKKAKGEAHLGKEWDSDCSSSDSDXNEGLAATAFNKSALFPNEHHTCLMAREKKXSRDDEIDYSCLFKGLDRTKVDKINELIDALNDKNRLLEKQEDLLYEEHDKFVEAQKSLALEIKRNEMLSYELSTCHDSISSLKSINDDLNAKLEIANKSTSCVEHVAICNRCKDFNIDACSEHLVSISNLNDEVASLNAQLKTSKSEFDKLKFARDAYTIGRHPSIKDGLGFKREVKNLTSHKASISIKEKGKAPMASSAQKNHAFMYHDKRHSRNVYRSYVAFDSHAMIASSSSIMHDRNLARKNAMPRRNVVHVPRKVNYESSTNFHTCNASFTICRKDKKVIARKLWERCKGDKTCIWVPKTIVTNLVGPNKSWLCNMGYNCLFTNVDVSVFRRSDGSLAFKGVLDGKLYLVDFAKEEAGLDACLIAKTSMGWLWHRRLAHVGMKNLHKLLKGEHVIGLTNVTFEKDRPCAACQAGKQVGSSHHTKNVMTTSRPLELLHMDLFGPVTYLSLGGSKYGLVIVDDFSHFTWVFFLQDKSETQGTLKRFLRRAQNEFELKVKKIRSDNGSEFKNLQVEEYLEEEGIKHEFSAPYTPQQNGVVERKNRTLIDMARTMLGAVTPQVLPWLEHTLVLRTVITCGRNLRRT

SEQ ID NO: 10097 - protein, 1661 aa, Zea mays
  Clone ID: TF_ZM4707.C2.o4.fg.pep
MDPKGKGMVVDNNEKESIFNEPKNDKSTDLGSSHKRKDGKKKKTRRIKEIVYYDSDESSSSQKDDDHNDYEKRKPVNSNFSFDYSRIPQSSNSHLLPIPLGKPPHFDGEDYGFWSHKMRTHLFSLHPSIWEIVESGMQFDSSDSPMFINEQIHKNAQATTVLLASLCRDEYNKVSGLDNAKQIWDTLKISHEGNDITMLTKMELVEGELGRFAMIRGEEPTQTYNRLKTLINKIRSYGSTRWTDHDVVRLLLRSFTILDPHLVNNIRENPRYTKMSPEEVLGKFVSGRMMIKEARYVDDALNGPINEPQPFALKATRSKEALPSKVAQIEAAGLNDEEMALIIKRFKTVLKGHKGQPSKTKTKGKRSCFKCGKIGHFIANCPDNDSDQEQGNKREKKKNYKKAKGEAHLGKEWDSDCSSSDSDNEGLAATAFNKSTLFPNERHTCLMAREKKVCTRNSTYASSSEDESSDEDEVDYSCLFKGLDRTKVDKINELIDALNEKNILLEKQEDLLYEEHDKFVEAQRSHALEVKRNEMLSCELSSCHDTIFKLRSINDDLNAKLEIASKSTSCIENVVTCTRCKDINIDAYSEHLACISKLNEEVASLNAQLKTSKSDFEKLKFARDAYTVGRHPSIKDGLGFKREAKNLTSHKAPISAKEKGKAPMASSIKRNHAFIYHDRRQTRNAYRSYNAYDDFNSHAMFASSSSFMHGRNMSKKNAMPRKNVTHAPRKVVNEPSTIYCALNASFAICRKDKKIVARKLGAKCKEDKTCIWVPKDICTNLVGPNMSWVYASGGSSWIIDSGCTNHMTGEKKMFTSYVKNKDSQDSIVFDDGNQGKDKSETQGTLKRFLRRAQNEFELKVKKIRSDNGSEFKNLQVEEFLEEEGIKHEFSAPYTPQQNGVVERKNRSLIDMARTMLGEFKTPECFWTEAVNTACHAINRVYLHRLLKKTSYELLTGNKPNVSYFRVFGSKCYILVKKGRNSKFAPKAVEGFLLGYDSNTKAYRVFNKSSGLVEVSSDVVFDETNGSPREQVVDCDDVDEEDVPTAAIRTMAIGDVRPQEHLEQAQPSSSTMVHPPTQDDEQVPQVEACDQGGAQDDHVMEEEAQPAPPTQVRAMIQRDHPVDQILGDISKGVTTRSRLVNFCEHYSFVSSIEPFRVEEALLDPDWVLAMQEELNNFKRNEVWTLVPRPKQNVVGTKWVFRNKQDEHGVVTRNKARLVAKGYAQVAGLDFEETFAPVARLESIRILLAYAAHHSFRLYQMDVKSAFLNGPIKEEVYVEQPPGFEDERYPDHVCKLSKALYGLKQAPRAWYECLRDFLIVNAFKVGKADPTLFTKTCDGDLFVCQIYVDDIIFGSTNQKSCEEFSRVMTQKFEMSMMGELKYFLGFQVKQLKDGTFISQMKYTQDLLKRFGMKDAKPAKTPMGTDGHTDLNKGGKSVDQKAYRSMIGSLLYLCASRPDIMLSVCMCARFQSDPKECHLVAVKRILRYLVATPCFGLWYPKGSTFDLVGYSDSDYAGCKVDRKSTSGTCQFLGRSLVSWNSKKQTSVALSTAEAEYVAAGQCCAQLLWMRQTLRDFGYNLSKVPLLCDNESAIRMAENPVEHSRTKHIDIRHHFLRDHQQKGDIEVFHVSTENQLADIFTKPLDEKTFCRLRSELNVLDSRNLD

SEQ ID NO: 10098 - protein, 284 aa, Zea mays
  unsure (1)..(284): unsure at all Xaa locations
  Clone ID: TF_ZM4711.C1.o5.fg.pep
MDPKGKGMVINDKEKESFINEPKDDKPTDSGSSHKKKDGKKKRHIKKIVYYDSDEEEYHKVGGLDNAKQIWDTLKISHEGNDATMITKMELVEGELGRXHQDDARGNTRKVXSERMMIKEARYVDEALNDPMPIHEPQTVALKATSSREGLPSKVAQVEAARLNEDEMALIIKRFKMALKGRKEHPNKSKTKGKRSCFKCGKIGHFIANCPDNDSDQEQGKNGKRENKKVYKKAKGEAHLGKEWDSDCSSSDSDDEGLAATAFNKSSLFPNEHHTCLMAKEKKI

SEQ ID NO: 10099 - protein, 1607 aa, Zea mays
  Clone ID: TF_ZM4714.C5.o4.fg.pep
MDPKGKGIVINDKEKEFFVNEPRDDKSNDSGSGHSRKDGKKKKTRRIKEIVYYDSDESTSSQKDDDHNEYERKKPVNSNFSFDYSRIPQSTNAHLLSIPLGKPPHFDGEDYGFWSHKMRSHLFSLHPSIWEIVESGMHFDSTDSPMFINEQIHKNAQATTVLLASLCRDEYHKVSGLDNAKQIWDTLKISHEGNDVTLLTKMELVEGELGRFAMIRGEEPTQTYNRLKTLINKIRSYGSTRWTDHDVVRLMLRSFTVLDPHLVNNIRENPRYTKMSPEEVLGKFVSGRMMIKEARYVDDALNDPIHESQPIALKATRSKEALPSKVAQVEAAGLNNEEMALIIKRFKTVLKGRKGQPSKTKTKEKRSCFKCGKIGHFIANCPDNESDQEKGNKREKKKHYKKAKGEAHIGKEWDSDCSSSDSDNEGLAATAFNKSSLFPNERHTCLMAREKKVSTHDTSTYASSSEDESSDDDEIDYSCLFKGLDRSKINKINELIDALNYKNRLLEEQEDLLYEEHDKFVSAQNSLALEIKRNEMLSSELSTCHESISKLKSVNDDLNAKLEIASKSTSCVEIVETCNRCKDFDIDACSEHLVSISKLNDELASLNAQLKTSKSNFDKLKFARDAYTIGRHPSIKDGLGYKKEAKNLTRHKAPISAKEKGKAPMASSVQKNHAFMYHDRRESRNAYRRCNAYDAFDSHDMFASSSSYVHDRNVGRRNVVHNMPRRNVVNVPRKVYASGGSSWIIDSGCTNHMTGEKKMFTSYVKNKDSQDSIIFGDGNQGKDKSETQGTLKRFLRRAQNEFELKVKKIRSDNGSEFKNLQVEEFLEEERIKHEFSAPYTPQQNGVVERKNRTLIDMARTMLGEFKTPERFWSEAVNTACHAINRVYLHRLLKKTSYELLTDNKPNVSYFRVFGSRCYILVKKGRNSKFAPKAVEGFLLGYDSNTKAYRVFNKSSGFVEVSSDVVFDETNGSPREQVVDCDDVDEEDVPTAAIRTMAIGEVRPQEQDERDQPSSSTTVHPPTQDDEQVHQKEACDQGGAQDDHVMEEEAQPAPPTQVRAVIQRDHPVDQILGDISKGVTTRSRLVNFCEHYSFVSSIEPFRVEEALLDPDWVLAMQEELNNFKRNEVWTLVPRPKQNVVGTKWVFRNKQDEHGVVTRNKARLVAKGYAQVAGLDFEETFAPVARLESIRILLAYAAHHSFRLYQMDVKSAFLNGPIKEEVYVEQPPGFEDERYPDHVCKLSKALYGLKQAPRAWYECLRDFLIANAFKVGKADPTLFTKTCDCDLFVCQIYADDIIFGSTNQKSCEEFSRVMMQKFEMSMMGELNYFLGFQVKQLKDGTFISQTKYTQDLLKRFGMKDAKPAKTPMGTDGHTDLNKGGKSVDQKAYRSMIGSLLYLCASRPDIMLSVCMCARFQSDPKECHLVAVKRILRYLVATPCFGLWYPKGSTFDLVGYSDSDYAGCKVDRKSTSRMCQFLGRSLVSWNSKKQTSVALSTAEAEYVAAGQCCAQLLWMRQTLRDFGYNLSKVPLLCDNESAIRMAENPVEHSRTKHIDIRHHFLRDHQQKGDIEVFHVSTENQLADIFTKPLDEKTFCRLRSELNVLDSRNLD

SEQ ID NO: 10100 - protein, 1658 aa, Zea mays
  unsure (1)..(1658): unsure at all Xaa locations
  Clone ID: TF_ZM4715.C2.o2.fg.pep
MDPKGKGMVVNDKEKESFVNDPKENKPTDSGSSRKRKDGRKKKTRRIKEIVYYDSDGSSSSQKDDDNDYEKKKTVNSNFSFDYSRIPQSTNAHLLSIPLDGVGGRRTREIRDDKRGGATQTYNRLKTLVNKIRSYGSTRWTDHDVVRLMLRSFIVLDPHLVNNIRENPRYTKMSPEEILGKFVSGRMMIKEARYVDDALNGPIHEPQTVALKATRSKEALPSKVAQIEAVGLNEEEMTLIIKRFKTALKGRKEHPNKNKTKGKRSCFKCGKIGHFIANCPDNDSDQEKKSGKWEKKNYKKAKGEAHLGKDEDESSDDDEIEYSCLFKGLDRTKIDKINELIDALNDKNRLLEKQENLLYEEHDKFVSAQNSLALEVKRNEMLSCELSTCHETISTLKGVNDDLNAKVEVANKSNSCVEHVMICNKCKDFNVDACSEHLVCISKLNDEVASLNAQLKTSKSEFDKLKFARDAYTIGRHPSIKDGIGFKREVKNLTSHKASISAKEKGKALMASSAQKNHAFMYHDRRHSRNVYRSYDAFDSHAMVASSSSIMHDRNLARKNAMPRKNIVHVPRKLMNEPSTIYYALNASFAICRKDKKVVARKLGAKCKGDKTCIWVPKAICTNLVGPNMSWVYASGGSSWIIDSGCTNHMTGEKRMFSSYVKNKDPQDSTIFGDGNQGKVKGLGKIAISSEHSISNVFLVESLGYNLLSVSQSCNMGYNCLFTNVDVSVFKRSDGSLAFKGVLDDKLYLVDFAKEEADLDACLIAKTSMGWLWHRRLAHVGMKNLHKLLKGEHVIGLTNVTFEKDRPCAACQAGKQVGSSHHAKNVMTTSRPLELLHMDLFGPVAYLSIGGSKYGLVIIDDLSRFTWVFFLQDKSETQATLKRFLRRAQNEFELKVKKIRSDNGSEFKNIQVEEYLEEEGIKHEFSAPYTPQQNGVVERKNRTLIDMARMMLGEFKTPERFWSEAVNTACHAINRVYLHRLLKKTSYELLTIFGSKCYILVKKGRNSKFAPKAVEGFLLGYDSNTKAYRVFNKSSGLVEVSSDVVFDETNGSPREQVVDLDDVDEEDVPTAAIRTMAIGDVRPQEQNARDQPSSSTMVHPPTQDDEQVHQEETCDQGGAQNDHVMEEEAQQAPPTQVRAVIQRDHPVDQILGDISKGVTTRSRLVNICEHYSFVSSIEPFRVEEALLDPDWVLAMQEELNNFKRNEVWTLVPRPKQNVVGTKWVFRNKQDEHGVVTRNKARLVAKGYAQVAGLDFEETFAPVARLESIRILLAYAAHHSFRLFQMDVKSAFLNGPIKEEVYVEQPPGFEDERYPGHECKLSKALYGLKQAPRAWYECLRDFLIANAFKVGKVDPTLFTKTCDGDLFACQIYVDDIIFGSTNQKSCEEFSRVMTQKFEMSMMGELSYFLGFQVKQLKDGTFISQMKYTQDLIKRFGMKDAKPAKTPMGTDGHTDLNKGGKSVDQKAYRSMIGSLLYLCASRPDIMLSVCMCARFQSDPRECHLVAVKRILRYLVATPCFGIWYPKGSTFDLIGYSDSDYVGCKVDRKSTSGTCQYLGRSLVSWSSKKQTSVALSTAETEYVAAGQCCAQLLWMRQTLRDFGYNLSKVPLLCDNESAIRIADNPVEHSRTKHIDIRHHFLRDHQQXGDIEVFHVSTENQL

SEQ ID NO: 10101 - protein, 1683 aa, Zea mays
  Clone ID: TF_ZM4783.C4.o4.fg.pep
MDPKGKGMVVNDNEKESIFNEPRDDKANDSGSSQNKKDGKKKRRIKKIVYYDSDESSSSQKDDEYEEKKKMVNSNFSFDYSRIPHNSNAHLLSIPLGKPPHFDGEDYGFWSHKMRSHLFSLHPSIWEIVENGMRFDSSDNSMFINEQIHKNAQATTVLLASLCREEYNKVSGLDNAKQIWDTLKISHEGNDATMLTKMELVEGELGRFAMMKGEEPTQTYNRLKTLVNKIRSYGSMRWTDHDVVRLMLRSFTVLDPHLVNYIRENPRYIKMTPEKILRKFVSGRMMIKEARYVDDALNGPMPIYEPQTVALKATSSRETLPSKVAQVEAAGLNEDEMALIIKRFKTALKGHREHPNKSKTKGKRSCFKCGKIGHFIANCPDNDSDQEQGKTGKWEKKKTYKKAKGEAHLGKEWDLDCSSSDSDNEGLTATAFNKSSLFPNEHHTYLMAKEKKVSTRSTHTYASSSDDEVDYASLFKGLDRTKIDKINELIDASNEKNRLLEKQEDLLYEEHDKFVSAQNSLALEVKRNEMLSCELSTCHESISSLKSINDDLNTKLEIANKSSSLVEHVVICNRCKDFNVDACSEHLISIFKLNDEVASLNAQLKTSKNDFDKLKFARDAYTIGRHPSIKDGLGFQRETKNLTGQRAPIFNKEKGKAPMASSNQKNHAFIYDRKFSRNVHHDRSCNAYNSNVMIASSSSFMHSRDMPRKNVIHHMPRRKVVNHMPRKVYNGVTTVFHACNTKFILSCKNEKVIAKKVGAKCKGDKTCIWVPKAIVTNLVGPNKSWIIDSGCTNHMTGEKKMFTSYVKNKDSQDSIIFGDGKQGKVKGLGKIAISSEHSISNVFLVESLGYNLLSISQLCNMGYNCLFTNVDVSVFRRSDGSLAFKGVLDDKLYLVDFAKEEAGLDACLIANTSMGWLWHRSLAHVGMKNLHKLLKGEHVLGLTNVTFEKDRPCAACQAGKQVGNAHHNKNVMTTSRPLELLHMDLFGPVAYLSIGGSKYGLVIVDDFSRFTWVFFLQDKSETQGTLKRFLRRAQNEFELKVKKIRSDNGSEFKNLQVEEYLEEEGIKHEFSAPYTPQQNGVVERKNRTLIDMARTMLGEFKTVERFWSEAVNTACHAINRVYLHLLLKKTSYELLTSNKPNVSYFRVFGSKCYILVKKGRNSKFAPKAVEGFLLGYDSNTKAYRVFNKSSSLVEVSSNIVFDEINGSPREQVDIDDVDEEDVPTAAIRTMAIGDVRPQEQKEQDQPSSSTMVHPPTQDDEQVHHEETVEEALLDPDWVLAMQEELNNFKRNEVWTLVPRPKQNVVGTKWVFRNKQDEHGVVTRNKARLVAKGYAQVAGLDFQETFAPVARLESICILLAYATHHSFRLFQMDVKSAFLNGPIKEEVYVEQPPGFEDERYPDHVCKLSKALYGLKQAPRAWYECLRDFLIANAFKVGKADPTLFTKTCDGDLFVCQIYVDDIIFGSTNQKSCEEFSRVMTQKFEMSMMGELNYFLGFQVKQLKDDTFISQTKYTQDLIKRFGMKDAKPAKTPMGTDGHVDLNKGGSTFDLIGYSDSDYAGCKVDRKSTSGTCQFLGRSLDSVARQLLWMRQTLRDFGYNLSKVPLLCDNESAIRMADNPVEHSRTKHIDIRHHFLRDHQQKGDIEVFYVSTENQLADIFTKPLDEKTFCRLRSELNVLDSQNLD

SEQ ID NO: 10102 - protein, 1662 aa, Zea mays
  Clone ID: TF_ZM4840.C3.o2.fg.pep
MDPKGKGIVINDKEKESFVNEPKEDKPTDSGSGHRRREGKKKKTRRIKEIVYYDDSDESSSSQKDDDHNDYEQRKPVNSNFSFDYSRIPQSSNSHLLSIPLGKPPHFDGEDYGFWSHKMRSHLFSLHPSIWEIVDSGMHFNSSDSPIFINEQIHKNAQATTVLLASLCRDEYNKVSGLDNAKQIWDTLKISHEGNDATLLTKMELVEGELGRFAMIRGEEPTQTYNRLKTLINKIRSYGSTRWTDHDVVRLMLRSFTVLDPHLVNNIRENPRYTKMSPEEVLGKFVSGRMMIKEARYVDDALNGPINEPQPFALKATRSKEALPSKVAQIEAVGLNDEEMALIIKRFKTVLKGHKGQPSKTKTKGKRSCFKCGKIGHFIANCPDNDSDQEKGNKREKKKHYKKAKGEAHLGKEWDSDCSSSDSDNEGLAATAFNKSTLFPNERHTCLMAREKKVCTRNSTYASSSEDESSDDDEVDYSCLFKGLDRSKIDKINELIDALNEKNILLEKQEDLLYEEHDKFVEAQKSLALEIKRNEMLACEVSTCHDSISNLKSINDDLNAKLVEANKSNSCVEYVEICTRCKDIDINACSEHLVSISKLNDELASLNAQLKTSKSNFDKLKFARDAYTVGRHPSIKDGLGFKREVKNLTSHKAPISAKEKGKAPMASSTKKNHAFLYHDRSAYRGYNAYDDCDAHSSSFMHGRNMSRKNAMPRKNVIHAPRKVVNEPSTIYCALNASFVICRKDKKIVARKLGAKCKGDKTCIWVPKDICTNLVGPNMSWVYASGGSSWIIDSGCTNHMTGEKKMFTSYVKNKDSQDSIIFGDGNQGKIDLVQLVKQDKSETQGTLKRFLRRAQNEFELKVKKIRSDNGSEFKNLQVEEFLEEEGIKHEFSAPYTPQQNGVVERKNRTLIDMARTMLGEFKTPEYFWTEAVNTACHAINRVYLHRLLKKTSYELLTGNKPNVSYFRVFGSKCYILVKKGRNSKFAPKAVEGFLLGYDSNTKAYRVFNKSSGLVEVSSDVVFDETNGSPREQVVDCDDVDEEDVPTAAIRTMAIGDVRPQEQDERDQPSSSTMVHPPTQYIEQVHQQEACDQGGAQDDHMMEEEAQPAPPTQVRAVIQRDHPVDQILGDISKGVTTRSRLVNFCEHYSFVSSIEPFRVEEALLDPDWVLAMQEELNNFKRNEVWTLVPRPKQNVVGTKWVFRNKQDEHGVVTRNKARLVAKGYAQVAGLDFEETFAPVARLESIRILLAYAAHHSFRLYQMDVKSAFLNGPIKEEVYVEQPPGFEDERYPDHVCKLSKALYGLKQAPRAWYECLRDFLIANAFKVGKADPTLFTKTCDGDLFVCQIYVDDIIFGSTNQKSCEEFSRVMTQKFEMSMMGELNYFLGFQVKQLKDGTFISQTKYTQDLLKRFGMKDAKPAKTPMGTDGHTDLNKGGKSVDQKAYRSMIGSLLYLCASRPDIMLSVCMCARFQSDPKECHLVAVKRILRYLVATPCFGLWYPKGSTFDLVGYSDSDYAGCKVDRKSTSGTCQFLGRSLVSWNSKKQTSVALSTAEAEYVAAGQCCAQLLWMRQTLRDFGYNLSKVPLLCDNESAIRMAENPVEHSRTKHIDIRHHFLRDHQQKGDIEVFHVSTENQLADIFTKPLDEKTFCKLRSELNVLDSRNLD

SEQ ID NO: 10103 - protein, 1624 aa, Zea mays
  unsure (1)..(1624): unsure at all Xaa locations
  Clone ID: TF_ZM4869.C1.o9.fg.pep
MDPKGKGIVINDKEKESFVNEPRDDKSNDSGSGHRRKDGKKKKTRRIKEIVYYDSDESTSSQKDDDHNEYEKKKPVNSNFSFDYSRIPQSTNAHLLSIPLGKPPHFDGEDYGFWSHKMRSHLFSLHPSIWEIVESGMHFDSTDSPMFINEQIHKNAQATTVLLASLCRDEYHKVSGLDNAKQIWDTLKISHEGNDVTLLTKMELVEGELGRFAMIRGEEPTQTYNRLKTLINKIRIYGSTRWTDHDVVRLMLRSFTVLDPHLVNNIRENPRYTKMSPEEVLGKFVSGRMMIKEARYVDDALNGPIHEPQPIALKATRSKEALPSKVAQVEAAGLNNEEMALIIKRFKTALKGRKGQPSKTKTKEKRSCFKCGKIGHFIANCPDNESDQEKGNKREKKKHYKKAKGEAHIGKEWDSDCSSSDSDNEGLAATAFNKSSLFPNERHTCLMAREKKEIDYSSLFKGLDRTKVEKINELIDALNEKDRLLEKQEDLLYEEHDKFVEAQKSYALEVKRNEVLSSELSSCHETIATLKGVNNDLNAKLEVASKSNSCVEHVMVCTRCKDFNVDACSEHLVSISKLNDEVASLNAQLKTSKSEFNKLKFARDAYTIGRHPSIKDGLGFKREAKNLTSHKAPIPAKEKGKAPMAGSAKKNHAFMYHDRRHTRNANRSYNVFDSYVYDSHDMFASSSFYVHDRNVGRRNVVHNMPRRNVVNVPRKVNEPSTIYHALNASFAICRKDRKVIARKLGAKCKGDKTCIWIPKEIVTNLVGPNKSWVYASGGSSWIIDSGCTNHMTGEKKMFTSYVKNKDSQDSIIFGDGNQGKVKGLDVSVFRRSDDSLAFKGVLDGKLYLVDFEKEEDKSETQGTLKRFLRRAQNEFELKVKKIRSDNGSEFKNLQVEEFLEEEGIKHEFSAPYTPQQNGVVERKNRTLIDMARTMLGEFKTPERFWSEAVNTACHTINRVYLHRLLKKTSYELLTGNKPNVSYFRVFGSKCYILVKKGRNSKFAPKAVEGFLLGYDSNTKAYRVFNKSSGLVEVSSDVVFDETNGSPREQVVDCDDVDEEDVPTAAIRTMAIGEVRPQEQDKRDHPSSSTTVPPPTQDDEQVHQQEACDQGGAQDDHVMEEEAQPAPPTQVRAMIQRNHPVDQILGDISKGVTTRSRLVNFCEHYSFVSSIEPFRVEEALLDPDWVVAMQEELNNFKRNEVWTLVPHPKQNVVGTKWVFRNKQDEHGVVTRNKARLVAKGYAQVTGLDFEETFAPVARLESIRILLAYAAHHSFRLYQMDVKSAFLNGPIKEEVYVEQPPGFEDERYPDHVCKLSKALYGLKQAPRAWYECLRDFLIVNAFKVGKADPTLFTKTCDGDLFVCQIYVDDIIFGSTNQKSCEEFSRVMTQKFEMSMMGELNYFLGFQVKQLKDGTFISQTKYTQDLLKRFGMKDAKPAKTPMGTDGHTDLNKGGKSVDQKAYRSMIGSLLYLCASRPDIMLSVCMCARFHSDPKECHLVAVKRILRYLVATPCFGIWYPKGSNFDLIGYSDSDYAGCKVDRKSTSGTCQLLGRSLVSWNSKKQTSVALSTAEAEYVAVGQCCAQLLWMRQTLRDFGYNLSKVPLLCDNESXIRMAENPVEHSRTKHI

SEQ ID NO: 10104 - protein, 1023 aa, Zea mays
  Clone ID: TF_ZM4878.C20.o2.fg.pep
MDPKGKGIVVNNEKESIFNEPKDDKPTDSGSSHKRKDGKKKKTRRIKEIVYYDSDESSSSQKDDDDYEKKKTVNSNFSFDYSRIPQSTNAHLLSVPLGKPPHFDGEDYGFWNHKMRSHLFSLHPSIWEIVESGMHFDSTESPMFINEQIHKNAQATTVLLASLCRDEYHKVSGLDNAKQIWDTLKISHEGNDVTLLTKMELVEGELGRFAMIRGEEPTQTYNRLKTLINKIRSYGSTRWTDHDVVRLMLRSFTVLDPHLVNNIRENPRYTKMSPEEVLGKFVSGRMMIKEARYVDDALNGPINEPQPVALKATRSKEALPSKVAQIEAARLNDEEMALIIKRFKTALKGRKGQPSKTKAKGKRSCFKCGKIGHFIANCPDNESDQEHGSKREKKKNYKKAKGETHLGKEWDSDCSSSDSDNEGLAATAFNKSSLFPNERHTCLMAREKKVCSRNSTYASSSEDESSDEDEIDYSCLFKGLDRTKVDKINELIDALNDKNRLLEKQEDLLYEEHDKCVEAQKSHALEVKRNEMLSCELSSCHETISSLRSINDDLNAKIEIASKSTTCVENVVICNRCKDFDIDACNEHIASIAKLNDEMASLNAQLKASKSDFDKLKFARDAYTIGRHPSIKDGLGFKREAKNLTSHKAPIFAKEKGKAPMASSTKKNHAFMYNDRRQSHRSCNTFDSHAYDSYAIKDRKIVARKLGAKCKGDKACIWVPKEIVTNLVGPNKSWVYASGGSSWIIDSGCTNHMTGEKEMFTSYVKNKDSQDSIIFGDGNQGKVKGLGKIAISNEHSISNVFLVESLGYNLLSVSQLCNMGYNCLFTNVDVSVFRRSDGSLAFKGVLDGKLYLVDFAKEEAGLDACLIAKTSMGWLWHRRLAHVGMKNLHKLLKGEHVIGLTNVQFEKDRPCAACQAGKQVGGAHHSKSVMTTSRPLELLHMDLFGPVTYLSIGGSKYGLVIVDDFSRFTWVFFLQDKSETQGTLKRFLKRAQNEFELKVKKIRSDNGSEFKNLQVEEFLEEEG

SEQ ID NO: 10105 - protein, 1602 aa, Zea mays
  Clone ID: TF_ZM4879.C3.o2.fg.pep
MDPKGKGMVVDNNEKESIFNEPKNDKSTDLGSSHKRKDGKKKKTRRIKEIVYYDSDESSSSQKDDDNDYRKTVNSNFSFDYSRMPHSSNSHLLSIPLGKPPHFDGEDYGFWSHKMRSHLFSLHPSIWEIVENGMKFDSSDSPMFINEQIHKNAQATTVLLASLCREEYNKVSGLDNAKQIWDTLKISHEGNDITMLTKMELVEGELGRFAMIRGEEPTQTYNRLKTLINKIRSYGSTRWTDQTYTKMSPEEVLGKFVSGRMMIKEARYVDDALNGPINEPQPLALKATRSKEALPSKVAQIEAAGLNDEEMALIIKRFKMVLKGHKGQPSKTKTKGKRSCFKCGKIGHFIANCPDNDSDQEQGNKREKKKNYKKTKGEAHLGKEWDSDCSSSDSDNEGLAATAFNKSTLFPNERHTCLMAREKKVCTRNSTYASSSEDESSDEDEVDYSCLFKGLDRTKVDKINELIDALNDKNMLLEKQEDLLYEEHDKFVEAQRSHALEVKRNEMLSCEISSCHETISKLRSINDDLNAKLEIASKSTTCVENVIMCTRCKDINLDAYSEHLACISKLNEEVASLNAQLKTSKSDFEKLKFARDAYTVGRHPSIKDGLGFKREAKNLTSHKAPIPAKEKGKAPMASSVQNNHAFIYHDRRQSRNAYRNCNAYDAINSHAMFASSSSYVHDRNVCRRNVVHNMPRRNGVNVPRKANEPSTIYHALNASFAICRKDRKIVARKLGARCKGDKTCIWVPKDICANLVGPNMSWVYASGGSSWIIDSGCTNHMTGEKKMFTSYVKNKDSQDSIIFGDGNQGKDKSETQGTLKRFLRRAQNEFELKVKKIRSDNGSEFKNLQVEEFLEEEGIKHEFSAPYTPQQNGVVERKNKTLIDMARTMLGEFKTPECFWTEAVNTACHAINRVYLHRLLKKTSYELLTGNKPNVSYFRVFGSKCYILVKKGRNSKFAPKAVEGFLLGYDSNTKAYRVFNKSSGLVEVSCDVVFDETNGSPREQVVDLDDVDEEDVPTAAIRTMTIGDVRPREQLEQDQPSSSTMVHPPTQDDEQVHQQEACDQGGAQDDHVMEEEAEPAPPTQVRAMIQRDHPVDLILGDISKGVTTRSRLVNFCEHYSFVSSIEPFRVEEALLDPDWVLAMQEELNNFKRNEWVFRNKQDEHGVVTRNKARLVAKGYAQVAGLDFEETFAPVARLESIRILLAYAAHHSFRLFQMDVKSAFLNGPIKEEVYVEQPPGFEDERYPDHVCKLSKALYGLKQAPRAWYECLRDFLIANAFKVGKVDPTLFTKTCDGDLFVCQIYVDDIIFGSTNKKSCEEFSRVMTQKFEMSMMGELNYFLGFQVKQLKDDTFISQTKYTQDLLKRFGMKDAKPAKTPMGTDGHTDLNKGGKSVDQKAYRSMIGSLLYLCASRPDIMLSVCMCARFQSDPKECHLVAVKRILRYLVATPCFGLWYPKGSTFDLIGYSDSDYAGCKVDRKSTSGTCQFLGRSLVSWNSKKQTSVALSTAEAEYVAAGQCCAQLLWMRQTLRDFGYNLSKVPLLCDNESAIRMAENPVEHSRTKHIDIRHHFLRDHQQKGDIEVFHVSTENQLADIFTKPLDEKM

SEQ ID NO: 10106 - protein, 1555 aa, Zea mays
  Clone ID: TF_ZM4879.C4.o2.fg.pep
MDPKGKGIVINDKEKESFVNEPKDDKPTDSGSGHRRKEGKKKKTRRIKEIVYYDDSDESTSSQKDDDNDYRKTVNSNFSFDYSRIPHSSNSHLLSIPLGKPPHFDGEDYGFWSHKMRSHLFSLHPSIWEIIENGMKFDSSDSPMLINEQIHRNAQATTVLLASLCREEYNKVSGLDNAKQIWDTLKISHEGNDVTMLTKMELVEGELGRFAMIRGEEPTQTYNRLKTLVNKIRSYGSTRWTDHDVVRLMLRSFTVLDPHLVNNIRENPRYTTMTPEEVLGKFVSRRMMIKEARYVDDALNGPIHEPQPIALKATRSKEALPSKVAQVEVAGLNNEEMALIIKRFKTALKGRKGQPSKTKTKEKRSCFKCGKIGHFIANCPDNESDQEKGNKREKKKHYKKAKGEAHIGKEWDSDCSSSDSDNEGLAATAFNKSSLFPNERHTCLMAREKKVSTHDTSTYASSKHVTICRRCKDFDVDACSDHLVSISKLNEELASLNAQLKTSKNEFDKLKFARDAYTIGRHPSIKDGLGYKREAKDLTSHKAPISAKEKGKAPMASSTKRNHAFMYHDKRQTRNAYRSYNAYDDFDSHAMFASSSSYMHGRNMSRRNAIHHVPRKNIIHAPRKVVNEPSTIYCALNASFAICRKDRKIVARKLGAKCKGDKTCIWVPKDICTNLVGPNKSWVYASGGSSWIIDSGCTNHMTGEKKMFTSYVKNKDSQDSIIFGDGNQGKDKSETQGTLKRFLRRAQNEFELKVKKIRSDNGSEFKNLQVEEFLEEEGIKHEFSAPYTPQQNGVVERKNRALIDMARTMLGEFKTPERFWSEAVNTACHAINRVYLHRLLKKTSYELLTGNKPNVSYFCVFGSKCYILVKKGRNSKFAPKAVEGFLLGYDSNTKAYRVFNKSSGLVEVSSDVVFDETNGSPREQVVDLDDVDEEDVPTAAIRTMAIGEVRPQEQDERDQPSSSTMVHPPTQDDEHVHQQEACDQGGAQDDHVMEEEAQPAPPTQVRAVIQRDHPVDQILGDISKGVTTRSRLVNFCEHYSFVSSIEPFRVEEALLDPDWVLAMQEELNNFKRNEVWTLVPRPKQNVVGTKWVFRNKQDEHGVVTRNKARLVAKGYAQVARLDFEEMFAPVARLESIRILLAYAAHHSFRLYQMDVKSAFLNGPIKEEVYVEQPPGFEDERYPDHVCKLSKALYGLKQAPRAWYECLRDFLIANAFKVGKADPTLFTKTCDGDLFVCQIYVDDIIFGSTNKKSCEEFSRVMTQKFEMSMMGELNYFLGFQVKQLKDGTFISQTKYTQDLLKWFGMKDTKPAKTPMGTDGHTDLNKGGKSVDQKAYRSMIGSLLYLCASRPDIMLSVCMCARFQSDPKECHSVAVKRILRYLVATPCFGLWYPKGSTFDLIGYSDSDYAGCKVDRKSTSGTCQFLGRSLVSWNSKKQTSVALSTAEAEYVVAGQCCAQLLWMRQTLRDFGYNLSKVPLLCDNESAIRMAENPVEHSRTKHIDIRHHFLRDHQQKGDIEVFHVSTENQLADIFTKPLDEKTFCRLRSELNVLDSRNLD

SEQ ID NO: 10107 - protein, 624 aa, Zea mays
  Clone ID: TF_ZM4884.C14.o1.fg.pep
MDPKGKGIVINDKEKESFVNEPKDDKSNDSGSGHKHKDGKKKKTRRIKEIVYYDSDESSSSQKDDDNDYRKTVNSNFSFDYSRIPHSSNSHLLSIPLGKPPHFDGEDYGFWSHKMRSHLFSLHPSIWEIVENGMKFDSSDSPMFINEQIHKNAQATTVLLASLCRDEYNKVSCLDNAKQIWDTLKISHEGNDITMLTKMELVEGELGRFAMIRGEEPTQTYNRLKTLINKIRSYGSTRWTDHDGVRLMLRSFTVLDPYLVNNIRENPRYTKMTPEEVLGKFVSGRMMIKEARYVDDALNGPINEHQPLALKATRSKEALPSKVAQIEAAGLNDEEMALIIKRFKTVLKGHKGQPSKTKTKGKRSCFKCGKIGHFIANCPDNDSDQEQGNKREKKKNYKKAKGEAHIGKEWDSDCSSDSDNEGLAATAFNKSSLFPNERHTCLMAREKKVSTRDSTYASSSDNESSDDDDIDYSCLFKGLDRSKIDKINELIDALNDKNVLLERQEDLLYEEHDKFVEAQKSLALEIKRNEMLSCELSTCHDSIASLKSINDDLNTKLEKSSKSTSCVEHVEICTRCKDFDVDACSDHLVSISKLTEELASLNAQLKTSKNEFDKLKFARDAYTI

SEQ ID NO: 10108 - protein, 1642 aa, Zea mays
  Clone ID: TF_ZM4892.C2.o7.fg.pep
MDPKGKGIVINDKEKESFVNEPRDDKSNNSGSGHKRKDGKKKKTRRIKEIVYYDSDESSSSQKDDDNDYRKTVNSNFSFDYSRIPHSSNSHLLSIPLGKPPHFDGEDYGFWSHKMRSHLFSLHPSIWEIVENGMKFDSSDSPMLINEQIHRNAQATTVLLASLCREEYNKVSGLDNAKQIWDTLKISHEGNDITMLTKMELVEGELGRFAMIRGEEPTQTYNRLKTLINKIRSYGSTRWTDHDVVRLMLRSFTVLDPHLVNNIRENPRYTMMTPEEVLGKFVSGRMMIKEARYVDDALNGPLHEPQPIALKATRNKESLPSKVAQVEAAGLNDEEMALIIKRFKTVLKGHKGQPSKNKTKGKRSCFKCGKIGHFIANCPDNDSDQEQGNKREKKKNYKKAKGEAHLGKEWDSDCSSSDSDNEGLAATAFNKSALFPNEHHTCLMAREKKTSKSDFEKLKFARDAYTVGRHPSIKDGLGFKREAKNLTSHKAPIPAKEKGKAPMASSAKRNHAFMYHDRRHARNACNDFDSYVYDSHAMFAPSSSYVYDRNVTRRNVVPKKNVIHAPRKVANEPSTIYYTCNAPFAICRKDKKVYASGGSSWIIDSGCTNHMTGEKKMFTSYVKNKDSQDSIIFGDGNQGKVKGLVESLGYNLLSVSQLCNMGYNCLFTNIDVSVFRRCDGSLAFKGVLDGKLYLVDFAKEEAGLDACLIAKTSMGWLWHRRLAHVGMKNLHKLLKGEHVIGLTNVQFEKDRPCAACQAGKQVGGSHHTKNVMTTSRPLEMLHMDLFGPVAYLSIGGSKYGLVIVDDFSRFTWVFFLQEKSETQGTLKRFLRRAQNEFELKVKKIRSDNGSEFKNLQVEEFLEEEGIKHEFSAPYTPQQNGVVERKNRTLIDMARTMLGEFKTPECFWTEAVNTACHAINRVYLHRILKNTSYELLTGNKPNVSYFRVFGSKCYILVKKGRNSKFAPKAVEGFLLGYDSNTKAYRVFNKSSGLVEVSGDVVFDETNGSPREQVVDCDDVDEEDIPTAAIRTMAIGEVRPQEQDEREQPSPSTMVHPPTQDDEQVHQQEVCDQGGAQDDHVLEEEAQPAPPTQVRAMIQRDHPVDQILGDISKGVTTRSRLVNFCEHYSFVSSIEPFRVEEALLDPDWVLAMQEELNNFKRNEVWTLVPRPKQNVVGTKWVFRNKQDERGVVTRNKARLVAKGYAQVAGLDFEETFAPVARLESIRILLAYAAHHSFRLYQMDVKSAFLNGPIKEEVYVEQPPGFEDERYPDHVCKLSKALYGLKQAPRAWYECLRDFLIANAFKVGKADPTLFTKTCDGDLFVCQIYVDDIIFGSTNQKSCEEFSRVMTQKFEMSMMGELNYFLGFQVKQLKDGTFISQTKYTQDLLKRFGMKDAKPAKTPMGTDGHTDLNKGGKSVDQKAYRSMIGSLLYLCASRPDIMLSVCMCARFQSDPKECHLVAVKRILRYLVATPCFGLWYPKGSTFDLVGYSDSDYAGCKVDRKSTSGTCQFLGRSLVSWNSKKQTSVALSTAEAEYVAAGQCCAQLLWMRQTLRDFGYNLSKVPLLCDNESAIRMAENPVEHSRTKHIDIRHHFLRDHQQKGDIEVFHVSTENQLADIFTKPLDEKTFCRLRSELNVLDSRNLD

SEQ ID NO: 10109 - protein, 666 aa, Zea mays
  Clone ID: TF_ZM4893.C6.o7.fg.pep
MDPKGKGIVINDKEKESFVNEPRDDKSNDSGSGHRRKDGKKKKTRRIKEIVYYDSDESTSSQKDDDHNEYERKKPVNSNFSFDYSRIPQSTNAHLLSIPLGKPPHFDGEDYGFWSHKMCSHLFSLHPSIWEIVESGMHFDSTDSPMFINEQIHKNAQATTVLLASLCRDEYHKVSGLDNAKQIWDTLKISHEGNDVTLLTKMELVEGELGRFAMIRGEEPTQTYNRLKTLINKIRSYGSTRWTDHDVVRLMLRSFTVLDPHLVNNIRENPRYTKMTPEEVLGKFVSGRMMIKEARYVDDALNGPIHEPQPIALKATRSKEALPSKVVQVEAAGLNNEEMALIIKRFKMALKGHKGQPSKTKTKGKRSCFKCGKIGHFIANCPDNDSDQEQGNKREKKKNYKKAKGEAHIGKEWDSDCSSSDSDNEGLAATAFNKSSLFPNERHTCLMAREKKVSTHDTSTYASSSEDESSAEDEVDYSCLFKGLDRTKVDKINELIDALNDKNMLLEKQEDLLYEEHDKFVEAQKSHALEVKRNEMLSCELSSCHETISKLRSINDDLNAKLEIASKSTSCVENVVTCTRCKDINIDAYSEHLACISKLNEEVASLSAQLETSKSDFEKLKFARDAYTVGRHPSIKDGLGFKREVKNLTSHKAPISAKEKGKAPMA

SEQ ID NO: 10110 - protein, 1656 aa, Zea mays
  unsure (1)..(1656): unsure at all Xaa locations
  Clone ID: TF_ZM4904.C1.o5.fg.pep
MDPKGKGIVINDKEESFINEPKDDKPTDSGSSHKKKDGKKKRRIKKIVYYDDSDKSSSSQKDNDDNDYEKKKTVNSNFSFDYSCIPHSSNAHLLSIPLGKPPHFDGEDYRFWSHKMRSHLFSLHPSIWEIVENGMQFDSTDSPLFINEQIHKNAQATTVLLASLCKDEYHKVSGLDNAKQIWDTLRISHEGNDVTMLTKMELVEGKLGRFAMIRGEEPTQTYNRLKTLVNKIRSYGSTRWTDHDVVRLMLRSFTVLDPHLVNNIRENPRYTKMSPEEILGKFVSGRMMIKEARYVDEALNGPIHEPQAIALKATNSKEALPSKVAQVEAAGLNEEEMALIIKRLKTTLKGRKEHPKKTKTKGKRSCFKCGKIGHFIANCPDNDSDQEQGKNGKRENKKVYKKAKGEAHLGKEWDSDCSSSDSDDEGLAATAFNKSSLFPNEHHTCLMAKEKKVSTRNAITYASSSDDESSDDEIDYASLFKGLDRTKIDKINELIDALNDKNRLLEKQEDLLYEEHDKFVEAQKSLALEVKRNEMLSCELSTCHETISSLKSVNDDLNAKLEVANRSNSCVEHVVICNRDAYTIGRHPSIKDGLGFKREAKNLTSHKAPISAKEKGKAPMTNSSQKNHAFIYGDKRYSRNAHRSCNAYDSNVMFASSSSIMHDRNFARKNVVHHMPRRNVVHVPRKVYASGGSSWIIESGCTNHMTGEKKMFTSYVKNKDSQDSIIFGDENQGKVKGLGKIAISSEHSISNVFLVESLGYNLLSISQLCNMGYNCLFTNVDVSVFRRSDGSLAFKGALDDKLYLVDFAKEEAGLDACLIAKTSMGWLWHRRLAHVGMKNLHKLLKGEHVIGLTNVTFEKDRPCAACQAGKQVGSSHHTKNVMTTSRPLELFHMDLFGPVAYLSIRGSKYGLVIVDDFSRFTWVFFLQDKTETQGTLKRFLRRAQNEFELKVKKIRSDNGSEFKNLQVEEYLEEEGIKHEFSAPYTPQQNGVVERKNRMLIDMARTMLGEFKTPERFWSEAVNTACHAINRVYLHHLLKKTSYELLTGNKPNVSYFRVFGSKCYTLVKKGRNSKFAPKAVEGFLLGYDSNTKAYRVFNKSSGLVEVSSDVVFDETNGSPREQVELDDVDEDDVPMDAIRTMAIGDVRPQEHKEQDQPSSSTTVHPPTQDDEQVPQEEACDQGGTQDVQVEEEEAPQAPPTQVRAMIRRNHPVDQILGDIIKGVTTCSRLVNFCEHYSFVSSIEPFRVEEALLDPDWVLAMQEELNNFKRNEVWTLVPRPKQNIVGTKWVFRNKQDEHGVVTRNKARLVAKGYAQVTGLDFEETFAPMARLESIRILLAYAAHHSFRLYQMDVKSAFLNGPIKEEVYVEQPPGFEDERYPDHVCKLSKALYGLKQAPRAWYECLRDFLIANAFKVGKADPTLFTKTCDGDLFVCQIYVDDIIFGSTNQKSCEEFSRVMTQKFEMSMMGELNYFLGFQVKQLKDGTFISQTKYTQDLIKRFGMKDAKPAKTPMGTDGHVDLNKGGKFVDQKVYRSMIGSLLYLCASRPDIMLSVCMCSRFQSDPRECHLVAVKRILRYLVATPCFGIWYPKGSTFDLIGYSDSDYAGCKVDRKSTSGTCQFLGRSLVSWSSKKQTFVALSTAEAEYVAAGQCCAQXLWM

SEQ ID NO: 10111 - protein, 1773 aa, Zea mays
  Clone ID: TF_ZM4904.C1.o7.fg.pep
MVINDNEKSIFNEPRDDKANDSGSSQKKKDGKKKRRIKKIVYYDSDESSSSQKDDEYEEKKKTVNSNFSFDYSRIPQNSNTHLLSIPLGKPPHFDGEDYGFWSHKMCSHLFSLHPSIWEIVENGMQFDSSDNSMFINEQIHKNAQATTVLLASLCRDEYHKVSGLDNAKQIWDTLKISHEGNDVTMLTKMELVEGKLGRFAMIRGEEPTQTYNRLKTLVNKKRSYGSTRWTDHDVVRLMLRSFTILDPHLVNSIRENPRYTKMTPEEILGKFVSGRMMIKEARYIDEVLNGPIHEPQTVSLKATSSREALPSKVAQVEAVGLNEDEMALIIKRFKTALKGRKEHPNKSKTKGKRSCFKCGKIGHFIANCPDNDSDQEQGKSGKWEKKKAYKNAKGEAHLGIEWDSDCSSSDSDNEGLAASAFNKSALFPNEHHTCLMAKEKKVSTRSTIMYASSSDDESSDDEVDYASLFKGLDKTKIDKINELIDALNEKNRLLEKQEDLLYEEHDKFVSAQNSLALEVKRNEMLSCELSTCHESISSLKSINNDLNTKLEIANKSISCVDHVVICNRCKDFNVDACSEHLISISKLNDEVAILNAQLKTSKNEFDKLKFARDAYTIGRHPSIKDGLGFRREAKNLTSHKAPIFNKEKGKAPMTSNSQKNHAFMYHDRKFSRNVHHDRSCNVYDSNAMIASSSSFVHGRDMPRKNVTHHMPRTNVVNHMPRKVYNRLTTVFHACNTKFVLSCRNEKVIAKNVGAKCKGDKTCIWVPKAIVTNLVGPNKSWVYASGGSSWIIDSGCTNHMTGEKKMFTSYVKNKDSQDSIIFGDGNQGKVKGLGKIAISSEHSISNVFLVESLGYNLLSVSQLCNMGYNCLFTNVDVSVFRRSDGSLAFKGVLDDKLYLVDFAKEEAGLDACLIAKTSMGWLWHRRLAHVGMKNLHKLLKGEHVLGLKNDKSETQGTLKRFLRRAQNEFELKVKKIRSDNGSEFKNLQVEEYLEEEGIKHEFSAPYTPQQNGVVERKNRTLIDMARTMLGEFKTPERFWSEAVNTACHAINRVYLHRLLKKTSYELLTGNKPNVSYFRVFGSKCYILVKKGRNSKFAPKAVEGFLLGYDSNTKAYRVFNKSSGLVEVSSDVVFDETNGSPREQVDPNDVDEYDVPTDVIHTMAIGDVRPQEHQEQDQPSSSTMVHPPIQDDEQVHQEEACDQGGAQDDHVIEEEAPQAPPTQVRATIQRKHPVDQILGDISKGVTTRSRLVNFCEHYSFVSSIEPFRVEEALLDPDWVLAMQEELNNFKRSEVWTLVPRPKQNVVGTKWVFRNKQDEHGVVTRNKARLVAKGYAQVAGLDFEEIFAPVARLESIRILLAYAAHHSFRLFQMDVKSAFLNGPIKEEVYVEQPPGFEDERYPDHVCKLSKALYGLKQAPRAWYECLRDFLIVNAFKVGKADPTLFTKTCDGDLFVCQIYVDDIIFGSTNQKSCEEFSRVMTQKFEMSMMGELNYFLGFQVKQLKDGTFISQTKYTQDLIKRFGMKDAKPAKTPMGTDGHVDLNKGGKSVDKKACRSMIGSLLYLCASRPDIMLSVCMCARFQSNPRECHLVAIKRILRYLVATPCFEIWYPKGSTFDLIGYSDSDYAGCKVERKSTSGTCQFLGRSLVSWSSKKQTSVALSTAEAEYVAAGQCCAQLLWMRQTLRDFGYNLSKVPLLCDNESAIRMADNPVEHSRTKHIDIRHHFLRDHQQKGDIEVFYVSTENQLVDIFTKPLDESTFCRLRSELNVLDSRNLD

SEQ ID NO: 10112 - protein, 1331 aa, Zea mays
  Clone ID: TF_ZM4940.C1.o6.fg.pep
MNPLLPKKDDGNVYENKKTVNSNFSFDYSHIPQSTNAHLLSIPLGKPPHFDGEDYRFWSHKMSSHLFSLHPSIWEIVESEMKFDSSDSPLFINEQIHKNAQATTVLLASLCRDEYHKVSGLDNAKQIWDTLKILHEGNDVTMLTKMELVEGELGRFAMIRGEEPTQTYNRLKTLVNKIRSYGSTRWTDHDVVRLMLRSFTVLDPHLVNNIRENPRYTKMTPEEILGKFVSGRMMIKEARYVDDALNGPIQEPQTIALKATRSKEALPSKVAQVEAAGLNDEEMALIIKRFKMALKGRKEHPNKNKTKGKRSCFKCGKIGHFIANCPDNDSDQEKKSGKWEKMKNYKKAKGEAHLGNEWDSDCSSSDSDNEGLAATAFNKSSLFPNEYHTCLMAREKKVNTRNTSTYASSSEDESSDDDEIDYSCLFKGLDRTKVDKINELIDALNDKNRLLEKQEDLLYEEHDKFVSAQNSLALEVKRNEMLSCELSTCHETISTLKDVNDDLNAKLEVANKSNSCVEHVMICNRCKDVDVDACSEHLICISKLNDEVASLNAQLKTSKSEFEKLKFARDAYTIGRHPSIKDGLGIKKEVKNLTSHKAPISAKEKGKAPMARSAQKNHAFMYHDRRHSRNVYRSYDAFDSHAMVASSSSIVHDRNLARRNAINHMPRRNVVHVPRKTNSEPSTIYHALNASFAICRKDRKIITRKLGAKCKGDKTCIWVPKTICTNLVGPNMSWYLRPKPKFALQVYASGGSSWIIDSGCTNHMTGEKRMFSSYVKNKDPQDSIIFGDGNQGKIKGLGKIAISNEHSISNVFLVESLGYNLLSVSQLCNMGYNCLFTNVDVSVFRRSDGSLAFKGVLDDKLYLVDFAKEEAGLDACLIAKTSMGWLWHRRLAHVGMKNLHKLLKGEHVIGLTNVTFEKDRPCAACQAGKQVGSTHHAKNVMTTSRPLELLHMDLFGPVAYLSIGGSKYGLVIVDDFSRFTWVFFLQDKSETQGTLKRFLRRAQNEFEIKVKKIRNDNGSEFKNLQVEEYLEEEGIKHKFSAPYTPQQNGVVERKNRTLIDMARTMLGEFKTPERFWSEAVNTACHAINRVYLHRLLKKTSYELLTGNKPNVSYFRVFGSKCYILVKKGRNSKFAPKAVEGFLLGYVSNTKAYRVFNKSSGLVEVSSDVVFDETNGSPREQVVDLDDVDEEDVLMAAMRTMVIGDVRPMEQKEQDQPSSSTMVHPPTQEDEQVHQEEAWDQGGAQDDQVMEEEAQPAPPTQVRAMIQRDHLVDQILGDISKGVTTRSRLVNFCEHYSFVSSIEPFRVEEALLDPDWVLAMQEELNNFKRNEV

SEQ ID NO: 10113 - protein, 1583 aa, Zea mays
  Clone ID: TF_ZM4940.C2.o17.fg.pep
MDPKGKGIVINDKEKESFVNKPKDDKPTDSGSGHKRRDGKKKKTRRIKEIVYYDDSDESTSSQKDNDDNDYDKRKTVNSNFSFDYSRIPQSTITHLLSIPLGKPPHFDGEDYGFWSHKMCSHLFSLHPSIWEIVESGMKFDSNDSPMFINEQIHKNAQATTVLLASLCRDEYHKVSGLDNAKQIWDTLKISHEGNDVTMLTKMELVEGELRRFAMISGEEPTQTYNRLKTLINKIRSYGSTRWMDHDVVRLMLRSFTVLDPHLVNNIRENPRYTKMTPEEILGKFVSGRMMIKEARYVDDTLNGPIHEPQPIALKATRSKEALPSKVAQVEAAGLNDEEVALIIKRFKTTLKVRKEHPNKNKTKGKRSCFKCGKIGHFIANCPDNDSDQEKKSGKWEKKKNYKKAKGEAHLGKEWDSDCSSSDSDNEGLAATAFNKSSLFPNEHHRCLMAKEKKVCTRNNTTYASSSEDESSDDDEIDYSCLFKGLDRTKIDKINELIDALNDKNRLLEKQEDLLYEEHDKFVGAQKSHALEVKRNEMLACELSTCHETISSLRSINDDLKAKSEIASKSTSCVENVVTCNRCKDFDIDACSKHLASMSKLNDEVASLNAQLKTSKSEFDKHPSIKDGLGFKREAKNLTSHKAPISAKEKGKAPMAISAKKNHAFMYHDRRYSRNAYRSYDTYDSYAMTASSSHVVHDRDIPRRNVVPRKINEPSTIYHACNDSFAICRKDKKVYASGGSSWIIDSGCTNHMTGEKKMFTSYVKNKGPQDSIIFGDGNQGKVKGLVKIAISNEHSISNVFLVDSLGYNLLSVSQLCNMGYNCLFTNVDVSVFRRSDGSLAFKGVLDGKLYLVDFAKEEVGLDACLIAKTSMGWLWHRRLAHVGMKNLHKLLKGEHVIGLTNVTFEKDRPCAACQAGKQVGSSHHAKNVMTTSRPLELLHMDLFGPVAYLSIGGSKYGLVIVDDFSRFTWVFFLQDKSETQGTLKRFLRRAQNEFELKVKKIRSDNGSEFKNLQVEEYLEEEGIKHEFSAPYTPQQNGVVERKNRTLIDMARTMLGEFKTPERFWSEAVNTACHAINRVYLHRLLKKTSYELLTGNKPNVSYFRVFGSKCYILVKKGRNSKFAPKAVEGFLLGYDSNTKAYRVFNKSSGLVEVSSDVVFDETNGSPREQVVDFDDVDEEEVPTAAIRTMAIGDVQPQEQDERDQPSSSTKVQPPTQDDEQEACDQGGAQDDHVMEEEAQPAPSTQVRAMIQRDHPVDQILGDISKGVTTRSRLVNFCEHYSFVSSIEPFRVEEALLEPDWVLVMQEELNNFKRNEVWTLVPRPKQNVVGTKLFQMDVKSAFLNGPIKEEVYVEQPPSFEDERYPDHVCKLSKALYGLKQAPRAWVMTQKFEISMMGELSYFLGFQVKQLKDGTFISQTKYTQDLIKRFGMKDAKPAKTPMGTDRHTDLNKGGKSVDQKAYQSMIGSLLYLCASRPDIMLSVCMCARFQSDPKECHLVAVKRILRYLVATPCFGIWYPKGSTFDLIGYSDSDYAGCKVDRKSTSGTCQFLGRSLVSWSSKKQTSVALSTAEAEYVAAGQCCAQLL

SEQ ID NO: 10114 - protein, 1600 aa, Zea mays
  Clone ID: TF_ZM4944.C4.o5.fg.pep
MDPKGKGIVINDKEKESFVNEPKDDKSNDSGSGHRRKDGKKKKTRRIKEIVYYDSDESTSSHKDDDNDYRKTVNSNFSFDYSRIPHSSNSHLLSIPLGKPPHFDGEDYGFWSHKMRSHLFSLHPSIWEIVESGMKFDSSDSPMFINEQIHKNAQATTVLLASLCRDEYNKVSGLDNAKQIWDTLKISHEGNDITMLTKMELVEGELGRFAMIRGEEPTQTYNRLKTLINKIRSYGSTRWTDHDVVRLLLRSFTILDPHLVNNIRENPRYTKMSPEEVLGKFVSGRMMIKEARYVDDALNGPINEPQPLALKATRSKEALPSKVAQIEAAGLNDEEMALIIKRFKTVLKGHKGQPSKTKTKGKRSCFKCGKIGHFIANCPDNDIDQEQGNKREKKKNYKKAKGEAHIGKEWDSDCSSDSDNEGLAATAFNKSSLFPNERHTCLMAREKKVSTRDSTYASSSDNESSDDDDIDYSYLFKGLDRSKIDKINELIDALNDMNRLLEKQEDLLYDEHDKFVEAQKSYALEVKRNEVLSSELSSCHENIATLKSVNDDLNAKLEKSSKLTSCVEHVVICTRSKDFNVDACSEHLECISKLNDEVASLNAQLKTSKSDLDKLKFARDAYTIGRHPSIKDGLGFKREVKNLTSHKAPISAKEKGKAPMATSVKKNHAFLYHDRKNSRNAFRRYDAFDSHAYDSYAMTASSSHVVHDRKVGRRNVVHNMPRRNVVNIPRKVNEPSTIYHALNASFAIYKNDRKVYASGGSSWIIDSGCTNHMTGEKKMFTSYVKNKDSQDSIIFGDGNQGKDKSETQGTLKRFLRRAQNEFELKVKKIRSDNGSEFKNLQVEEFLEEEGIKHEFSAPYTPQQNGVVERKNRTLIDMARTMLGEFKTPERFWSEAVNTACHAINRVYLHRLLKKTSYELLTGNKPNVSYFRVFGSKCYILVKKGRNSKFAPKAVEGFLLGYDSNTKAYRVFNKSSGLVEVSSDVVFDETNGSPREQVVDCDDVDEEDVPTVAIRTMAIGEVHQQEACDQGGAQDDRVMEEDAQPAPPTQVRAMIQRDHPVDQILGDISKGVTTRSRLVNFCEHYSFVSSIEPFRVEEALLDPDWVLAMQEELNNFKRNEVWTLVPRPKQNVVGTKWVFRNKQDEHGVVTRNMARLVAKGYAQVAGLDFEETFAPVARLESIRILLAYAAHHSFRLFQMDVKSAFLNGPIKEEVYVEQPPGFEDERYPNHVCKLSKALYGLKQAPRAWYECLRDFLIANAFKVGKADPTLFTKTCDGDLFVCQIYVDDIIFGSTNQKSCEEFSRVMTQKFEMSMMGELNYFLGFQVKQLKDGTFISQTKYTQDLLKRFGMKDAKPPKTPMGTDGHTDLNKGGKSVDQKAYRSMIGSLLYLCASRPDIMLSVCMCARFQSNPKECHLVAVKRILRYLVATPCFGLWYPKGSTFDLVGYSDSDYAGCKVDRKSTSGTCQFLGRSLVSWNSKKQTSVALSTAEAEYVAAGQCCAQLLWMRQTLRDFGYNLSKVPLLCDNESAIRMAENPVERSRTKHIDIRHHFLRDHQQKGDIEVFHVSTENQLADIFTKPLDEKTFCRLHSELNVLDSRNLD

SEQ ID NO: 10115 - protein, 1446 aa, Zea mays
  Clone ID: TF_ZM4951.C1.o4.fg.pep
MDPKGKGIVINDKEKESFVNEPKDDKSNDSGSGHRRKDGKKKKTRRIKEIVYYDSDESSSSQKDDDNDYRKTVNSNFSFDYSRIPHSSNSHLLSIPLGKPPHFDGEDYGFWSHKMRSHLFSLHPSIWEIVENGMKFDSSDSPMFINEQIHKNAQATTVLLASLCRDEYNKVSGLDNAKQIWETLKISHEGNDITMLTKMELVEGELGRFAMIRGEEPSQTYNRLKTLINKIRSYGSTRWTDHDVVRLLLRSFTVLDPHLVNNIRENPRYTKMTPEEVLGKFVSGRMMIKEARYVDDALNGPINEHQPLALKATRSKEVLPSKVAQIEAAGLNDEEMALIIKRFKTVLKGHKGQPSKTKTKGKRSCFKCGKIGHFIANCPDNDSDQEQGNKREKKKNYKKAKGEAHIGKEWDSDCSSDSDNEGLAATAFNKSSLFPNEHHTCLMAREKKVSTRDSTYASSSDNESSDDDDIDYSCLFKGLDRSKIDKINELIDALNDKNVLLKKQEDLLYEEHDKFVEAQKSLALEINRNKMLSCELSTCHDSIASLKSINDDLNAKLEKSGKTTSCVEHVEICTRCKDFDVDACSDHLASISKLTEELASLNAQLKTSKNDFDKLKFARDAYTIGRHPSIKVYASGGSSWIIDSGCTNHMTGEKKMFTSYVKNKDSQDSIIFGDGNQGKDKSETQGTLKRFLRRAQNEFELKVKKIRSDNGSEFKNLQVEEFLEEEGIKHEFSAPYTPQQNGVVERKNRTLIDMARTMLGEFKTPERFWSEAVNTTCHAINRVYLHRLLKKTSYELLTGNKPNVSYFRVFGSKCYILVKKGRNSKFAPKAVEGFLLGYDSNTKAYRVFNKSSGLVEVSSDVVFDETNGSPREKVVDCDDVDEEDVPTAAIRTMAIGEVRPQEQDERHQPSSSTMVLPPTQDDEQVHQQEAYDQGGAQDDHVMEEDAQPAPPTQVRAMIQRDHLVDQILGDISKGVTTRSRLVNFCEHYSFVSSIEPFRVEEALLDPDWVLAMQEELNNFKRNEVWTLVPRPKQNVVGTKWVFRNKQDEHGVVTRNKARLVAKGYAQVAGLDFEETFAPVARLESIRILLAYAAHHSFRLFQMDVKSAFLNGPIKEEVYVEQPPGFKDERYPNHVCKLSKALYGLKQAPRAWYECLRDFLIANAFKVGKADPTLFTKTCNGDLFVCQIYVDEIIFGSTNQKSCEEFSRVMTQKFEMSMMGELNYFLGFQVKQLKDGTFISQTKYTQDLLKRFGMKDAKPAKTPMGTDGYTDLNKGDSDYAGCKVDRKSTSGTCQFLGRSLVSWNSKKQTSVALSTAEAEYVAAGQCCAQLLWMRQTLRDFGYNLSKIPLLCDNESAIRMAENPVEHNRTKHIDIRHHFLRDHQQKGDIEVFHVSTKNQLADIFTKPLDEKTFCRLRSSFCILLLIVVLKLYKHSLDLTSPLQSDAHV

SEQ ID NO: 10116 - protein, 1191 aa, Zea mays
  Clone ID: TF_ZM4959.C2.o4.fg.pep
MDPKGKGMVVNNKEKESFVNDPKDDKPTDSGSSHKRKDRKKKKTRRIKEIVYYDDSDESSSSQKDDDNYEKKKTVNSNFSFDYSRIPQNTNAHLLSIPLGKPPHFDGEDYGFWSHKMRSHLFSLHPSIWEIVESGMQFDSSDSPMFINEKIHKNAQATTVLLASLCRDEYHKVSGLDNAKQIWDTLKISHEGNDVTMLTKMELVEGELGRFAMIRGEEPTQTYNRLKTLVNKIRSYGSTRWTDHDVVRLMLRSFTVLDPHLVNNIHENPRYTKMTPEEILGKFVSGRMMIKEARYVDDALNGPIQEPQTIALKATRSKEAIPSKVAQIEAVGLNDEEIALIIKRFKTALSGRKEHPNKTKTKGKRSCFKCGKIGHFIANCPDNDSDQEKGNKREKKKAYKKAKGEAHLGKEWDSDCSSSDSDNEGLAATAFNKSSLFPNEHHTCLMAREKKVSTHNTSTYASSSDEESSDDEIDYSCLFKGLDRTKVDKINELIDALNDKNRLLEKQEDLLYEEHDKYVEAQKSLALEIKRNEMLSCELSTCHDSISSLKSINDDLNAKLEIANKSTSCVEHVAICNRCKDFKVDACSEHLVSISKLNDEVASLNAQLKTSKNDFDKLKFARDAYTVGRHPSIKNGLGFKREAKNLTSHKAPISIKEKGKAPMANSVQKNHAFLYHDRRYSRNVHHDRSCNDIVSHAYDSNAMFASSSSMMYDRSLARKNVIHHVPRRNTHMPRKTSNEPSTIYHALNASFAICRKDKKIVARKLGAKCKGDKTFIWVPKAICTNLVGPNKSWVYASGGSSWIIDSGCTNHMTGEKRMFSSYVKNKDPQDSIIFGDGNQGKVKGLGKIAISSEHSISNVFLVESLGYNLLSDKSETQGTLKRFLRRAQNEFELKVKKIRSDNGSEFKNLQVEEYLEEEGIKHEFSAPYTPQQNGVVERKNRMLIDMARTMLGEFKTPERFWSEAVNTACHAINRVYLHRLLKKTSYELLTGNKPNVSYFRVFGSKCYILVKKGRNSKFAPKAVEGFLLGYDSNTKAYRVFNKSSGLVEVSSDVVFDETNGSPREQVVDLDDVDEEDVPTAAIRTMVIGDVRPQELKEQDQPSSSTMVHPPTQDDEQVHQEEACDQGGAQDDHVMEEEAQPAPTTQVRATIQRNHPVDQILGDISKGVTTRSRLVNFCEHYSFVSLRAPRGG

SEQ ID NO: 10117 - protein, 277 aa, Zea mays
  Clone ID: TF_ZM4959.C3.o1.fg.pep
MALIIKRFKTALKGRKEHPNKNKTKGKRSCFKCGKIGHFIANCPDNDSDQEKKSGKWEKKKNYKKAKGEAHLGKEWDSDCSSSDSDNEGLAATAFNKSSLFPNEHHTCLMAKEKKGLDKTKIDKINELIDALNDKNRLLEKQDDLLYEEHDKFVSAQNSLALEVKRNEMLSCELSTCHETISTLKGVNDDLNAKLEVANKSNSCVEHVMICNRCKDFNVDACSEHLVCISKLNDEVASLNAQLKTSKSEFDKLKFARDAYTIGRHPSIKDGLGFKRE

SEQ ID NO: 10118 - protein, 726 aa, Zea mays
  Clone ID: TF_ZM4983.C4.o2.fg.pep
MDPKGKGIVINDKEKESFVNEPRDDKSNDSGSGHRRKDGKKKKTRRIKEIVYYDSDESTSSQKDDDHNDYERKKPVNSNFSFDYSRIPQTSLCRDEYHKVSGLDNAKQIWDTLKISHEGNDVTLLTKMELVEGELGRFAMIRGEEPTQTYNRLKTLINKIRSYGSTRWMDHDVVRLMLRSFTVLDPHLVNNIRENPRYTKMSPEEVLGKFVSGRMMIKEARYVDDALNGPIHEPQPIALKATRSKEALPSKVAQVEAARLNNEEMALIIKRFKMALKGRKGQPSKTKTKEKRSCFKCGKIGHFIANCPDNESDQEKGNKREKKKHYKKAKGEAHIGKEWDSDCSSSDSDNEGLAATAFNKSSLFPNEHHTCLMAREKKVYASGGSSWIIDSGCTNHMTREKKMFTSYVKNKDSQDSIIFGDGNQGKDKSETQGTLKRFLRRAQNEFELKVKKIRSDNGSEFKNLQVEEFLEEEGIKHEFSAPYTPQQNGVMKKMFRRPLYEPWRLEKCDHRNKMNEINLLPQQRCIPHLKMMNRVEEALLDPDWVLAMQEELNNFKRNEVWTLVPRPKQNVVGTKWVFRNKQDEHGVVTRNKARLVAKGYAQVAGLYQMDVKSAFLNGPIKEEVYVEQPPGFEDERYPDHSCEEFSRVMTQKFEMSMMGELNYFLGFQVKQLKDGTFISQTKYTQDLLKRFGMKDAKPAKTPMGTDGHTDLNKGDFGEAMGLKGQD

SEQ ID NO: 10119 - protein, 1423 aa, Zea mays
  unsure (1)..(1423): unsure at all Xaa locations
  Clone ID: TF_ZM4988.C5.o3.fg.pep
MDPKGKGMMVNDKEKESFVNDPKDDKPTDSGSGHKRKDGRKKKTRRIKEIVYYDNDESSSSQKDDYNDYEKKKTIWDTLKISHEGNDVTMLTKMELVEGELGRFTMIRGDEPTQTYNWLKTLVNKIRSYGSTRWTDHDVVRLMLRSFTVLDPHLVNNIRENPMXHQDDARGDTWKVRXGRMMIKEARYVDDSLNGPIQEPKTIALKATRSKEALPSKVAQVEAAGLNEEEMALIIKRFKTTLRVRKEHPNKTKTKGKRSCFKCGKIGHFIANCPDNDSDQEQGNKREKKKAYKNTKGEAHLGKEWDSDCSSSDSDNEGLAATAFNKSALFPNEHHTCLMAREKKGLDRTKVDKINELIDALNDKNSLKSINDDLSAKLEIANKSTSCVKHVVVCTRCKDFNVDACSEHLVSISKLNDEVASLNAQLKTSKSEFDKLKFARDAYTIGRHPSIKDGLGFKREVKNLTSHKASISAKEKGKAPMASSAQKNHAFMYHDRRHSRNVCRGYDAFDSHAMIVSSSSIMHDRNLARKNVVHHMPRRNSVHVPRKVMNEPSTVYYACNASFAICRKDKKVYASRGSSWIIDSGCTNHMTGEKRMFSSYVKNKVPQDSIIFGDGNQGKVKGLGKIAILSEHSISNVFLVESLGYNLLSVSQLCNMGYNCLFTNVDVSVFRRSDGSLAFKGVLDGKLYLVDFAKEEAGLDACLIAKTSMGWLWHRRLAHVGMKNLHKLLKGEHVIGLTNLVKQDKSETQGTLKRFLRRAQNEFELKVKKIRSDNESEFKNLQVEEYLEEEGIKHEFSAPYTPQQNGVVERKNRTLLDMARTMLGEFKTPEQFWTEAMSTACHAINWVYLHRLLKKTSYELLTGNKPNVSYFRVFGSKCYILVKKGRNSKFAPKAVERFLLGYDSNTKAYRVFNKSSGLVEVSSDVVFDETNGSPREQVVDLDDVDEEDVPTTAMRTMAIGDVRSQEQKEQDQPSSSTMVHPPTQDDEQVHQEEACDQGGAQDDLVMEEEAQPAPPTQVRATIQRDHPVDQILGDISKGVTTRSRLVDFCEHYSFISSIEPFRQNVVGTKWVFRNKQDEHGVVTRNKTRLVAKGYAQVAGLDFEETFAHVARLESIRILLAYATHHSFRLFQMDVKSAFLNGPIKEEVYVEQPPGFEDERYPDHVCKLSKALYGLKQAPRAXVKQLKDGTFISQTKYTXDLIKRFGMKDAKPAKTPMGTDGHTDLNKGXFQSDPRDCHLVAVKRILRYLVATPCFGIWYPKGSTFDLIGYSDSDYAGCKVDRKSTSGMCQFLGRSLVSWSSKKQTSVALSTAKAEYVATGQCCAQLLWMRQTLRDFGYNLSKVLLLCDNESAICMADNPVEHSRTKHIDIRHHFLRDHQQKGDIEVFHVSTENQLADIFTKPLDESTFYKLRSELNVLDSRNLD

SEQ ID NO: 10120 - protein, 1431 aa, Zea mays
  unsure (1)..(1431): unsure at all Xaa locations
  Clone ID: TF_ZM5000.C1.o15.fg.pep
MDPKGKGMVVNDKEKETIFNEPRDDKATNSGSSQKKKEGKKKRRIKKIVYYDDSDESSSSQKDNDDNDHEKKKTVNSIFSFDYSRTHLLSIPLGKPPHFDGEDYGFWSHKMRSHLFSLHPSIWEIVESGMQFDSTDSPIFINEQIHKNAQATTVLLASLCRDEYHKLVEGELGRFAMIRGEEPTQTYNRLKTLVNKIRSYGSTRWTDHDVVRLMLRSFTVLDPHLVNNIRENPMXHQDDTRGNTWEVXSGRMMIKEARYVDDALNGPIHEPQTVALKATRSKEVLPSKVAQVEAAGLNEEEMALIIKCFKTTLRGRKEHPNKNKTKGKRSCFKCGKIGHFIANCPDNDSDQEQEKKRENKKAYKKAKRETHLGKEWDSDCSSSDSDNEGLAASAFNKSSLFPNEHHTCLMAKEKKVNTRKTTYASSSDDESSDDEIDYASLFKGLERTKIDKINELIDALNDKNRLLEKQEDLLYEEHDKFVEAQKSLVLEVKRNEMLSCELSTCHETISSLKSVNDDLNAKLEVANRSNSCVDHVVICNRCKDFNVDACSEHLVSIAKLNDEVASLNAQLKTSKNEFDKLKFARDAYTIGRHPSIKDGLGFKREAKNLTSHKAPISAKEKGKAPMTNSSQNNHAFIYAIADYRKIVINHVPRRNVLVPMNTPRTFYNLYIALQCFLCIRMKDKKVYAFGGSSWIIDSGCTNHMTGEKKMFTSYVKNKDFQDSIVFGDGNQGKVKGLGKIAISSEHSIPNVFLVESLGYNLLSVSQLCNMGYNCLFTNVDVSVFRRSDGSLAFKGVLDGKLYLVDFAKEEGGLDACLIAKTSMGWLWHRCLAHVGMKNLHKRLKGEHVIGLTNDKSETQGTLKRFLRRAQNEFELKVKKIRSDNRSEFKNLQVEEYLEEEGIKHEFSALYTPQQNGVVERKNRTLIDMARTMLGEFKTPERFWSEAVNTACHAINRVYLHRLLKKTSYELLTGNKPNVSYFRVFGSKCYILVKKGRNSKFAPKAVEGFLLGYDSNXKAYRVFNKSSDEEDVPTAAIRTMAIGDVRPQEQKDQDQPSSSTMVHPPTQDDEQVXFQMDVKSAFLNGPIKEELYVEQPPGFEDERYPDHVCKLSKALYGLKQAPRAWYECHRDFLIANAFKVGKADPTLFTKTCDGDLFVCQIYVDDIIFGSTNQKSCEEFSRVMTQKFEMLMMGELNYFLGFQVKQLKDGTFISQTKYTQDLLKRFGMKDAKPAKTPMGTDGHVDLNKGGKSIDQKAYRSMIGSLLYLCASRPDIMLSVCMCARFQSDPRECHLVAVKRILRYLVATPCFGIWYPKGSTFDLIGYSDSDYAGCKVDRKSTSGTCQFLGRSLVSWSSKKQTSVVLSTAEVEYVAAGQCCAQLLWMRQTLRDFGYNLSKVPLLCDNESAICMADNLVEHSRTKHIDIRHHFLRDH

SEQ ID NO: 10121 - protein, 947 aa, Zea mays
  Clone ID: TF_ZM5007.C1.o6.fg.pep
MALIIKRFKTTLKGRKRHPNKNKTKGKRSCFKCGKIGHFIANCPDNDSDQEQGNKREKKKTYKKANGEAHLGKEWDSDCSSSDSDNEGLAAIAFNKSFLFPNEHHTCLMAREKKGLDRTKVDKINELIDALNDKNRLLEKQEDLLYEEHDKFVEAQKSLALEIKRNEMLSCELSTCHDSISSLKSINDDLNAKLEIANKSTSCVEHVAICNRCKDFNVDACSEHLVSISKLNDEVASLNAQLKTSKSEFDKIKFARDAYTIGRHPSIKDGLGFKREAKNLTSHKASISAKEKGKAPMASSTQKNHAFMYHDRRHSRNAYRSYDAFDSHAMFASSSSIMHDRNLARKNAMPRRNVVHVPRKVNNEPSTIFHTCNAYFAICRKDKKVYASGGSSWIINNGCTNHMTGEKKMFSSYVKNKDSQDSIIFGDGNQGKVKGLGKIAISSEHSISNVLLVESLRYNLLSVSQLCNMGYNCLFTNVDVFVFRRSDGSLAFKGVLDGKLYLVDFAKEEAGLDACLIAKTSMGWLWHRRLAHVGMKNLHKLLKGEHVIGLTNVTFEKDRPCAACQAGKQVGSSHHTKNVMTTSRPLELLHMDLFGPIAYLSIGGSKYGLVIVDDFSRFTWVFFLQDKSETQGTLKRFLRRAQNEFELKVKKIRSDNRSEFKNLQVEEYLEEEGIKHEFSAPYTPQQNGVVERKNRTLIDMARTMLVEFKTPEWFWSEAVNTACHAINRVYLHRLLKKTSYELLTGNKPNVSYFRVFGSKCYILVKKGRNSKFAPKVVEGFLLGYDSNTKAYRVFNKSSGLVEVSSDVVFDETNGSPSEQVVDLDDVDEEDVPTAAIRTMVIGDVRPQEQKEQDQPSSSTMVHPPTQDDEQVHQEEACDQEGAQDDHVMEEEAQPTPPTQVRATIQRNHPVDQILGDISKGVTTRSRLVNFCEHYSFVSSIEPFRVEE

SEQ ID NO: 10122 - protein, 678 aa, Zea mays
  Clone ID: TF_ZM5028.C2.o6.fg.pep
MDPRGKGMVVNEKEKESFVNDPKDDKSTNSGSSHKRKDGKKKKTRRIKEIVYYDDSDESSSSQKDDDNDYKKRKTVNSNFSFDYSRISQSTNAHLLSIPLGKPPQFDGEDYGFWSHKMRSHLFSLHPSIWEIVESGMQFDSTDSPIFINEQIHKNAQATTVLLASLCRDEYHKVSGLDNAKQIWDTLKISHKGNNVTMLTKMELVEGELGRFAMIRGEEPTQTYNRLKTLVNKIRSYGSTRWTDHDVVRLMLRSFTVLDPHLVNNIRENPRYTKMSPEEILGKFVSGWMMIKEARYVDDALNGPIHEPQTVALKATRSKEALPSKVAQVEAVGLNEEEMALIIKRFKTALKGRKEHPNKNKTKGKRSCFKCGKIGHFIANCPDNDSDQEKKSGKWEKKKNYKKAKGEAHLGKEWDSDCSSSDSDNEGLATTAFNKSFLFPNEHHTCLMAKEKKVCTRNNTTYASSSEDESSDDEIDYSCLFKGLDRTKVDKINELIDVLNDKNMLLEKQEDLLYEEHDKFVEAQNSLALEIKRNEMLSCELSTCHDSISSLKSINDDLNAKLEIANKSTSCVEHVATCNRCKDFNIDACSEHLVSISKLNEEVASLNAQLKTSKNDFDKLKFARDAYTVGRHPSIKDGLGFKRKVKNLTSHKASISIKEKGKAPMANSIQKNHAFLYH

SEQ ID NO: 10123 - protein, 1411 aa, Zea mays
  unsure (1)..(1411): unsure at all Xaa locations
  Clone ID: TF_ZM5032.C3.o5.fg.pep
MDPKGKGMVVNDKEKESFVNDPKDDKPTDSGSGHKRKDGRKKKTRHIKEIVYYDSDESSSSQKDDDNDYEKKKTVNSNFYFDYSRIPQSTNAHLLSIPLGKPPHFDGEDYGFWSHKMRSHLFSLHPSIWEIVESGMQFDSTDSPMFINEQIHKNAQATTVLLASLCRDEYXRGEEPTQKYNRLKTLVXKIRSYGSTRWTDHDVVRLMLRSFTVLDPHLVNNIRENPRYTKMTPEEILGKFVSGQMMIKEARYVDDALNGPIHEPQTVALKAMRSKEALPSKVAQVEATGLNEEEMALIIKRFKTALRGRKEHPNKTKTKGKRSCFKCGKIGHFIANCPDNDSDQEQGNKREKKKAYKKAKGEAHLGKELDSDCSLSDSDNEGLAATAFNKSALFPNEHHTCLMAREKKVSTRDTSTYASSSDEESSDDEIDYSCLFKGLDRTKVDKINELIDALNDKNKLLEKQEDILYEEHDKFVEAQKSLALEIKRNEMLSCELSTCHDSISSLKSINDDLSAKLEITNKSTPCVEHVVVCNRCKDFNVDACSEHLVSISKLNDEVASLNAQLKTSKSEFDKLKFTRDAYTIGRHPSIKDGLGFKREVKNLTSHKASISAKEKGKAPVASSAQKNHAFMYHDRRHSRNVYRSYDAFDSHAMIASSSSIMHDRNLARKNVVHHMPRRNIVHAPRKVMNEPFTIYYACNTSFAICRKDKKVYASGGSSWIVDSGCTNHMTGEKKMFSSYVKNKDPQDSIIFGDGNQGKVKGLGKISISSEHSISNVFLVESLGYNLLSIDLVQLVKQDKSETQGTLKRFLRRAQNEFELKVKKIRSNNRSEFKNLQVEEYLEEEGIKHEFSAPYTPQQNGVVERKNRTLLDMARTMLGEFKTPERFWMEAVSTACHAINRVYLHRLLKKTSYELLTGNKPNVPYFRVFGSKCYILVKKXQNVVGTKWVFRNKQDKHGVVTRNKAXLVAKGYAQVAXLDFEETFAPVARLESIRILLAYATHHSFSLFQMDVKSAFLNGPIKEEVYVEQPPGFEDERYPDHVCKLSKALYGLKQAPRAWYECLRDFLITNDFKVGKADPTLFTKTCDGDLFVCQIYVDDIIFGSTNQKSCEEFSRVMTQKFEMSMMGELSYFLGFQVKQLKDGTFISQTKYTQDLIKRFGMKDAKPAKTPMGTDGHTDLNKGGKSVDQKAYRSMIGSLLYLCASRPDIMLSVCMCARFQSDPRECHLVAVKRILRYLVATPCFGIWYPMGSTFDLIGYSDSDYAGCKVDRKSTSGTCQFLGRSLVSWSSKKQTSVALSTAEAEYVAAGQCCAQLLWMRQTLRDFGYNLSKVPLLCDNESAIRMADNPVEHSRTKHIDIRHHFLRDHQQKGDIEVFHVSTENQLADIFTKPLDESTFCKLRSELNVLDSRNLD

SEQ ID NO: 10124 - protein, 579 aa, Zea mays
  Clone ID: TF_ZM5066.C5.o1.fg.pep
MDPKGKGIVINDKEKESFVNEPRDDKSNDSDSGHRRKDGKKKKTRRIKEIVYYDSDESTSSQKDDDHNEYERKKPVNSNFSFDYSRIPQSTNAHLLSIPLGKPPHFDGEDYGFWSHKMCSHLFSLHPSIWEIVESGMHFDSTDSPMFINEQIHKNAQATTVLLASLCRDEYHKVSGLDNAKQIWDTLKISHEGNDVTLLTKMELVEGELGRFAMIRGEEPTQTYNRLKTLINKIRSYGSTRWTDHDVVRLMLRSFTVLDPHLVNNIRENPRYTKMSPEEVLGKFVSGRMMIKEARYVDDVLNGPIHEPQPIALKAMRSKEALPSKVAQVEAAGLNNEEMALIIKRFKTALKGRKGQPSKTKTKEKRSCFKCGKIGHFIANCPDNESDQEKGNKREKKKHYKKAKGEAHIGKEWDSDCSSSDSDNEGLAATAFNKSSLFPYERHTCLMAREKKVSTHDTSTYASSSEDETSDDDEIDYSCLFKGLDRSKINKINELIDALNDKNRLLEKQEDLLYEEHDKFVSAQNSLALEIKRNEMLSSELSTCHESISKLKSVNDDLNAKLEIASKSTSCVEIVETCN

SEQ ID NO: 10125 - protein, 1665 aa, Zea mays
  Clone ID: TF_ZM5105.C7.o6.fg.pep
MDPKGKGIMINDKEKESFVNEPRDDKSNDSGSGHRRKDGKKKKTRRIKEIVYYDSDESTSSQKDDDHNDYEKKKPVNSNFSFDYSRIPHSSSSHLLSIPLGKPPHFDGEDYGFWSHKMRSHLFSLHPSIWEIVESGMHFDSSDSPMFINEQIHKNAQATTVLLASLCRDEYNKVSGLDNAKQIWDTLKISHEGNDVTLLTKMELVEGELGRFAMIRGEEPTQTYNRLKTLINKIRSYGSTRWTDHDVVRLMLRSFTVLDPHLVNNIRENPRYTKMSPEEVLGKFVSGRMMIKEARYVDDALNGPINEPQPLALKATRSKEALPSKVAQVEAAGLNNEEMALIIKRFKTALKGRKGQPSKTKTKEKRSCFKCGKIGHFIANCPDNESDQEKGNKREKKKHYKKAKGEAHIGKEWDSDCSSSDSDHEGLAATAFNKSSLFPNERHTCLMAREKKVSTHDTSTYASSSEDESSDDDEIDYSCLFKGLDRSKINKINELIDALNDKNRLLEKQEDLLYEEHDKFVSAQNSLALEIKRNEMLSSEVSTCHESISKLKSVNDDLNAKLEIASKSTSCVEIVETCNRCEDFDIDACSEHLVSISKLNDELASLNAQLKTSKSNFDKLKFARDAYTIGRHPSIKDGLGYKKEAKNLTSHKAPISAKEKGKAPMASNVQKNHAFMYHDRRQTRNTFRSYNTYDDFDSHAMFASSSSYMHGRNMSRRNAFHHVPRKNFIHASRKAVNEPSTIYCALNASFAICRKDRKIVARKLGAKCKGDKTCIWVPKDICTNLVGPNMSWVYASGGSSWIIDSGCTNHMTGEKKMFTSYVKNKDSQDSIIFGDGNQGKDKSETQGTLKRFLRRAQNEFELKVKKIRSDNGSEFKNLQVEEFLEEEGIKHEFSAPYTPQQNGVVERKNRTLIDMARTMLGEFKTPERFWSEAVNTACHAINRVYLHRLLKKTSYELLTGNKPNVSYFRVFGSKCYILVKKGRNSKFAPKAVEGFLLGYDSNTKAYRVFNKSSGLVEVSSDVVFDETNGSPREQVVDLDDVDDEDVPTAAIRTMTIGDVRPREQLEQDQPSSSTMVHPPTQDDEQVHQKEACDQWGAQDDHMMEEEAQPAPPTQVRAVIQRDHPVDQILGDISKGVTTRSRLVNFCEHYSFVSSIEPFRVEEALLDPDWVLAMQEELNNFKRNEVWTLVPRPKQNVVGTKWVFRNKQDEHGVVTRNKARLVAKGYAQVAGLDFEETFAPVARLESIRILLAYAAHHSFRLYQMDVKSAFLNGPIKEEVYVEQPPGFEDERYPDHMCKLSKALYGLKQAPRAWSECLRDFLIANAFKVGKADPTLFTKTCDGDLFVCQIYVDDIIFGSTNQKSCEEFSRVMTQKFEMSMMGELNYFLGFQVKQLKDGTFISQTKYTQDLLKRFGMKDAKPAKTPMGTDGHTDLNKGGKSVDQKAYRSMIGSLLYLCASRPDIMLSVCMCARFQSDPKECHLVAVKRILRYLVATPCFGIWYPKGSNFDLIGYSDSDYARCKVDRKSTSGTCQFLGRSLVSWNSKKQTSVALSTAEAEYVAAGQCCAQLLWMRQTLRDFGYNLSKVPLLCDNESAIRMAENPVEHSRTKHIDIRHHFLRDHQQKGDIEVFHVSTENQLADIFTKPLDEKTFCRLRSELNVLDSRNLD

SEQ ID NO: 10126 - protein, 534 aa, Zea mays
  Clone ID: TF_ZM5106.C2.o14.fg.pep
MDPKGKGIVINDKEKESFVNEPRDDKSNDSGSGHRRKDGKKKKTRRIKEIVYYDSDESTSSQKDDDHNEYEKKKPVNSNFSFDYSRIPQSSNAHLLSIPLGKPPHFDGEDYGFWSHKMRSHLFSLHPSIWEIVESGMHFDSTDSPMFINEQIHKNAQATTVLLASLCRDEYHKVSGLDNAKQIWDTLKISHEGNDVTLLTKMELVEGELGRFAMIRGEEPTQTYNRLKTLINKIRSYGSTRWTDHDVVRLMLRSFTVLDPHLVNNIRENPRYTKMSPEEVLGKFVSGRMMIKEARYVDDALNGPIHEPQPIALKATRSKEALPSKVAQVEAAGLNNEEMALIIKRFKTALKGRKGQPSKTKTKEKRSCFKCGKIGHFIANCPDNESDQEKGNKREKKKHYKKAKGEAHIGKEWDSDCSSSDSDNEGLAATAFNKSSLFPNERHTCLMAREKKVSTHDTSTYASSSDDESSDDDDIDYSCLFKGLDRSKIDKINELIDALNDKNRLLEKQEDLLYEEHDKFVEAQKSLALEIKRN

SEQ ID NO: 10127 - protein, 1663 aa, Zea mays
  Clone ID: TF_ZM5107.C2.o5.fg.pep
MDPKGKGIVINDKEKESFVNEPKDDKSNDSGSGHRRKDGKKKKTRRIKEIVYYDDSDESTSSQKDDVHNDYERRKPVNSNFSFDYSRIPQSTNAHLLSIPLGKLPHFDGEDYGFWSHKMRSHLFSLHPSIWEIVENGMHFDSTDSPMFINEQIHKNAQATTVLLASLCRDEYHKVSGLDNAKQIWDTLKISHEGNDVTLLTKMELVEGELGRFAMIRGEEPTQTYNRLKTLINKIRSYGSTRWTDHDVVRLMLRSFTVLDPHLVNNIRENPRYTKMSPEEVLGKFVSGRMMIKEARYVDDALNGPIHEPQPIALKATRSKEALPSKVAQVEAAGLNNEEMALIIKRFKTALKGRKGQPSKTKTKEKRSCFKCGKIGHFIANCPDNESDQEKGNKREKKKHYKKAKGEAHIGKEWDSDCSSSDSDNEGLAATAFNKSSLFPNERHTCLMAREKKVSTHNTSTYASSSEDESSDDDEIDYSCLFKGLDRSKINKINELIDALNDKNRLLEKQEDLLYEEHDKFVSAQNSIALEIKRNEMLSGELSTCHETISTLQGVNNDLNAKLEVANKSNSCVEHVIICTRCKDFDIDACSEHLVSISKLNDELDSLNAQLKTSKNDFDKLKFARDAYTIGRHPSIKDGLGFKREAKNLTSHKAPISAKEKGKAPMASSTKRNHAFMYHDRRQTRNAYRNYNAFDSHAMFASSSSYMHGRNMSRRNAIHHVPRKNIIHAPRKVVNEPSTIYCALNASFAIYRKDRKIVARKLGAKCKGDKTCIWVPKDICTNLVGPNMSWVYASGGSSWIIDSGCTNHMTGEKKMFTSYVKNKDSQDSIIFGDGNQGKDKSETQGTLKRFLSRAQNEFELKVKKIRSDNGSEFKNLQVEEFLEEEGIKHEFSAPYTPQQNGVVERKNRTLIDMARTMLGEFKTPERFWSEAVNTACHAINRVYLHRLLKKTLYELLTGNKPNVSYFRVFGSKCYILVKKGRNSKFAPKAVEGFLLGYDSNTKAYRVFNKSSGLVEVSSDVVFDETNGSPREQVVDLDDIDEEDVPTAAIRTMTIGDVRPREQLEQDQPSSSTMVNPPTQDDEQVLQVEAHDQGGAQDVQVEEEEAPQAPPTQVRAVIQRDHPVDQILGDISKGVTTRSRLVNFCEHYSFISSIEPFRVEEALLDPDWVLAMQEELNNFKRNEVWTLVPRPKQNVVGTKWVFRNKQDEHGVVTRNKARLVAKGYAQVAGLDFEETFAPVARLESIRILLAYASHHSFRLFQMDVKSAFLNGPIKEEVYVEQPPGFEDERYPDHVCKLSKALYGLKQAPRAWYECLRDFLIANAFKVGKADPTLFTKTCDGDLFVCQIYVDDIIFGSTNKKSCEEFSRVMTQKFEMSMMGELNYFLGFQVKQLKDGTFISQTKYTQDLLKRVGMKDAKPAKTPMGTDGHTDLNKGGKSVDQKAYRSMIGSLLYLCASRPDIMLSVCMCARFQSDPKECHLVAVKRILRYLVATPCFGIWYPKGSTFDLIGYSDSDYAGCKVDRKSTSGTCQFLGRSLVSWNSKKQTSVALSTAEAEYVAAGQCCAQLLWMRQTLRDFGYNLSKVPLLCDNESAIRMAENPVEHSRTKHIDIRHHFLRDHQQKGDIEVFHVSTENQLADIFTKPLDEKTFCRLRSELNVLDSRNLD

SEQ ID NO: 10128 - protein, 293 aa, Zea mays
  Clone ID: TF_ZmC4812_1.pep
MAEEKVGRIFVGGLSWNTTERTLERTFGQYGKVIEAQVVVERETGRSRGFGFVTFSEPRAVDAAIRGMHNGELDGRNISVNKAEPRNSDGYGYGGGGGGGYSSGGRGGYRSGADVVPAASDDCFKCGRPGHWARECPYSDGSGRTGRYSPGSRYGGGTGGRGDRFGGSDRFARYDDDRYDGGRYVDSRDTYYGSGRDRYAPAAERYSGDRYSGADRYASSGFARERSYERDGGRSNGGYYRDEPRGTGGYGRGGSRGGGGGGPARFGGSYRDRPAPYDRPSRGGAARAYDDRY

SEQ ID NO: 10129 - protein, 1367 aa, Zea mays
  unsure (1)..(1367): unsure at all Xaa locations
  Clone ID: TF_ZM5006.C3.o12.fg.pep
MDPKGKGMVVNDKEKESFFNEPKMTSPLTRARVTRRKTDEYHKVSGLDNAKQIWDTLKISHEGNDVTMLTKMELVEGKLGRLKTLVNKIRSYGSTRWTDHDVVRLMLRSFTVLDPHLVNSIRENPRYTKMTPEEILRKFVSGRMMIKEARYVDDALNGPIHEPQTIALKATSSREALPSKVAQIEAAGLNEDEMTLIIKRFKTALKGRKEHPNKSKTKGKRSCFKCGKIGHFISNCPDNDSDQEQEKKREKKKAYKKAKGEAHLGKEWDSDCSSSDSDNEGLAASAFNKSSLFPNEHHTCLMAKEKKVSTRNAITYTSSSDDESSDDEVDYASLFKGLDRTKIDKINELIDALNEKNRLLEKQEDLLYEEHDKFTSKNEFDKLKFARDAYTIGRHPSIKDGLGFKRESKNLTSHKAPISTKEKGKAPMANSTQKNHAFMYHDRRYSRNVHYDKSYNDVVSPAMIASSSSIMHDRSLARKNVTHHMPRRNVHVYASGGSSWIIDNGCTNHMTGEKKMFTSYVKNKDSQDSIIFGDGNQGKVKGLGKIAISFEHSISNVFLVESLGYNLLSVSQLCNMGYNCLFTNIDVTVFRRSDGSLAFKGVLDDKLYLVDFAKEEVGLDACLIAKTSMGWLWHRRLAHVEMKNLHKLLKGEHVIGLTNVTFKKDRPCAACQAGKQVGSSHHTKNVMTTSRPLELLHMDLFGPVAYLSIGGSKYGLVIVDDFSRFTWVFFLQDKTETQGTLKRFLRRAQNEFELKVKKIRSDNGSEFKNLQVEEYLEEEGIKHEFSAPYTPQQNGVVERKNRTLIDMARTMLGEFKTHERFWSEAVNTACHAINRVYLHRLLKKTSYELLTGNKPNVSYFRVFGSKCYILVKKGRNSKFAPEAVEGFLLGYDSNTKAYRVFNKSSGLVEVSSDVVFDKTNGSPREQVVDLDDVDEEDVPTAAIRTMAIGDVRLQEQKEQDQPSSSTMVHPXTQDNEQVHQEEACDQWGAQDDHVXQMDVKSAFLNGPIKEEVYVEQPPGFEDERYPDHVGKADPTLFTKTCDGDLFVCQIYVDDIIFGSTNQKSCEEFSRVMTQKFEMSMMGELNYFLGFQVKQLKDGTFISQTKYTQDLIKRFGMKDAKPAKTPMGTDGHVDLNKGGKSVDQKAYRSMIGSLLYLCASRPDIMLSVCMCARFQSDPRECHLVAVKRILRYLVATPCFGIWYPKGSTFDLIGYSDSDYAGCKVDRKSTSGTCQFLGRSLVSWSSKKQTSVALSTAEAEYVATGQCCAQLLWMRQTLRDFGYNLSKVPLLCDNESAIRMADNPVEHSRTKHIDIQHHFLRDHQQKGDIEVFYVSTENQLADIFTKPLDEKTFCRLCSELNVLDSRNLD

SEQ ID NO: 10130 - protein, 1175 aa, Zea mays
  Clone ID: TF_ZM4932.C3.o9.fg.pep
MAGESWSLAPSLLDRVYESSIRTTTCAWPKSTEREKKTEKRRRGPPPRCMGVAIPWQMGNMTCGYRVQPLQSVKLMVNTRKGGGIDLPPNRHTRRIFRQPQPQPTEMDPPPPPPPSGVDPLVAAQMRMMQQMADTMADMHAQMQQERQEMHQEREEIRRELHQEREEIRQERRTQQQQQQQQQPQQAPQPPPPPPVPPRDKHREFMSHKPPTFASCPDPLDADDWLKFVEKMLNIAQCTDQEKGSMSVSEYRDKFIQLSRYAPEEVAKDERKQEHFIEGLNGPLQYSLVAHTFPSFQRLLDKALSIEHKRVQLGDLKRKAISQGQGSNSATPTCTPMKFSGQSAGTTCFKCGKTGHYAIVCPQRIATTPVQNKQQTPGSGKGHSIARVNQVSTDATPDGADIVLGMFYVNAIPATILFDSGATHSFMSARYANTNEVPLLNMRKSMIVITPKGPVEANKMTRRLTLTIMGREFIATAIILEASSIDLILGMSWLRKAKAIIACGRGTVELTSPKGERFQVQIAVTTSSRHAMYFIVEEFVGDNIRVVRDFLDVFPEELPGMPPDREVEFVIDLLPGTVPISKRPYKMSVKELKELKKQLTELQEAGFIHPSSSPWGAPILFVQKKDGSQRMCVDYRSLNDVTVKNKYPLPRIEDLFDQMRGARVFLKIDLRSGYHQMRIRPSDIPKTTFLTRYGLYEFTVMSFGLTNAPAYFMNLMNKVFMEYLDKFVVVFIDDILIYSKSYSDHEEHLRLVLQKLRDNQLYAKYSKWEFWIGEVPFLGHIISNGGISVDPAKVKEIMEWSVSTTVKEIQSFLGLTGYYRRFIEGFSKITKPMTSLLEKEREFKWDEKCQDSFDQLKKRLMSPPVLKDINLRQRRWLELIKDYDLEIHYHPGKANLVADALSRKEHVHSAIVAQLPDELVEDFRRLNLGIVAHNEGVTIDVEPTLEQEIRKGQIGDAKIQEIKDLITEGRGPEFTEDEQGTIWFKDRICVPDIESLRETILKEAHDSDYSIHPGSTKMYQDLKQKYWWYGLKRDVAAHVAMCDVCQRVKAEHQRPAGLLHPLKIPGWKWEEIGMDFITGLPRTQKGYDAIWVIVDRLIKVAHFIPVKTTYKGSQLAELYMAQIVCLHGVPKKIVSDRGSQFTSRFWRSFHENMNTKLNFSTTYHPQTDGQTERTN

SEQ ID NO: 10131 - protein, 1403 aa, Zea mays
  unsure (1)..(1403): unsure at all Xaa locations
  Clone ID: TF_ZM4352.C1.o5.fg.pep
MSTQRDHVDPLLEEIPITSSGEEVDPKVLDLAMKIAEKMFLKMKEEDAKKKAEEEESRRKAEEDKGKGKFDXKVLSKVSLNTEGSSTKSXRNFIPNFSSSPLGKLPTLSELNYDEWADKMKSHLIGVHPSLWEIVNVGMFKPAQGEEMTPEMMQEVHRNAQAVSIIKGSLCPEEYRKVQGREDARDIWNILKMSHEGDPKAKRHRVEALESELARYDWTKGESLQSLFDRLMVLVNKIRVLGSEDWSDSKVTRLFMRAYKEKDKSLARMIRDRDDYEDMTPHQLFAKNQQHESEEAPIKTRDSHALITNEQDNPKKNKDHKAKKVVETSSGEDSSSDEDTTMFIKTFKKFVRKNDKFQRKGKKRACYECGQTGHFIVDCPNKKEQEAKKEYKKDKFKKGGKTKGYFKKKKYGQAHIGEEWNSDEESSSSKEEEVVANVAIQSTSSSQLFTNLQDDSYTPTCLMAKGDKVSLFSNDLPNDDDDEQIAMKNKMIKEFGLNGYNVITKLMEKLDKTKATLDAQEDLLILEKERNLELQELLHNKDEMLDVLTKEVSLVKITIENKDKEVINMKTSIANLANEKNALETSMLSLNVQNQELQVQLENCKNINASSLVIESKSSSLNDNFCKHCAKYHASCCLTNHARKNSPQVKVKGILKRCSSNDGLKKVKPKYKSLKPNNGRRGLGFNSSKENPSTVHKGWRSPKFIEGTTLYDALGRIHSSNDKSPQVKVYSSGGSSWVLDSGCTNHMTGEKDMFHSLQLTQEAQEIVFGDSGKSKVIGIGKIPISDQQSLSNVLLVDSLSYNLLSVSQLCGMGYNYLFSDVDVKILRREDSSVAFTGRLKGKLYLVDFTTSKVTPETCLVAKSDKGWLWHRRLAHVGMRNLAKLQKDNHIIRLTNVVFEKDRVCGACQAGKQHGVPHKSKNVVTTKRPLELLHMDLFGPMAYISIGGETQEILKKFMRRAQNEFELKIKKVRSDNGTEFKNTGVEEFLGEEGIKHEFSVPYTPQQNGVVERKNRTLIEAARTMLDEYKTPDNFXAINRLYLHKIYKKTAYELLTXVKSSKFAPRVDEGFLLGYASNAHGYRVFNNTTGLVEIAIDVTFDESNGSQGHVSNGTAGNEELPCEAIKKLAIGEVRPQEKDDEEGTLWMTNEVVDVGAKVVGDKSSTQANPSTSSHPSIEENHQFQRMPTMVEDGHESVDGEVPLDQVNDEEEQIQRQPSVPHPRVHHTIQRDHPVDNILGSIRRGVTTRSRLANFCEFYSFVSSLEPLKVEEALGDPDWIIAMQEELNNFTWNEVWSLVQRPKQNVIVTKWVFRNKQDEHGVVTRNKARLVAQGYTQVEGLDFGETYAPVARLESIRILIAYATNHDFKLYQMDVKSAFLNGPLQERVYVEQPPGFEEPKKPNHVY

SEQ ID NO: 10132 - protein, 98 aa, Zea mays
  Clone ID: TF_LIB3059-057-Q1-K1-G9.pep
KRKTITQGQGSSSICRRYVPPQGTPARPGGGQLSYQRPALHIPQATPHTRQAAPTGTPTRPTGQGTTTVTTCFKCGEVGHYANACPKRNPNTPARSNV

SEQ ID NO: 10133 - protein, 247 aa, Zea mays
  Clone ID: TF_LIB4756-066-R1-K1-F8.pep
MARVYVGNLDPRVTAREIEDEFRMFGVLRSVWVARKPPGFAFIDFDDRRDAQDAIRELDGKNGWRVELSTKVGGGRGRDRNGSDMKCYECGEAGHFARECRLRIGSGGLGSGRRRSRSPRYRSRSRSRSRSPRYRRSPSYSRSPRDRSPRRRSYSRSPLGSPARSLSRSPPLPPPPPRNNSRSPPGAREVSRSPPPPPPRNNSRSPPAARDVSRSPPAARDVSRSPPPPPDARRSYSGSPQQPQRDE

SEQ ID NO: 10134 - protein, 255 aa, Zea mays
  unsure (1)..(255): unsure at all Xaa locations
  Clone ID: TF_ZmC5918_1.pep
MARVFVGNLDPRVTAREIEDEFRXFGVLRSVWVARKPPGFAFIDFDDRRDAQDAIRELDGKNGWRVELSTKVGGGRGRDRNGSDMKCYECGEAGHFARECRLRIGSGGLGSGRRRSRSPRYRSRSRSRSRSPRYRRSPSYSRSPRDRSPRRRSYSRSPLGSPARSLSRSPPLPPPPPRNNSRSPPGAREVSRSPPPPPPRNNSRSPPAARDVSRSPPAARDVSRSPPPPPDARRSYSGSPGQQPQRDESPYANDA

SEQ ID NO: 10135 - protein, 233 aa, Zea mays
  Clone ID: TF_ZmC5918_3.pep
MARVYVGNLDPRVTAREIEDEFRTFGVLRSVWVARKPPGFAFIDFDDRRDAQDAIRELDGKNGWRVELSTKVGGGRGRDRNGSDMKCYECGEAGHFARECRLRIGSGGLGSGRRRSRSPRYRSRSRSRSRSPRYRRSPSYSRSLSRSPPLPPPPPRNNSRSPPGAREVSRSPPPPPPRNNSRSPPAARDVSRSPPAARDVSRSPPPPPDARRSYSGSPGQQPQRDESPYANDA

SEQ ID NO: 10136 - protein, 88 aa, Zea mays
  Clone ID: TF_jC-zmX700382080a1.pep
SSLVGGRPSLLCRSLRLLGRFKAFDERTGPHTHATGERCDYHLLLTDAYLKARKKNNWTIGKCFNCGNRGHFAQDCPKPKKEEALFDN

SEQ ID NO: 10137 - protein, 160 aa, Zea mays
  Clone ID: TF_ZmC263852_1.pep
MARLYVGNLDARVTAGELEDEFRVFGVLRSVWVARKPPGFAFIDFDDKRDAEDALRDLDGKNGWRVELSRNDRGDRGGRGGGAGGGGGGRDRGGSDMKCYECGESGHFARECRLRIGSGGLGSGRRRSRSRSRSRSPRYRRSPSYGRRSYSPRDRSPRRR

SEQ ID NO: 10138 - protein, 220 aa, Zea mays
  Clone ID: TF_ZmC518624_1.pep
MARVYVGNLDPRATAREIEDEFRVFGVLKSVWVARKPPGFAFIDFDETRDAKDAIRELDGKNGWRVELSTKSGSGRGRERERSGGSDMKCYECGESGHFARECRLRIGSGGLGSGRRRSRSPRHRSRSRSPRYRRSPSYGRRSYSPRDRSPRKRSYSRSPPPPRARSISRSPPPARARSISRSPPGPVEASAGHRLPVRTSAGHHRLLAQKASVSHTASP

SEQ ID NO: 10139 - protein, 193 aa, Zea mays
  Clone ID: TF_ZmC518624_2.pep
MARVYVGNLDPRATAREIEDEFRVFGVLKSVWVARKPPGFAFIDFDETRDAKDAIRELDGKNGWRVELSTKSGSGRGRERERSGGSDMKCYECGESGHFARECRLRIGSGGLGSGRRRSRSPRHRSRSCSPRYRRSPSYGRRSYSPRDRSPRKRSYSRSPPPARARSTSRSPPPARGRSISRSPPPARARSIS

SEQ ID NO: 10140 - protein, 229 aa, Zea mays
  unsure (1)..(229): unsure at all Xaa locations
  Clone ID: TF_LIB4738-138-A1-K1-B7.pep
GRALPNPSPPRRHSRARLPDRDPGDMPRYDDRHGNTRLYVGRLAPRTRSRDLEYLFSKYGRFSVFYPTMEMKLQVDAFEYLTHVSSLLFXGNYLRRIREVELKRDYAFIEFSDPRDADDAQYNLDGREVDGSRIIVEFAKGVPRGSGGSREYMGRGPPPGTGRCFNCGMDGHWARDCKAGDWKNXCYRCGESGHIEXNCQNSXRNLRRDKSYSRLHPPRGGTWPQPELQ

SEQ ID NO: 10141 - protein, 1922 aa, Zea mays
  Clone ID: TF_ZmC74_112.pep
MATYQEFLSTQPPLFTKAEDPLDADVWRHVVESKFPLLTGDCPDEAKARFAAQQFRGPARTWWDHFRAMLPADREVSWEEFKTAFRGHHIPAGILDRKLNEFLALNQGTRMVLQYAQAFNDLCQYAGYHADSDEKKRDRFRRGLNTKLRERLNTVRADSFNELVNMAISQEDCIVAHRAEKKRKAPMAAPSAQAQRFRIVSHNQSRGFQQQAGRWVIRPPQQQQQAPNRYPAPAPRNNQPPQQQQFRQGNGNKCFTCGSVGHYAKNCPRNQQRQMPAPNQDKGRKQKVQVRQGKLNFTTLEEVPEGAPIMTGTFSVYNQPALILFDSSASHSFISQKFSAKCKLPFSHSKGSFMIVTPGGKIATNQLNQSVPIQLGSHIIKTTLLVLGLENVDIILGANWMTLHQVVLDVASRTVEVNSPFCGNFTLILPSRDSTQSCAFSMTELPLKKIPVVCEYADVFPDELPGMPPDRDIEFAIKLQPGTAPISKRPYRMPPAELAELKKQLQELLDKSFIRPSTSPWGCPALFVKKKDESLRLCIDYRPLNAVTIKNKYPLPCIDVLFDQLVGAKVFSKIDLRSGYHQIKIRACDIPKTAFSTRYGLYEFLVMSFELTNAPAYFMYLMNSVFMPELDKFVVVFIDDILVYSKNEEEHAGHLHVVLQRLREHHLYAKLSKCDFWLKEIKFLGHTISQAGIAVDPDKVQEVMNWRPPTTVRQIRSFLGLVGYYRRFIPDFSRIAKPITELLKKEVKFVWSQKCEDAFHALRQHLTTAPILAQPNSSKPFDVYCDASGTGLGCVLMQDNRVIAYASRALRPHEQNYPTHDLKLAAVADLNMRQRRWLELIKDYDLEVHYHPGKANVVADALSRKLQCNCVLMDSRINTLCDELSKMQIEVIPSGSLSHISVEPALQDQVIMAQLSDKGVQFIKKNLHQKVEKYNCFRQDEKGVLWFKSRLVIPKDQDLKRKILDEAHLSKFSMHPGSTKMYHDLKPLYWWTRMKREIGQYVSECDTCQRIKASHLKSAGALQPLSVPSWKWDDINMDFIVGLPNTSRHHDSIWVIVDRLTKVAHFLPVHTTDKAQKYAELYIDRIVCLHGLPRTIVSDRGAQFVARFWEQLQESLGTKLIRSSAYHPQTDGQTERVNQILEDMLRACAIDCGKNWDKHLSLAEFAYNNSYQSSLKMAPFEALYGRRCRTPLNWSQPGEREVFGPDLVTEAERKVKLIRKNLEAAHARQKSYHDKRRKPLQFEVGSFVYLKVSPTKGVQRFGIKGKLAPRYIGPYEIIEACGPVAYKLKLPSKMSAIHSVFHVSQLKKCVRLPTEIIAEPELEIEPDLSYQEYPSKILDCKERSTRAKSIKMYKVQWSNHSEEEATWETEEFLRSNFPDCLPKEADCNLADGEYVLIPEQGPVQEEDQEQASETAIEDLPAAPAIEGKPRYGGYKCGHCTAAAGVSGALYAKAVPFRKWLTPRTAIKSQVLADFVVDWTGPITQPDPSAEKVWTIHCDGAWCYAGAGAAAVITSPTGVKHRYAARLSFALESDRCTNNIAEYEAVILGLRKLRVFGVTTCIIRTDSKVVAGQVKKDYAAKDPALMQYLAAIRSLERQFKGFTLQHVDRAKNEEADALVKAAAKGESLPSDVFYHVIGTPAVRSPKGLQITNDSEGHRIVNLIMTEDWRAPITLFLQGYYHPTDINEAKRLKHRSRDFALIEGQLYKKGVSQPMLKCVTETEGVQILCEVHSGTCGSHAGPRALAAKVIRQGFYWPAMICAANRVTRSCKACQKFSPRSGSPSQFTKLIAHTWPLQRWGLDIVGPLPTTQGNLKFTFVAVEYFTKWIEARAISTITSKTAQKFFWQNIVCRFGVPSELTVDNDKQFDSQDFKDFCFSIGTKLALASVYHPQSNGVVERVNGKNFTAVKKMLLDEKGQVGRFVT

SEQ ID NO: 10142 - protein, 61 aa, Zea mays
  Clone ID: TF_LIB3354-024-P1-K1-H6.pep
SLSNIRRVCDGEEDSSHCTIACSKKRRTCYECGIPGHLSSNCPNKKDPEFISDEKNTNVDS

SEQ ID NO: 10143 - protein, 159 aa, Zea mays
  Clone ID: TF_LIB3068-029-H3_FLI.pep
LRSLIFLNPTQVQLIRGNPRYTQMTPEEVIGNFVSFECMIKGSKKINELDEPSTSEAQPVAFKATEEKKEESTPSRQQIDASKLDNEEMALIIKSFRQILKQRKGKDYKPRSKKVCYKCGKPGHFIAKCPLSSDSDRGDNKKGKRREKKRYHKRRAAAR

SEQ ID NO: 10144 - protein, 550 aa, Zea mays
  Clone ID: TF_ZmC119_821.pep
MSGASAKREIRTGEKPATSHGKAPSGESANKVKGSPSHDKSRRSGDKKKKMKKVVYYETDSSSPSTSGSDTPSVTSKRHERKKFSKIPLRYPRISKRTPLLSVPLGKPPMFDGEDYNMWSDKMRHHLTSLHTSIWDVVEIGVQVPSPGDEDYDSDEVAQIRHFNSQATTILLASLSREEYNKVQGLKSAKEIWDVLKTAHEGDEVTKITKRETIEGKLGRFRLNQGEDPQAMYNRLKTLVNQVRYLGSTKWDDHEMVKVILRSLVFLNPTQVQLIRGDPRYTLMSPEEVIGKFVSFELMIKGSKKIIEQGDSSMPEAQPVAFKATKEKKQDSNPSRIPIDASKLNNKEMALIIKSFRQILKQRKGKYYKPRSKKVCYKCGKPGHFIAKCPLSSDSDRGDDKKEKRREKKRYYKKKGGDAHVCREWNSDESSSDSSSDEDTANIAVTKGLCHTRILGVQNPGANIITRGCASLPTSHVTHLPRDRDFPYTSTEEARQGNTTRPLQSSTSFRKPATVIGSSNAGFLPDRHRSKINQGPPYTDHSPTALAPFG

SEQ ID NO: 10145 - protein, 794 aa, Zea mays
  Clone ID: TF_ZmC31816_2.pep
MSGASAKREIGTSGDKSASSGRTHSRESAHKHKEESASSIKSQRRGDKKKKMKKVVYYESDSSSPSTSDSESTSATSKCHERKKYSKPPVFYGEDYSMWSDKMRHHLTSLHKSIWDIVEYGAQEYNKVQGLKSAKEIWDVLKTAHEGDEVTKITKRETIEGELSRFMLNQGEEPHAMYNRLKTLVNQVRNLGSTKWDDHEMVKVQPVAFKATEEKKEESTSSRLPIDASKLDNEEMALIIWSFHQILKQRRGKDYKPRSKKVCYKCGKPDHFIAKCPLSSDSDRGDDKKGKRREKKRYYKKKGGDAQVCREWDSDESSTDSSSDEDAANIAVTKGLVFPNVGHKCLMAKDDKKKKVKSRASTKYATSSDEASSSDDEDDLLTLFANLNMQQKEKLNELISAIHEKDGLKDRQDDFLIKENKKHVKVKNAYAHEIEKCEKLTSELNICHDTISNLRNENVKLIAKVEKLNVCDDSLVKLKNDNASLIAKIDKLNESLSSLRIENDKLISKAKDLNRCRDINVDAIHDHLALSKQQNDHIAQLSVKIIEREIENEKFKFARSLLYNGRRPGIKDGIGFQQGDNVKLNTPKRLSIFVKGKAPMAQDNKGYILYHVGYLEHKIRRIHARKPHNVTHHAFMYKNEASSSRQSTHVKLPKKKSPIASNETNVSFKTFDASYVLTNKSGKVIAKYVGGKHKGSKACVWEPKVYASGGSSWIIDSGCTNHMTGEKKMFSSYEKNHDPQRAITFGDENQSLVKGLGKIAISPDHSISNVFLEDSLDYNLLSVSQLCKMGYNCL

SEQ ID NO: 10146 - protein, 462 aa, Zea mays
  unsure (1)..(462): unsure at all Xaa locations
  Clone ID: TF_ZmC31816_27.pep
IKIERGATSTPEVQPVAFKATEEKKEESTSSRLPIDASKLDNEEMALIIKSFRQILKQRRGKDYEPRSKKVCYKCGKPGHFIAKCPLSSDSDRGNNKKGKRKEKKKYYKKGGDAHVYREWDSDESSTDSSSDEDATNIVVNKGLLFPNVGHXCLMAKDGKRKKVDSRSSTKYATSSDEDSSSDDEDDLLTLFANLNMQQKEKLNELISAIHEKDELLDSQEDFLIKENKKHVKVKNAYAQEVEKCKKLTSKLNICHDTISNLRNENAKLNVKVEKSNVCDDSISNLRNDNASLIVKIDKLNASLAAFKFEIENLFAKAKNLMCLXYAISNLRNEYSMLHAKIDELNVCKPSTSSVDHVSICTRCRDINVDAIHDYLALIKQQNDHIAQLSAKINEHDLENEKFKFARSMLYSGRRPVIKDGIGFQQGGNVKLNATKRLSNFVKGKATXPQDNKDYILYHAGY

SEQ ID NO: 10147 - protein, 176 aa, Zea mays
  Clone ID: TF_ZmC31816_40.pep
FELMIKGSKKIIERGASSTPEAQPVAFKATEEKEEESTPSRTPIDASKLDNEEMALIIKSFRQILKQRRGKDYKPRSKKVCYKCGKPGHFIAKCPLSSDSDRGDDKKGRRKEKKRHYKKKGGDAHVCREWDSDESSIDSSSNEDAANIAVTKGLLFPNVGHKCLMAKEGKKKKVKS

SEQ ID NO: 10148 - protein, 824 aa, Zea mays
  Clone ID: TF_ZmC3310_3.pep
MSGDHAKKMVIGGEKTATSHGKALSRESANKKKDGSPSRIQSHKSGEKKKKMKKLVYYEADSSSPSTSGSDTASVTSKRQERKKYSKIPLRYPRIAKHAPLLSVPLGKPPTFDGEDYSRWSDIMRYHITSLHKSIWDVVEFGVQVPSVWDEDYDEDEVAQIVHFNSQATTILLTSLSREEYNKVQGLKSAKEIWDVLKTAHEGDEVTKITKRETIEGELGRFRLRQGEEPQEMYNWLKTLVNQVRNLGSKKWDDHEMVTEVIGKFVSFELMIKGSRKIIEQDGPSTPEAQPIAFKATEEKKEESTSSRLPIDAYKLDNEEMALIIKSFRQILKQRRGEDYKFRSKKVCYKCGKPGHFIAKCPLSSDSDRGDDKKGKRREKKRYYKKGGDAHVCREWNSDESSSDSSSDEDAANIAVTKGLLFPNVSHKCLMAKDGKRKKVKSKSSTKYATSSDEDNSSDEEDNLRTLFANLNMQQKEKLNELISAIHEKDELLDTQEDFLIKENKKHVKIDSNVCDVSIPNLRDDNVSLLAKIEELNVSLASLRNENEKLIAKAKDLDVCNITISILRSENDILHAKIVELKSCKPSTSTVEHVSICTRCRDINVDAIHDHLALIKQQNDHIAQLDAKISEHDLENENFKFARSMLYSGRRPGIKGGIGFQQGGNVKLNAPPKRLSNFVKGKAPMPQDNEGYILHPAGYPERKIRRTHSRKSHSGPNHAFMYKGETSSSRQPTRAKLPKKKTPSASNDPDISFKTFDASYVLTNKSGKVVAKYVGGKHKGSKTCVWVPKVLVSNAKGPKTVWVPKIFMHPGAQVGSSIADAQTT

SEQ ID NO: 10149 - protein, 652 aa, Zea mays
  Clone ID: TF_ZmC3310_8.pep
MSPEEVIGKFVSFELMIKGSNKIIEQDGPSTPEAQPVAFKATEEKKKESTSSRLPINASKLDNEEMALIIKSFRQILKQRRGKDYKSRTKKVCYKCGKPGHFIAKCPLSSDSDRGNDKKGKRREKKRYYKKKGGDAHVCREWDSDESSSDSSSDEDAANIVVTKGLLFPNVGHKCLMAKDDKRKKVKSRSSTKYASSSDEDNSSDEEDNLRTLFANLNMQQKEKLNELISAIHEKDELLDSQEDFLIKENKKHVKVKDAYALEVEKCEKLSSELSKCHDIITNLRNENTSLIAKVDSNLCDDSISNLRDDNANLLAKIEKLNDSLASLRNDNEKLIAKAKDLDVCNVTISNLRSENDILHAKIVELKSCKPSTSTVEHVSINVDAIHDHLALIKKQNDHIAQLNAKINEHDLENEKFKFARSMLYSGRRPGIKDGIGFQKGDNVKLNASPKRLSNFVKGKAPMPQDNEGYILYPAGYPEHKIWRIHSWKSHSGPHHAFMYRGETSSSRHSTRAKLPRKKSPTASNDPNVSFKTFDASYVLTNKSGKVVAKYVGGKHKGSKTCVWVTKVYASGGSSSIIDSGCTNHMTWEKRMFSSYEKNKDPQRAITFGDGNQDIGVAVFRRSDDSVAFKGVFEEKISNPRDFEGILETSLK

SEQ ID NO: 10150 - protein, 928 aa, Zea mays
  unsure (1)..(928): unsure at all Xaa locations
  Clone ID: TF_ZmC7465_2.pep
MSGDHAKKEMETGEKPTTSHGSTSSEESRTKRREKKSSSSNKGKEKKSSSHHKEKKERSSSHKPHRSGDKHKRMRKVVYYETDTSPTSTSGSDAPSVTSKRQERKKFSKIPLHYPRTSRHTPLLSVPLGKPPTFDGEDYARWSDLMRFHLTSLHKSIWDVVEFGAQVPSVGDEDYDEDEVAQIEHFNSQATTILLASLSREEYNKVQGLKSANEVWDLLKTAHEGDELTKITKRETIEGELGRFRLRQGEEPQHMYNRLKTLVNQVRNLGSVKWDDHEVVKVILRSLIFLNPTQVQLIRGNPRYTQMTPEEVIGHFVSFECMIEGSRKINELDDPSTSEAQPVAFKATEEKKEESTPSRQPIDASKLDNEEMALVIKSFRQILKQRRGKDYKSRSKKVCYKCGKPGHFIAKCPLSSDSDRGDDKKGRRKEKKRYHKKRGGDAHVCREWDSDESSTDSSADEDAANIAVTKGLLFPNVGHKCLMAKDGKRKKVKSRSSTKYESSSDDNASDEEDNLRTLFADLNMQQKEKLNELISAIHEKDDLLDSQEDCLIKENKKHVKVKNAYALEVEKCEKLSSELSTCRETIDNLRNENASLNAKVDSHVCDVSIPNPRDNNDDLLARIEELNISLASLRVENENLIAKAKDLDVCNATISDLRDKNDILRAKIVELNSCKPSTSTVEHVSICTRCRDVDVNAIHDHMALIKQQNDHIAKLDAKIAEHNLENEKFKFARSMLYSGRRPGIKDGIGFQRGDNVKLSAPPKRLSNFVKGKAPMPQDNEGYILYPAGYPESKIRRTHSRKSHSGPNHAFMYKGETSSARQPARPLVPRXKTPSASNDHDISFNTFDASYVLTNKSGKVYASGGSSWILDSGCTNHMTGEKKMFSSYEKNQDPQRAITFGDGNQGVTVFRRSDDSIAFKGVLEGQLYL

SEQ ID NO: 10151 - protein, 550 aa, Zea mays
  unsure (1)..(550): unsure at all Xaa locations
  Clone ID: TF_ZmC7465_25.pep
MSGAFAKREIETGDKSASSGRTHSRESAHKHKEESSSSIKSQRKGDKKKKMKKVVYYETDSSSPSTSGSESASATSKRHERKKYSKMPLRYPRISKCTPLLSVPLGKPPMLEGEDYSMWSDKMRHHLTSLHKSIWDVVEYGAQVPKKGDKDYDSEEVEQIQHFNSQATTILLASLSREEYNKVQGLKSAKEIWDVLKTTHEGDEVTKITKRETIEGELGHFMLHQGEEPQAMYNRLKTLVNQVRNLGRTKWDDHEMVKVILRSLVFLNPTQVQMIRGDPRYTLMSPEEVIGKFVSFELMIKGSKQIIERGATSTPEVQPVAFKATEEKKEESTSSRLPIDASKLDNEEMALIIKSFRQILKQRKGRDYKPRSKKVCYKCGKPGHFIAKCPLSSDSDRDNDKKGKRREKKRYYKKKGGDAHVCREWDSDESLKGKCALGPFLSILVIXGLLFPNVGHKCLMAKDGKRKKVKSRSSTKYETSSDEDDASNEEDNLRVLFANLNMEQKEKLNELISEIHEKDDLMDSQEDFLIKGNYXHVKNKKAYALKSTCR

SEQ ID NO: 10152 - protein, 1602 aa, Zea mays
  unsure (1)..(1602): unsure at all Xaa locations
  Clone ID: TF_ZmC951_286.pep
MSGDHAKKEMETGEKPTTSHGSTSSEESRTKRKEKKKISSNKGKEKKSSSHHKDKKEKSSSHKPHRSGDKKKRMRKVVYYETDSSSASTSGSDAASVTSKRQERKKYSKIPLRYPRISKHTPLLSVPLGKPPTFDGEDYARWSDLMRFHLTSLHKSIWDVVEFGAQVPSVGDKDYDEDEVTQIEHFNSQATTILLASLSREEYNKVQGLKSAKEVWDVLKTAHEGDELTKITKRKTIEGELGRFRLRKGEEPQHMYNRLKTLVNQVRNLGSVKWDDHEVVKIYXMTPEEVIGNFVSFELMIKGSKKINELDDPSTSEAQPVAFKATEEKKEESTPSRTPIDASKLDNEEMTLIIKSFRQILKQRRGKDYKPRSKKVCYKCGKPGHFIAKCPLSSDSDRGDDKKGRRKEKKKHYKKRGGDAHVCREWDSEESSTDSSSDEDATNIAVTKGLLFPNVGHKCLMAKDGKKKKVKSRSSTKYETSSDEDNASNEEDNLRILFANLNMQQKEKLNELISAIHEKDDLLDSQEDFLIKENKKHVKVKNAYALEVEKCEKLSCELSTCQETIDNLRNENANLLAKVDSHVCDVSTPNPRDDNVDLLAKTDELNVSLASLRIENEKLLAKAKDFDVTISNLRSENDVLHAKVVELKSCKPSTSTVKHVSICTRCRDIDVDAIHDQMTLIKQQNDHIAILDAKIVEHNLENEKFKFARSMLYNGRCPGIKDGIGFQRGDNVKLNAPPKRLSNFVKGKALMPQDNEGYILYPAGYPESKIRRIHSRKSHSGPNHTFMYKGETSSSRQPTRAKLPKKKTPNASNDHNISFKTFDASYVPTNKSGKVYASGGSSWIIDSGCTNHMTGEKKMFSSYEKNQDPQRAITFGDGNQGLVKGVTVFRRSDDSIAFKGVLEGINPEYGILSKSYPTKEKTLKGMLVMWESSKQVRKILKTSRKVANAPGLAFVNRLRMEGDVPDDGWASSVIGRFGEHQGHMRTLEQGTEGRELTGIELAAFTALRRLWHTQFIDPIDGGVQFRKVVLAAGDGEGLWRHGFVSTAVAGSPASEKSQTQETLKGFLRRAQNEFGLRIKKIRSDNGTEFKNSQIEGFLEEEGIKHEFSSPYTPQQNGVVERKNRTLLDMTRTMLDEYKTPDRFWAEAVNTACYAINRLYLHRILKKTSYELLTGKKPNISYFRVFGSKCFILVKRGRKSKFAPKTVEGFLLGYNSNTRAYRVFNKSSGLVEVSCDVVFDETNGSQVEQVDLDEIGEEEAPCIALRNMSIGDVCPKESEEPPNEQDQPSSSTQASPPTQIEDEAQPPQDDGNDQGGDTNDQDKEDEEPRPPHPRVHQAIQRDHPVDTILDDIHKGVSTKSRVAHFCEHYSFVSSIKPHRVEEALQDSDWVMAMQEELNNFTRNEVWHLVPRPNQNVVGTKWVFRNKQDEHGVVTRNKARLVANGYSQVEGLDFGETYAPVARLESIRILLAYATYHGFKLYQMDVKSAFLNGPIKEEVYVEQPPGFEDSEYPNHVYRLSKALYGLKQAPRAWYECLRDFLIANGFKVGKADPTLFTKTLDNDLFVCQIYVDDIIFGSTNESTCEEFSRIMTQKFEMSMMGELK

SEQ ID NO: 10153 - protein, 1800 aa, Zea mays
  Clone ID: TF_ZmC951_300.pep
MSGDHAKKEMETGDDKPTTSQGSTSSSSEESRTKRREKKKKSSKRKEKRSSSSHHKEKKEKSSHKPHRSGDKHKRMRKVVFYETDTSSTSTSGSDAASVTSKRQERKKYSKIPLRYPRVPKHTPLLSVPLGKPPTFNGEDYAMWSNLMQFHLISLHKRLWDVVEYGVQVPSVGDEDYDTDEVAQIEHFNSQATTILLASLSKEEYNKVQGLKNAKEIWDLLKTAHEGDELTKITKRETIEGELGRFRLRQGEEPQDMYNRLKTLVNQVRNLGSTKWDDHEVVKVILRALIFLNPTQVQLIRGNPRYTQMTPEEVIGNFVSFECMIKGSKKINELDEPSTSEAQPVAFKATEEKKEESTPSRQPIDASKLDNEEMTLIIKSFRQILKQRKGKDYKSRSKKVCYKCGKPGHFIAKCPLSSDSDRDNDKRGKRKEKKKYYKKKGGDAHVCREWDSDESSSDSSDDEDAANIAVTKGLLFPNVGHKCLMAKDGKKKVKSKSSTKYETSSDEDDKNEEDNLRILFANLNMEQKEKLNELISAIHEKDDLLDSQEDFLIKENKKHVKVKNAYALEREKCEKLSSELSTCHEILDNLRNENANLLAKVDSHVCIDPRNDDVDLLARIDELNASIASLRNENEKLIAKAKDFDVCNTTISDLRTKNDLLHAKVIELKSCKPSTSTIEHVSICTRCRDINVDAIHDHLALIKKQNDHIAQLNAKIREHDLENEKFKLARSMLYNGRRPGIKDGIGFQRGNNVKINAPPKNLSNFVKGKAPMPQDNEGYILYPAGYPENKIKKIHSRKSHSGPNYAFMYKGETSRSRQPTHAKLPRKKTINASNDHAISFKTFDASYVLTSKSGKVYASGGSSWILDSGCTNHMTGEKRMFSSYEKNKDPQRAITFGDGNQGLVKGVTVFRRSDDSIAFKGVLEGQLYLVDFDRAELDTCLIAKTNMGWLWHRRLAHVGMKNLHKLLKGEHILGLTNVHFEKDRICSACQAGKQVGTHHPHKNIMTTDRPLELLHMDLFGPIAYISIGGSKYCLVIVDDYSRFTWVFFLQEKSQTQETLKGFLRRAQNEFGLRIKKIRSDNGTEFKNSQIESFLEEEGIKHEFSSPYTPQQNGVVERKNRTLLDMARTMLDEYKTPDRFWAEAVNTACYAINRLYLHRILKKTSYELLTEGFLLGYDSNTRAYRVFNKSTGLVEVSCDVVFDETNGSQVEQVDLDEIGEEQAPCIALRNMSIGDVCPKESEEPSNTQDQPSSSTQASPPTQNEDEAQVDEGQNQEDEPPQDDGNDQGGDANDQEKEDEEEPRPPHPRVHQAIQRDHPVDTILGDIHKGVTTRSRVAHFCEHYSFVSSIEPHKVEEALQDSDWVVAMQEELNNFTRNEVWHLVPRPNQNVVGTKWVFRNKQDEHGVVTRNKARLVAKGYSQVEGLDFGETYAPVARLESIRILLAYATYHGFKLYQMDVKSAFLNGPIKEEVYVEQPPGFEDSEYPNHVYRLSKALYGLKQAPRAWYECLRDFLIANGFKVGKADPTLFTKTLENDLFVCQIYVDDIIFGSTNKSTCEEFSRIMTQKFEMSMMGELKYFLGFQVKQLQEGTFISQTKYTQDILAKFGMKDAKPIKTPMGTNGHLDLDTGGCKINRKSTSGTCQFLGRSLVSWASKKQNSVALSTAEAEYIAAGEESTSRALMIPFLAIHANKGEKCQKFIYNYAKSTVRNTVDYSGQEKLFGKTGQARTVRALAADRPRHKNNPRTEPMQKSKSVLWTVRRKSKDRPSPCADRPASGADRPGRTVRTRRADRPRSAEWPNG

SEQ ID NO: 10154 - protein, 1531 aa, Zea mays
  Clone ID: TF_ZmC951_302.pep
MRDLGTGDKTASSRRTHSRESAHKHKEKSSSSIKSHRMGDKKKKMRKVVYYETDSSSPSTSGSESASTTSKSQERKKYSKMPLRYPHISRRTPLLSVPLGKPPMFEGEDYPMWSDKMRHHLTSLHKSIWDIVEYGVQVPKKGDEDYDSEEVKQIQHFNSQATTILLASLSREEYNKVQGLKSAKEIWDVLKTAHEGDEVTKITKREMIEGELGRFRLRQGEEPQDMYNQLKTLVNQVRNLGSKKWDDHKMVKVILRSLVFLNPTQVQLIRGNPRYTLMTPEEVIGNFVSFELMIKGSKKIVELDGPSTSEAQPVAFKATEEKKEESTSSRTPIDASKLDNEEMALIIKSFRQILKQMRGKDYKSRSKKVCYKCGKPGHFIAKCPLCSDSDRDNDKKGKRREKKRYHKKRGSDAHVCREWNSNESSSDSSSDEDAANIAITKGLLFPNVGHKCLMAEDGKRKKVKSKSSSKYATSSDEDNSSDEEDNLRTLFANLNMQQKEKLNELISAIHEKDELLDSQEDFLIKENKKHVKVDSNACDDSISNIRDDNVNLLAKIEELNVSLASLRNENVKSIAKAKDLDVCNVTISNLRNENDILHAKIVELKSCKPSTSTIEHVSICTRCRDINVEAIHDHLALIKKKNDHIAQLNAKINEHDLENEKIKFARSMLYSGRCPGIKDGIGFQKGDNVKLNAPPKRLSNFVKGKAPMPQDNEGYILNPAGYPEHKIRRNHSRKSHSGPNHAFMYKGETSSSRQSTRAKLPKKKTPIASNDSNISFKTFDAYYVLTNKSGKIVAKYVGGKHKGSKTCVWVPKVLVSNVKGPKIVWEKSHTQETLKGFLRRAQNEFGLRIKKIRSDNGTEFKNSQIEGFLEEEGIKHEFSSPYMPQQNGVVERKNRTLLDMARTMLDEYKTSDRFWAEAVNTACYAINRLYLHRILKKTSYELLTGKKPNVSYFRVFGSKCFILVKRGRKSKFAPKAVEGFLLGYDSNTRAYRVFNKSSGLVEVSCDIVFDETNGSQVEQVDLDELDDEEAPCVALRNMSIGDVCPKESEEPPQAQDQPSSSTQASPPTQDEGKAQNDEGEDQEVEPPQEESNDQGGDAHDQDEEDEQATRPTHPRPHKVEEALQDSDWVVAMQEELNNFTRNEVWHLVPRPNQNVVGTKWVFRNKQDEHGVVTRNKARLVAKGYSQVEGLNFGETYAPVARLESIRILLSYATYHGFKLYQMDVKSAFLNGPIKEEVYVEQPPGFEDSEYPNHVYKLSKALYGLKQAPRAWYESLRDFLITNGFKVGKADSTLFTKTLENDLFICQIYVDDIIFGSTNESTCKEFSRIMTQKFEMSMMGELKYFLGFEVKQLQEGTFISQTKYIQDILNKFGMKDAKPIKTPMGTNGHLDLDTGGCKINRKSTSGTCQFLGRSLVSWASKKQNSVALSTAEAEYIATGHCCAQLLWMRQTLRDYGYKLTKVPLLCDNESAIRMADNPVEHSRTKHIVIRYHFLRDHQQKGDIEIAYINTKEQLADIFTKPLDEQTFTKLRH

SEQ ID NO: 10155 - protein, 1776 aa, Zea mays
  Clone ID: TF_ZmC951_303.pep
MSGDHTKKEMVTGEKPATSHEKAPSGESCNKGKEKESPSHKSHRSGDKKKKMRKVVYYETDSSSPSTSGSDTPSVTSKRHERKKFSKIPLRYPRFPKHTPLLSVPLGKPPTFDGEDYARWSDLMRYHLTSLHKSIWDVIEFGVQVPSVGDEDYDEDEVAQIQHFNAQATTILLASLSREEYNKVQGLKRAKEIWDTLKTAHEGDEVTKITKRETIKGELGRFRLRQGEEPQDMYNRLKTLVNQVRNLGSKKWDDHEMVKVILRSLVFLNPTQVQLIRGNPRYTLMTPEEVIGNFVSFELMIKGSKKINELDGPSTSEAQPVAFKATEKKKEESTSSRQPIDASKLYNEEMALIIKSFRQILKQRRGEDYRPRSKKVCYKCGKPGHFIAKCPLSSDSDRGDDKKGRRKEKKRYYKKKGDDAHVCREWDSDESSSDSSSDEDAANITVTKGLLFPNVGHKCLMAKDSKNKKVKSKSSTRYESSSDEENASDEEDNLRTLFANLNMQQKEKLNELISAIHDKDDLLDSQEDFLIKENKKHVKVKNAYALEVEKCEKLSTLIKKQNDHIAQLNAKINEHDLENEKFKFARSMLYSGRRPGIKDGIGFQKGDNVKLNAPPKRLSNFVKGKAPMPQDNEGYILYPAGYPESKIRRIHSRKSHSGPNHAFMYKGETSSSRESTRAKLPKKKTPSASNDHDISFKTFDASYVLTNKSDKVVAKFVGGKHKGSKTCVWVPKVLVSNAKGPKTVWVYASGGSSWIIDSGCTNHMTGEKNMFSSYEKNQDPQRAITFGDGNQGVTVFRRSDDSIAFKGVLEGQLYLVDFDKAELDTCLIAKTNMGWLWHRRLAHVGMKNLHKLLKGEHILGLTNVHFEKDRICSACQAGKQVGIHHPHKNIMTTDRPLELLHMDLFGPIAYISIGGSKYCLVIVDDYSRFTWVFFLQEKSHTQETLKGFLRRAQNEFGLRIKKIRSDNGTEFKNSQIEGFLEEEGIKHEFSSPYTPQQNGVVQRKNRTLLDMARTMLDEYKTSDRFWVEAVNTACYAINRLYLHRILKKTSYELLIGKKPNISYFRVFGSKCFILVKRGRKSKFAPKTVEDFLLGYDSNTRAYRVFNKSSGLVEVSCDVVFGETNGSQVEQVDLDEIGNEEAPCIELRNMSIGDVCPKEFEEPPNAQDQPSSSTQASPPTQNEDEAKVDEGQDPRDEPPQDDDNDQGGDANDQDKEDEEPRPPHPRVHQAIQRDHPVDTILGDIHKGVTTRSRVAHFCEHYYFVSSIEPHRVEEALQDSDWVVAMQEELNNFTRNEVWHLVPRPNQNVVGTKWVFRNKQDEHGVVTRNKARLVAKGYSQVEGLDFGETYALVARLESIRILLAYATYHGFKLYQMDVKSAFLNGPIKEEVYVEQPPGFKDSEYPNHVYKLSKALYGLKQAPRAWYECLRDFLITNGFKVGKADPIIFTKTLNNDLFVCQIYVDDIIFGSTNESTCEEFSRIMTQKFEMSMMGELKYFLGFQLKQLQEGTFISQTKYIQDILNKFGMKDAKPIKTPMGTNGHLDLDTEGKSVDQKVYRSMIGSLLYLCASRPDIMLSVCMCARFQADPKEAHLMAVKRILRYLVHTPKFGLWYPRGSTFDLIGYSDADWAGCKINRKSTSGTCQFLGRSLVSWASKKKNSIALSTAEAEYIVAGHCCAQLLWMRQTLRDYGYKLTKVPLLCDNESAIRMADNPVEHSRTKHIAIRYHFLRDHQQKGDIEIAYINTKEQLADIFTKPLDEQSFNKLRHELNILDSRNFF

SEQ ID NO: 10156 - protein, 1216 aa, Zea mays
  unsure (1)..(1216): unsure at all Xaa locations
  Clone ID: TF_ZmC951_320.pep
MSGEHAKKEIMTGDDKSTIHGKAPSGESDNKMKGAPSHTKSHRSGDKKKKMKKVVYYETDSSSPSTSGSDTPSVTSKRHERKKFRDEAYDSDEVAQIRHFDSQATTILLASLSREEYNKVQGLKSAKEIWDVLKTVHEGDEVTKITKRETIEGKLGRFILNQGEEPQAMYNRLKTLVNQVRNLGSTKWDDHEMVKVILRSLVFRNPMQVQLIRGDPRYKLMSPEEVIGKFVSFELMIKGSKQIVEQGGTSTPEVQPVAFKATEEKKEESMSSRLPIDASKLDNEEMALIIKSFRQILKQRRGKDYKSRFKKVCYKCGKPGHFIAKCPLSSDSDRGDDKKGRRKEKKKYYKKKGDDAHVCREWDSDESSTYSSSDEDAANIAVTKGLLFPNVGHKCLMAKNGKKKKVEKCENLSSELSTCHDVISNLRNENAKLIAKVEKSNVCDDSIDNLRNDNASSIAKIEKLNASLASLRIENDKLTAKAKDLDVCNASISNLRDENAILHAKIVELNDCKPSTSSIDHVSICTRCRDINIDAIHGHLAMIKQQNDHIAKLDAKIVEHELENEKFKFARSMLYSGRRPGITDGIGFQQGDNVKLNAPPKRLSNFVKGKAPMPQDNEGYILYPIGYPEHKIRRIHSRKSHSGPNHAFIYKSETSSSRQSTHAKLPKKKTPIASNDHNISFKTFDASYVLTNKSGKVVAKYVGGKHKGGCTNHMTGEKKMFSSYEKNHDPQRAITFVDGNQGVTVFRRSDDSVAFKGVLEGQLYLVDFDRAELDTFLIAKTNMGWLWHRRLAHVGMKNLHKLLKGEHILGLTNVHFEKDRVRSACQAGKQVGVHHPYKNIMTTDRPLELLHMDLFGPIAYISIGGXKSQTQETLKGFLRRXERKNRTLLDMARTMLDEYKTSDRFWAEAVNTACYAINRLYLHRILKKTLYELLIGKKPNVSYFRVFGSKCFILVKRGRKSKFAPKAVEGLLLGYDSNTRAYRVFNKSTGLVEVSCDIVFDETNGSQVEQVDLDELDDEEALCIALRNMSIGDVCPKKSEEPPQAQDQPSSPMQASPPTQDEDQDQDNDDEDQEEPPQEEDNDQRGDANDQDKEDDEGTKWVFRNKQDEHGVVTRNKARLVAKGYSQVEGLDFGETYAPVARLESIRILLAYATYHGFKLYQMDVKSAFLNGPIKEEVYVEQPPSFEDSEYPNHVYKLXKALYGLKQAPRAWYECL

SEQ ID NO: 10157 - protein, 1155 aa, Zea mays
  unsure (1)..(1155): unsure at all Xaa locations
  Clone ID: TF_ZmC951_356.pep
MSARSITAHEGXEVTKITKRETIEGELGRFVLNQGEEPQAMYNRLKTLVNQVRNLESTKWDDHEMVKVILRSLVFRNPTQVQLIHGDPRYKLMSLEEVIGKFVSFELMIKGSKHIVDLEQGDSSTPEAQPVAFKATEEKKEDSTPSRIPIDASKLDNEEMALIIKSFRQILKQRRGKDYKPRSKKVCYKCGKPGHFIAKCPLSSDSDRGDDKKGRRKEKKRYYKKKGGDAHVCREWDSDESSTDSSSYEDAANIAVTKGLLFPNVGHKCLMAKDGKKKKVKSKSSTKYATSSDEANSSDDEDNLRTLFANLNMQQKEKLNELISAIHEKDELLDSQEDFLIKENKKHVKVKNAYALEVEKCEKLSSELSTCHDIIANLRNENARLIAKVDSNVCDDSIPNLRDDNVSLLAKIEELNVSLASLRNEYEKLIAKAKDLDVCNVTVSNLRSENDILHAKIVELKSCKPSTSTVEHVSICTRCRDINVDAIHDHLALIKKQNNHIAQLNAKINEHDLENENFKFARSMLYSGRHPGIKDGIGFQKGDNVKLNAPPKRLSNFVKGKAPMPQDNEGYILYPAGYPEHKIRRIHSRKSHSGPNHAFMYKGETSSSRQSTRAKLPKKKTPIASNDFNISFKTFDASYVLTNKSGKVVAKYVGGKHKGSKTCVWVPKVLVSNVKGPKIVWVYASGGSSWIIDSGCTNHMTGEKKMFSSYEKNQDPQQAITFRDGNQDSLDYNLLSVSQLCKMGYNYLFTDIGVTVFRRSDDSIAFKGVLEGQLYLVDFDRAELDTCLIAKTNIGWLWHRRLAHVGMKNLHKLLKGEHILGLTNVHFEKDRVCSACQAGKQVGVHHPHKNIMTTDRPLELLHMDLSIGPIAYISIGGDQEIRSATGPRFKNSQIEGFLEEEGIKHEFSSPYTPQQNGVVERKNRTLLDMARTMLDEYKTSNWFWAKAVNTACYAINRLYLHRILKKTSYELLTGKKPNVSYFRVFGSKCFILVKRGRKSKFAPKAVEGFLLGYDSNTRAYRVFNKSSGLVEVSCDIVFDETNGSQVEQVDLNELDDEEALCVALRNMSIGDVCPKESEEPPQAQDQPSSSMQAAPPTNDEDEAQNDEGEDQGVKPPQEESNDQGXDAHDQDKEDEQVPKPPHPRVHQAIQRDHPV

SEQ ID NO: 10158 - protein, 1472 aa, Zea mays
  unsure (1)..(1472): unsure at all Xaa locations
  Clone ID: TF_ZmC951_357.pep
MSGDHAKKMVIGGEKSATSHGKAPSRESANNKKDGSPSRIRSHKSGEKKKMKKVVYYETDSSSPSTSGSDAASVTSKRQERKKYNKIPLRYPCIPKHTPLLSVPLGKPPTFDGEDYSRWSDMMRYHLTSLHKSIWDVVEFGVQVPSVGDEDYDEDEVAQIVHFNSQATTILLTSLSREEYNKVQGLKSAKEIWDVLKTTHEGDEVTKITKRETIEGELSRFRLRQGEKPQEMYNRLKTLVNQVRNLGSKKWDDHEMVKVILRSLVFLNPTQVQLIRGDPRYTLMSPEEVIGKFVSFELMIKGSKKIIEQDGPSTPEAQPVAFKVTKEKKEESTSSRLPIDASKLDNEEMALIIKSFRQILKQRWRKDYKSRSNKVCYKCGKPGHFIAKCPLSSDSDRGDDKKGRRREKKRFHKKKGGDAHVCRKWDSDESSTDSSSNEDAANIAVSPXTKGLLFPNVGHKCLMAKDGKRKKXEDNSSDEEDNLRTLFANLNMQQKEKLNELISAIHEKDELLDTQEDFLIKENKKHVKVKNAYALEVDKCEKLSNELSMCHDIIANLRNENDKLIAKVDSNVCDDLIPNHRDDNVSLLAKIEELNVSLASLKIENEKLIAKARDLDVCNITISNLRSENDILHAKIVELKSCKPSTSTVEHVSICTRCRDINVDAIHDHLALIKKQNDHIAQLNAKINEHDLENEKFKFARSMLYSGRRPGIKDGIGFQKGDNVKLNAPPKRLSNFVKGKALMPQDNEGYILYPAGYPEHKIRRIHSRKSHSGPNHAFMYKGETSSSRQSTRAKLHKKKTPIASNDSNISFKAFDASYVLTNKSGKVVAKYVGSKHKGSKTCVWVYASGGSSWIIDSGCTNHMTGEKKMFSSYEKNQDPQRAITFGDGNQGVTVFRRSDDSVAFKGVLEGQLYLEKSHTQETLKGFLRRTQNEFGLRIKKIRSDNRTEFKNSQIEGFLEEEGIRHEFSSPYTPQQNGVVERKNRTLLDMARTMLDEYKTSDRFWAEAVNTACYAINRLYLHRIFKKTSYELLTGKKTNVSYFRVFGSKCFILVKRGRKSKFVPKAVEGFLLGYDSNTRAYRVFNKSSGLVEVSCDIVFDETNGSQVEQVDLDELDDEEAPCVALRNISIRDVCPKESEEPPQAQDQPSSSMQASPPTQDEDEAQNDEGEDQEEEPPQEESNDQGGARLESIRILLAYATYHGFKLYQMDVKSVFLNGPIKEEVYVEQPPGFEDSEYPNYVYKLSKALYGLKQALRAWIMTQKIEMSMMGELKYFLGFQVKQLQEGTFISQTKYIQDILNKFGMKDAKPIKTPMGTNGHLDLDTGGCKINRKSTSGTCQFLGRSLVSWASKKQNSVALSTAEAEYIAVGHCCAQLLWMRQTLRDYGYKLTKVPLLCDNESAIRMADNPVEHSHTKHIAIRYHFLRDRQQKGDIEIAYINTKEQLADIFTKPLDEQTFNKLRHELNILDSRNFF

SEQ ID NO: 10159 - protein, 1601 aa, Zea mays
  Clone ID: TF_ZmC951_361.pep
MREIGTGNKSASSGRTYSRESAHKHKEESSSSIKSQRKGDKKKKMKKVVYYETDSSSPSTSVSESASTTSKRHERKKYSKMPLRYPRISKRTPLLSVPLVKPPMFEGEDYSMWSDKMRHHLTSLHKSIWDIVEYGAQVPKKGDKDYDLEEVEQIQHFNSQATTILLASLSREEYNKVQGLKSAKEIWDVLKSAHEGDETLVNQVRNLGSTKWDDHEMVKVILRSLVFLNPTQVQLIRGDPRYKLMSPEEAIRKFVSFELMIKGSKQIIEQGATSTPEVQPVVFKATEEKKEESTPSRLPIDASKLDNEEMALIIKSFRQIFKQRKGRDYKPRSKKVCYKCGKPGHFIAKCPLSSDSDRDDDKKGKRREKKRYYKNKGGDAHVCREWDSEESSTDSSSDEDAANIAVTKGLLFPNVVHKCLMAKDGKKKVKSRSSTKYATSSDEASSSDDEDDLLTLFANLNMQQKEKLNELISAIHDKDELLDSQEDFLIKENKKHVKVKNAYALEVEKCEKITSELSTCHDVISNLRNENAKLIAKVENLNVCDDSLVNLRNDNPSLITKIDKLNASLYSLKIENEKLIAKDKDLNVCNVSISNLRDENAILHAKIVELNTCKPSTSTVEHVTICTRCRDINVDAIHDHLALIKKQNDHIAQLSAKNNEHDLENEKFKFARSMLHSGRRPGIKDGIGFQQGDNVKLNAPKKLPNFVKGKAPMVYASGGSSWIIDSGCTNHMTGEKRMFSSYEKNHDPQRAITFGDGNQGVTVFRRSDDSVAFKGVLEGQLYLVDFDRAELDTCLIAKTNMGWLWHRRLAHVGMKNLHKLLKGEHILGLTNVHFEKDRVCSACQAGKQVGVHHPHKNIMTTDRSLELLHMDLFGPIAYISIDGSKYCLVIVEDYSRFTWVFFFQEKSQTQETIKGFLRRAQNEFGLRIKKIRSDNGTEFKNSQIEGFLEDEGIKHEFSSPYTPQQNGVVERKNRTLLDMARTMLDEYKTSDRFWVEAINTACYAINRLYLHQIVKKTSYELLTGRKSKFAPKAVEGFLLGYDSNTRAYRVFNKSTGLVEVSCDIVFDETSGSQVEQVDLDELDDEEAPCVALRNMSIGDVCPKEFEEPPQAQDQPSSSMQASPPTQDEDQAQEDENEDQEDEPPQEGDNDLGGDAHDQDKEDDDGLRPPHPRVHQAIQRDHPVNTILDDIQKGITNRSRVAHFCEHYSFVSSIEPYKIEDALRDSDWVLAMQEELNNFTRNEWVFRNKQDEHGVVIRNKARLVAKGYSQVEGLDFGETYAPVARLESIRILLAHATYHGFKLYQMDVKSAFLNGPIKEEVYVEQPPGFEDSEYPNHVYKLSKALYGLKQAPRACRIMIQKFKMSMMGELKYFLGFQVKQLQEGTFISQMKYIQDILTKFGMKDAKPIKTPMGTNGLRAVKRILRYLVYTHKFGLWYPKGSTFDLIGYSDADWAGCKIDRKSTSGTCQFLGRSLVSWTSKKQNSVALSTAEAEYIAAGHCCAQLIWMRQTLRNYGYKLTKVPLLCDNESAIRMVDNPVEHSHTKHIAIRYHFLRDHQQWGDIEIAYINTKEQLADIFTKPLDEKTFTKLRHELNILDSRNFD

SEQ ID NO: 10160 - protein, 1028 aa, Zea mays
  Clone ID: TF_ZmC951_387.pep
MSGDHAKKEMETGDKPATSHGKASSEESRKKEKGKEKKASSHKSHRSGDKKKKMRKVVYYETDSSSPSTSGSDASSVTSKRHERNKYSKPPFFDGEDYCMWSDKMRHHLTSLHASIWDIVEFGAQEYNKVQGLKSAKEIWDVLKTAHEGDEVTKITKRETIEGELGRFILNEGEKPQAMYNRLKTLVNQVRNLRSTKWDDHEMVKVILRSLVFRNPTQVQLIRGDPRYKLMSPEEVIGKFVSFELMIKGFKQIINLEQGGASTLEVQPVAFKATEEKKEESTSSRLPIDASKLDNEEMTLIIKSFCQILKQRRGKDYKPRSKKVCYKCGKPGHFIAKCPLSSDSDRGDDKKGKRREKKRYYKKKGGDAHVCREWDSEESSFDSSSDEDAAHIAVTKGLLFPNVDHKCLMAKDGKRKKVKSRSSTKYASSSDEYHFSDEEDNLCILFANLNMQQKEKLNELISAIHEKDELLDSQEDFLIKENKKHVKVKDAYALEVQKCEKISSELSKCHDIITNLRNENASLIAKVDSNVCDDSISNFRDDNANLLARIEKLNDSLIRLRNENENLIAKAKDLDVCNVTISNLRSENDILHVKIVELKSCKPSTSTVEHVSICTRCRDINVDAIHDHLDLIKKQNDHIAQFNAKINEHDLENEKFKFARSMLYSGRCPGINDDIGFQKGDNVKLNVPPKRLSNFVKGKAPMPQDNEGYILYPVGYPEHNIRRIHSRKSHSGPSHAFMYKGETSSSRQSTRAKLPKKKTPIASNDSNISFKTFDASYVLTNKSAKEKSHTQETLKGFLRRAQNEFGLRIKKIRSDNGTEFKNSQIEGFLEEEGIKHEFSSPYTPQQNGVVERKNRTLLDMARTMLDEYKTSDRFWAEAVNTACYAINRLYLHRILKKTSYELLTGKKPNVSYFRVFGSKCFILVKRGRKSKFAPKAVEDFLLGYDSNTRAYRVFNKSSRLVEVSCDIVFDETNGSQVEQVDVDEIGDEEALCVALRNMSIGDVCPKESEEPPNAQDQPSSSMQESPPT

SEQ ID NO: 10161 - protein, 2578 aa, Zea mays
  unsure (1)..(2578): unsure at all Xaa locations
  Clone ID: TF_ZmC951_391.pep
MSGEHAKKEMETGDKPATSHGKASSEESHKKGKGKEKKASSHKSHRSGDKKKKMRKVVYYETDTSSPSTSGSDAPFVTSKRHERKKFSKIPLHYPRTSRHTPLLSVPLGKPPTFDGEDYARWSELMKFHLTSLHKSIWNVVEFGAQVPSVGDEDYDEDEVAQIEHFNSQATTILLASLSREEYNKVQGLKRAKEVWDVLKTAHEGDELTKITKRETIEGELGRFRLRQGEEPQDMYNRLKTLVNQVRNLGSKKWDDHEMVKVILRSLIFLNPTQVQLIRGNPRYTLMTPEEVIGNFVSFEFMIKGSRKINELDGPSTSEAQPIAFKATEEKESTPSRTPIDASKLDNEKMALVIKSFRQILKQRRGKDYKPRSKKVCYKCGKPGHFIAKCPISSDNDRGDDKKGRRKEKKRYYKKKGGDAHVCREWDSDESSSDSSDDEDAANIVVTKGLLFPNVGHKCLMAKDGKKKKVKSKSSTRYESSSDDNASDEEDNLRTLFANLNMQQKEKLNELISVIHEKDDLLDSQEDFLIKENKKHVKVKNAYALEVEKCKKLSSELSTCHETIDNLRNENSNLLAKVDSIACNVSIPNLRNDNDDLLAKIEELNMSLASLRIENEKLLAKAKELDVCNATISDLRTKNDILHAKVVELKSCKPSTSIVEHTSICTRCRDVNIDAIHDHMALIKQQNDHIAKLDAKIAEHDLENENFKFARSMLYRGRRPGIKDGIGFQQEGNVKINAPPKKLSNFVKGKAPMSQDNEGYILYPVGYPESKIRRIHSRKSHSGPNHAFMYKGETSSSRQPTRAKLPKKKTPSASNDHDISFKTFDASYVLTNKSGKVYASGVSSWIIDSRCTNHMTREKKMFSSYEKNQDPQRAITFGDGNQGLVKGVTVFRRSDDSIAFKGVLEGQLYLVDFDRAELDTCLIAKTNMGWLWHRRLAYVGMKNLHKLLKGEHILGLTNVHFEKDREKSQTQETLKGFLRRTQNEFGLRIKKIRSDNGTEFKNSQIEGFLEEEGIKHEFSSPYMPQQNGVVERKNRTLLDMTRTMLDEYKTSDQFWAEAVNTACYAINRLYLHRILKKTSYELLTGKKPNISYFRVFGSKCFILVKRGRKSKFAPKTVEGFLLGYDSNTRAYRVFNKSSGQVEVSCDVVFDETNGSQVEQVDLDEIGNEEAPRIALRNMSIGDVCPKESEEPPNAQDQPSSSTQASPPTQNEDEAQVDEIEDQANEPPQDNGNDQGGDANDQDKEDEEQRPPHPRVHQAIQRDHPVDTILGDIHKGVTTRSRVAHFCEHYSFVSSIEPHRVEEALQDSDWVVAMQEKLNNFTRNEVWHLVPRPNQNVVGTKWVFRNKQDEHGVVTRNKARLVAKGYSQVEGLDFGETYAPVARLESIRILLAYATYHGFKLXYQMDVKSAFLNGPIKEEVYVEQPPDFEDSEYPNHVYKLSKALYGLKQAPRAWYECLRDFLITNGFKVGKADPTLFTKTLENDLFVCQIYVDDIIFGSTNESTCEEFSRIMTQKFEMSMMGEFKYFLGFQVKQLQEGTFLSQTKYTQDILNKFGMKDAKPIKTPMGTNGHLDLDEGGKSVDQKFRPIHPPSRRLSVGDEDYDEDEVAQIEHFNSQATTILLASLSREEYNKVQGLKSAKEVWDVLKTAHEGDELTKITKRETIEGELGRFRLRQGEEPQDMYNRLKTLVNQVRNLGSKKWDDHEVVKVILRSLIFLNPTQVQLIRGNPRYTLMTPEEVIGNFVSFEFMIKGSRKINELDDPSTSEAQPVAFKATEEKKEESTPSRTPIDASKLDNEEMTLVIKSFRQILKQRRGKDYKPRSKKVCYKCGKPGHFIAKCPLSSDSDRGDNKKRRRKEKKKYYKKKGGDAHVCREWDSDESSSDSSDDEDAANIAVTKGLLFPNVGHKCLMAKDDKKKKVKSKSSTRYESSSDDNASDEEDNLRTLFANLNMQQKEKLNELISAIHEKDDLLDSQEDFLIKENKKHVKVKNAYALEVEKCEKLSSELRTCHETIDNLRNENANLLAKVDSNVCDVSIPNLRNDNDNLLAKIEELNTSTLASLRIENEKLLAKAKELDVCNVTISDLRTKLDAKIAEHDLENEKFKFARSMLYRGRRPGIKDDIGFQQGGNVKLNAPPKKLSNFVKGKAPMPQDNEGYILYPAGYPNNKIRRIHSRKSHSGPNHAFMYKGETSSSRQPTRAKLPKKKTPSASNDHDISFKTFDASYVLTNKSGKLVAKYVGGKHKGSKTCVWVTKVLVSNAKGPKTIWEKSHTQETLKGFLRWAQNEFGLRIKKIRSDNGTEFKNSQIEGFLEEEGIKHEFSSPYTPQQNGVVERKNRTLLDMARTMLDEYKTSDRFWAEAVNTACYAINRLYLHRILNKTSYELLTDKKPNISYFRVFGSKCFILVKRGRKSKFAPKTVEGFLLGYDSNTKAYRVFNKSSGQVEVSCDVVFDETNGSQVEQVDLDEIGVEEAPCIALRNMSIGDVCPKESEEPPNAQDKPSSSTPASPPTQNEDEAQVDEVEDQANEPPQDDGNDQGGDANDQDKEDEEPRPPHPRVHQAIQRDHPADTILGDIHKGGNH

SEQ ID NO: 10162 - protein, 1413 aa, Zea mays
  unsure (1)..(1413): unsure at all Xaa locations
  Clone ID: TF_ZmC951_392.pep
MYNRPKTLVNQVHNLRSKKWDDHEVVKVILRSLVFLNPTQVQLIRGNPRYTLMTPEEVIGNFVSFELMIKGSKKINELDGPSMSEAQPVAFKATKEKKEESTSSRTPIDASKLDNEEMTLIIKSFRQILKQRKGKDYKPRSKKVCYKCGKPGHFIAKCPLSSDSDRGDDKKGRRKEKKRYYKKKGGDAHVCREWDSDESSTDSSSDEDAANIAVTKGLLFPNVGHKCLMAKDDKRKKVKSRSSTKYETSSDEDNASNEEDNLRILFANLNMQQKEKLNELISAIHEKDDLLDTQEDFLIKENKKHVKVKNAYTLEVENCEKLSSELSTCHDVITNLRNENANLIAKVDSNVCDVSIPNLRNDNVDLLAKIEELNISLASLRIENEKLLAKAKELDVCNASISDLRSKNDILHGKVVELKSCKPSTSTVEHTSICTRCRDINVDAIRDHLALIKKQNDHIAQLNAKIAEHDLENEKFKFARSMLYSGRRPGIKDDIGFQKGDNVKLNDPPKRLSNFVKGKAPMPQYNKGYILYPAGYPESKIGRIHSRKSHSGPNHAFMYKGETSSSRQSTCAKLPKKKTPSASNDHNISFKTFDASYVLTNKSDKIVAKYVGGKHKGSKTCVWVYASGGSSWIIDSGCTNHMTGEKKMFSSYEKNQDPQRAITFGDGNQDVGVTVFRRSDDSIAFKGVLEGQLYLVDFDRAELDTCLIAKTNMGWLWHRRLAHVGMKNLHKLLKGEHILGLTNVHFEKDRVCSACQAGKQVGVHHPHKNIMTTDTPLELLHMDVFGPIAYISIGGSKYCLVIVDDYYRFTWVLFLLEKSHTQETLKGFLRRAQNEFGLRIKKIRSDNGTKFKNSQIEGFLEEEGIKHEFSSPYPPQQNGVVERKNRTLLDMARTMLDEYKISDRFWAEAVNTACYAINRLYLHRILKKTSYELLTGKKLNVSYFRVFGSKCFILVKRGRKSKFAPKAVEGFLLGYDSNTRAYRVFNKSSGQVEVSCDIVFDETNGSQVEQVDLDEIGDEEAPCIALRNMSIGDVCPKESEEPPNAQDQPSSSTQASPPTQNEDEAQVDEGEDQTDEPPQDDDNNQGGDANDQDKEDEEPRPPHPRVHQAIQRDHPVDTILGDIHKGVTTRSRVAHFCEHYSFVSSIEPHRVEEALQDSDWVVAMQEELNNFTRNEVCHLVPRPNQNVVGTKWVFRNKQDEQPPGFEDSEYPNHVYKLSKALYGLKQAPRAWYECLRDFLITNGFKVGKADPTLFTKTLDNDLFVCQIYVDDIIFGSTNESACEEFSRIMTQKFKISMMGELKYFLGFQVKQLQEGTFISQTKYIQDILNKFGMKDAKPIKTPMGTNGHLDLDTGGKTVDXQRKSTSGTCQFLGRSLVSWASKKQNSVALSTAEAEYIAAGHCCAQLLWMRQTL

SEQ ID NO: 10163 - protein, 1358 aa, Zea mays
  Clone ID: TF_ZmC951_393.pep
MSGDHAKKDMVTGRKPATSHGKAPSGESYNKGKGKEKESPSHKSCRSGDKKKKMRKVVYYETDTSSPSTFGSDTPSITSKRHERKKFREEPQDMYNRLKTLVNQVRNLGSKKWDDHEMVKVILRSPVFLNPTQVQLIRGNPRYTLMSPEEVIGHFVSFELMIKGSKKINELDGPSTFEAQPVAFKATEEKKEESTSSRTPIDASKLDNEEMALVIKSFRQILKLRRGKNYKPRSKKVCYKCGKPGHFIAKCPLSSDSDRGDDKKGRRKEKKRYYKKGGDAHVCREWDSDESSTDSSSDEDAANMAVTKGLLFPNVGHKCLMAKDGKRKKVKSRFSTKYETSSDEENASNEEDNLCILFANLNMQQKEKLNELISAIHEKDDLLDTQEDFLIKENKKHVKIKNAYALEVEKCEKLSSELSTFHETIDNLRNENASLIAKVDSNACNVSISNLRDDNVDLLAKIEELNVTLASLRIENEKLIAKAKELDVCNVTISDLRDKNDILRAKIVELNSCKPSTSITEHVTICTRCRDVDVSAIHDHLSMIKQQNDHIAKLDAKIAEHELENEKFKFARSMLYNGRRPGIKDGIGFQQGGNVKLNAPPKKLSNFVKGKAPMPQDNEGYILYPAGYLEDKIRRIHSRKSHSGPNHAFMYKGETSSSRQPTRAKLPKKKTPSASNDHSILFKTFDASYVLTNKSGKVYASGGSSWIIDSGCTNHMTGEKKMFSSYEKNQDPQRAITFGDGNQGVTVFRRSDDSIAFKGVLEGQLYLVDFDRAELDTCLIAKTNMGWLWHRRLAHVGMKNLHKLLKGEHILGLTNEKSHTQETLKGFLRRAQNEFGLRIKKIRSDNGTEFKNSQIEGFLEEEGIKHEFFSLYTPQQNGVVERKNRNLLDMARTMLDEYKTSDRFWAEAVNTACYAINRLYLHRILKKTSYELLTEQVDLDEIGDEEASCITLRNMSIGDVCPKESEEPPNAQDQPSSSPQASPPTQNENEAQFDEGENQEDEPPQDDGNNQGGDANDQDKEDEEPRPPHPRVHQAIQRDHPVDTILDDIHKGVTTRSRVAHFCQHYSFVSSIEPHRVEEALQDSDWVVAMQEELNNFTRNEVWHLVPRPNQNVVGTKWVFHNKQDEHGVVTRNKARLVAKGYSQVEGLNFGETYAPVARLESIRILLAYATYHGFKLYQMDVKSAFLNGPIKEEVYVEQPPGFEDSEYPNHVYKLSKALYGLKQAPRAWYKCFRDFLITNGFKVGKVDPTLFTKTLENDLFVCQIYVDDIIFGSTNESTCEEFSRIMTQKFEMSMMGELKYFLGFQVKQLQEGTFISQTKYIQDILNKFGMKDAKPIKTPMGTNGHLDLDTEGDPHLI

SEQ ID NO: 10164 - protein, 1228 aa, Zea mays
  unsure (1)..(1228): unsure at all Xaa locations
  Clone ID: TF_ZmC951_397.pep
MSPEEVIGKFVSFELMIKGSNKIIEQDGPSTPEAQPVAFKATEEKKKESTSSRLPINASKLDNEEMALIIKSFRQILKQRRGKDYKSRTKKVCYKCGKPGHFIAKCPLSSDSDRGNDKKGKRREKKRYYKKKGGDAHVCREWDSDESSSDSSSDEDAANIVVTKGLLFPNVGHKCLMAKDDKRKKVKSRSSTKYASSSDEDNSSDEEDNLRTLFANLNMQQKEKLNELISAIHEKDELLDSQEDFLIKENKKHVKVKDAYALEVEKCEKLSSELSKCHDIITNLRNENTSLIAKVDSNLCDDSISNLRDDNANLLAKIEKLNDSLASLRNDNEKLIAKAKDLDVCNVTISNLRSENDILHAKIVELKSCKPSTSTVEHVSINVDAIHDHLALIKKQNDHIAQLNAKINEHDLENEKFKFARSMLYSGRRPGIKDGIGFQKGDNVKLNASPKRLSNFVKGKAPMPQDNEGYILYPAGYPEHKIRRIHSRKSHSGPNHAFMYKGETSSSRQSTRAKLPRKKTSIASNDSNISFKTFDASYVLTNKSGKVYASGVSSWIIDSGCTNHMTWEKKMFSSYEKNQDPQRAITFGDGNQGLEKSHTQETLKGFLRRAQNEFGLRIKKIRSDNGMEFKNSQIEGFLEEEGIKHEFSSPYTPQQNGVVERKNRTLLDMARTMLDXYKTSDRFWAEXRVFGSKCFILVKRGRKSKFAPKAVEGFLLGYDSNTRAYRVFNKSTGLVEVSCDIVFDETNSSQVEQVDLDELDDEEAPCVALRNMSIGDVCPKESEEPPQAQDQPSSYTQASPPTQDEDEAQKDKGEDQEVEPPQEESNDQGGDAHDQVKEDEQVPRPPHPRVHQAIQRDHPVNTILGDIQKGVTTRSRVAHFCEHYSFVSSIEPHRVEEALQDSDWVVAMQEDLNNCTRNEVWHLVPRPNQNVVGTKWVFRNKQDEHGVVTRNKARLVAKGYSQVEGLDFGETYAPVARLESIRILLAYATYHGFKLYQMDVKSAFLNGPIKEEVYVEQPPGFEDSEYPNHVYKLSKALYGLKQAPXAWYECLRDFLITNGFKVEKADPTLFTKTLENDLFVCQIYVDDIIFGSTNESTCEEFSRIMTQKFEMSMMGELKYFLGFQVKQLQAGTFISQTKYIQDILNKFGMKDAKPIKTPMGTNGHLDLDTGGKSVDQKKEHIGDLPVLGKVSGVLGFKEAKFRSSFYHRGRLYCHRPLLHAIALDEANP

SEQ ID NO: 10165 - protein, 1583 aa, Zea mays
  Clone ID: TF_ZmC951_406.pep
MAGVGRSTRAGGDARRRRGDRPGHGEIVQSNGSERSTGCQRRYEREELGGDSLDSSVHARRRKTEVRRCRLRSPDEVLSPFVGGDVEVHFPKQLLGGGWRLMQYGSNKGQVIRSPVEILNYHCLSDHGYAISHGLKPLEVRPKCFIAPMPDGFEVPWLRRLVGEELKVGDEAPTEVAPVIDAVSRTPFSSATDEMVAKQNTDPGQKAIWHWKVTAIELAWINNTPPSWCTSCQCLEPDRAPGVTPREVSRGRIGSRMWITFKSNEPPGPESAHSLRRPILPAVLPWPTKGWPRESTGPRPFARPSCLLVDPGDIRPPTVTKITKRETIEGELGRFVLHQGEEPQAIYNWLKALVNQVRNLGSKKWDDHEMVKVILRSLVFCNPTQVQLIRGDPRYKLMSPEEVIGKFVSFELMIKGSKHIVDLEQGGTSTPEVQPIAFKATEEKKEESTSSRQPIDASKLDNEEMALIIKSFRQILKQRRGKDYKPRSKKVCYKCGKPGHFIAKCPLSSDSDRGDDKKGKRTENKRYHKKRGGDAHVCREWDSDESSSDSSSDEDAANIAVTKGLLFPNVGHKCLMAKDGKRKKDELLDTQEDFLIKENKKHVKVKNAYALEVEKCEKLSSELSTCHDTIVNLRNENAKLIAKVDSNVCNDSIPNLSDDNANLLAKIEKLNDSLASLRIENEELIAKAKDLDVCNVTISNLRSENDILHANIVELKSCKPSTSTIEHVSICTRCRYINVDAIHDHLALIKKQNDHIAQLNAKINEHDLENGKFKFARSMLYSGRCPGIKDGIGFQKGDNVKLNAPPKRLSNFVKGKAPMPQDNEGYILYPAGYPESKIRRIHSKKSHSSPNQDFMYKGETSSSRQSTRAKLPKKKTPTASNDHNISFKTFDASYVLTNKSGKVYASGGSSWIIDSGCTNHMTGEKKMFSSYEKNQDPQRAITFGDGNQGLEKSHTQETLKGFLRRAQNEFGLRIKKIRSDNGTEFKNSQIEGFLEEEGIKHEFSSPYTPQQNGVVERKNRTLLDMARTMLDEYKTSDRFWVEAVNTACYAINRLYLHRILKKTSYELLTGKKPNVSYFRVFGSKCFILVKRGRKSKFAPKAVEGFLLGYDSNTRAYRVFNKSSGQVEVSCDIVIDETNGSQVEQVDLDEIGDEEASCVALRNMSIGDVCPKESEEPPHAEDQPSSSMQASPPTQDEDEAQNDEVVDQEVEPPQGESNDQGGDAHDQDEEDEQAPKPPHPRVHQAIQRDHPVNTILGDIQKGVTTRSRVAHFCEHYSFVSSIEPHRVEEALQDSDWVVAMQEELNNFTRNEVWHLVPRPNQNVVGTKWVFRNKQDENGVVTRNKARLVAKGYSQVEGLDFGETYAPIAKLESIRILLAYATYHGFKLYQMDVKSAFLNGPIKEEVYVEQPPSFEDSEYPNYVYKLSKALYGLKQAPRAWYECLRDFLITNGFKVGKADPTLFTKTLENDLFVCQIYVDDIIFGSTNESTCEEFSRIMTQKFEMSMMEELKYFLGFQVKQLQEGTFISQTKYIQDILNKFGMKDAKPIKTPMGTNGHLDLDTGGCKINRKSTSGTCQFLGRSLVS

SEQ ID NO: 10166 - protein, 1546 aa, Zea mays
  unsure (1)..(1546): unsure at all Xaa locations
  Clone ID: TF_ZmC951_409.pep
MSGDDAKKMVIGGEKSATSHGKAPSRESANNKKDGSPSRIRSHKSGEKKKKMKKVVYYETDSSSPSTSGSDAASVTSKRQERKKYSKTPLRYPRIPKDTPLLSVPLGKPPTFDGEDYSRRSDMMRYHLTSLHKSIWDVVEFGVQVPSVGDEDYDEDEVAQIVHFNSQATTILLTSLSREEYNKVQGLKSAKDIWDVLKTAHEGDEVTKITKWETIEGELGRFRLRQGEEPQEMYNRLKTLVNQVRNLGSKKWDDHEMVKVILRSLVFLNPMQVQLIRGDPRYTLMSPKEVIEKFVSFELMIKGSKKIIEQDGPSTPEAQPVAFKAMEEKKEESTSSRLPIDASKLDNEEMALIIKSFRQILKQRRGKDYKSRSKKVCYKCGKPGHFIAKCPLSSDSDRDNDKKGKRREKKKYHKKRGDDAHVCREWDFDESSTDSSSDEDAANITVTKGLLFPNVGHKCLMAKTGKRKKVKSRSSTKYASSSDEDNSSDEEDNLRTLFANLNMQQKEKLNELISAIHEKDELLDSQEDFLIKENKKHVKVDSNVCDVLIPNLRDDNVSLLAKIEELNVSLASLRNENEKLIAKAKDLDVCNVTISNLRSENDILHAKIVELKSCKPSTSTVEHVFICTRCRDINVNAIHDQLALIKKRNDHIAQLNAKINEHDLENENFKFARSMLYSGRRPGIKDGIGFQKGDNVKLNAPPKKLSNFVKGKAPMPQDNEGYILYPAGYPEHKIRRIHSRKSHSGPNHAFMYKGSCQVYASRGSSWIIDSGCTNHMTGEKKMFSSYEKNQDPQRAITFGDGNQGVTVFRRSDDSVAFKGVLEGQLYLVDFGRVELDTCLIAKTNMGWLWHRRLAHVGMKNLHKLLKGEHILGLTNVHFEKDRICSACQAGKQVGVNHPHKNIMTTDRPLELLHMDLFGPIAYISISGNKKRNGTKFKNSQIEGFLEKEGIKHEFSSPYTPQQNGVVERKNRTLLDMARTMLDEYKTSDRFWAEAVNTVCYAINRLYLHRILKKTSYELLTGKKPNVSYFRVFGSKCFILVKRGRKSKFAPKAVEGFLLGYDSNTRAYRVFNKSSGLVEVSCDIVFDETNGSQVEQVDLDELDDEKAPCVALRNMTIGDVCPKEPEEPPQAQDQPSSSMQASPPTQDEDKAQNDEGEDQDVEPPQEECNDQGGDAHDQDEEDEQVPRPPHPRVHQAIXRDHPVDTILGDIHKGXEEALQDSDWVVAMQEELNNFTRNEVWHLVPRPNQNVVGTKWVFRNKQDEHGVVTRNKARLVAKGYSQVEGLDFGETYAPVARLESIRILLAYATYHGFKLYQIDVKSAFLNGPIKEEVYVEQPPGFEDSEYPNHVYKLSKALYGLKQAPRAWYECLRDFLITNGFKVGKVDPTLFTKTLDNDLFVCQIYVDDIIFGSTNESTCEEFSRIMTQKFEMSMMGELKYFLGFQVKQLQEGTFISQTKYIQDILNKFGMKDAKPIKTPMGTNGHLDLDTGGKSVDQKKEHIGDLPVLGKILGVLGFKEAKFRSSFYRRSRVYCRRSLLRTTTLDEANP

SEQ ID NO: 10167 - protein, 1072 aa, Zea mays
  Clone ID: TF_ZmC951_414.pep
MSGDHAKEMVTGEKPATSHGKVPSKESGNKKKEGSPSRIRTHKSGEKKRKMKKVVYYETDSSSPSTLGSDAASITSKRQERKKYSKIPLRYPCIPRHTPLLSIPLGKPPTFDGEDYSRWSDMMRYHLTSLHKCIWDVVEFGVQVPSVGDEDYDEDEVAQIEHFYSQATTILLTSLSREEYNKVQGLKSAKEIWDVLKTAHEGDEVTKITKRETIEGELGRFMLNQGEELQAMYNRLKTLVNQVLNLGSSKWDDHEMVKVILRSLVFLNPTQVQLIRGDPRYKLMSPEEVIGKFVSFELMIKGSKKIIEQGATSTPEVQPVDFKVTEEKKEDSTPSRVPIDASKLDNEEMALIIKSFRQILKQRRGKDYKSRSKKVCYKCGKPGHFIAKCPLSSDSDRGDDKKGRRKEKKRYHKKKGGNAHVCREWESDESSTDSSSDEDAANIAITKGLLFPNVGHKCLMAKDDKKKKVKSRSSTKYETSSDEDNASDKEDNLRTLFANLNMQQKEKLNELISAIHEKDDLLDSQEDFLIKENKKHVKVKNAYALEVEKCEKLSSELSTCHDTITNLRNENDKLIAKVDSNTCDVSIPNLRDENVDLLAKIEELNISLDSLRIENEKLLAKVKDFDVCNVTISNLRSENDILHAKVVELKSFKPSTSTVEHVPICTRCRDVDIDAIRDHMVYASGGSSWIIDSGCTNHMTGEKKMFSSYEKNQDPQRAITFGDGNQGLVKGVTVFRRSDDSIAFKGVLEGQLYLDFDRAELDTCLIAKTNMGWLWHRRLAHVGMKNLHKLLKGEHILGLTNVHFEKDRICSACQAGKQVGAHHPHKNIMTTDRPLELLHMDLFGLIAYISIGGTYATYHGFKLYQMDVKSAFLNGPIKEEVYVEQPPGFEDSKYPNHVYKLSKALYGLKQDPRAWYECLRDFLIANGFKVGKADPTLFTKTLNNDLFDHDTKIRDVDDGGVEVLLGISSEATPRGTFISQTKYTQDILSKFGMKDAKPIKTPMGTNGHLDLDTGGKSVDQKKEHIEDLSVLGKILGVLGFKEAKFRSSFYRRGRVHCRRPLLRATTLDEANP

SEQ ID NO: 10168 - protein, 1434 aa, Zea mays
  unsure (1)..(1434): unsure at all Xaa locations
  Clone ID: TF_ZmC951_418.pep
MSGASAKREIGTDDKSASSGRTHSRESAHKHKEESSSSIKSQRKGDKKKKMKKVVYYETDSSSPSTSGSESAFATSKRHERKKYSKMPLRYSRISKRTPLLSVPLGKPPMLEGEDYSIWSDKMRHHLTSLHKSIWDIVEYGPQVPKKGDKDYDSEEVEQIQHFNSQATTILLASLSREEYNKVQGLKSAKEIWDVLKTAHERDEVTKITKRETIEGELGRFMLHQGEEPQAMYNRLKTLVNQVRNLGSTKWDDHEIVKVILRSLVFLNPTQVQLIRGDSRYTLMSPEEVIGKFVSFELMIKGSKKIIEQGTSSTPDVQPVAFKATEEKKENPTPSRVPIDASKLDNEEMTLIIKSFRQILKQRRGKDYKPRSNKVCYKCGKPGHFIAKCPLSSDSDRGDDKKGKRREKKRYYKKKGGDAHVCREWDSDESSTDSSSDEDATNIVVTKGLLFPNVGHKCLMAKDDKRKKVKSKSSTKYATSSDEASSSDNEDDLLTLFAHLNMQQKEKLNELISAIHEKDEHLDTQEDFLIKENKKHVKVKNAYALEVEKCEKLSSELSTCHDVISNLRNENAKLIAKVEKSNVCNDSIDNLRNDNASSHAKVEKLNASLASLRNENEKLIAKAKELNACNVSISSLRDENAILHAKIVELNSCKPSTSTIEHVTICTRCRDVNIDAIHDHMAMIKQQNDHIVKLDAKITEHELENEKIKFARSMLYSGRRPGIKDGIGFQQGGNVKLNAPPKRLSNFVKGKTPMAQDNEGYILYPAGYPEHKIRKIHSRKSHSGSNYAFMYKSEASSSRQSTHAKLPKKKTPIASNDHNISFKTFDASYVLTNKSGKVVAKYVGGKHKGSKTCVWVPKAYAFGGSSWIIDSGCTNHMTGEKRMFSSYEKNQDPQRAITFGDGNQDSLDYNLLSVSQLCKMGYNCLFTDEKSQTQETLKGFLRRAQNEFGLRIKKIRSDNGTEFKNSQIEGFLEDEGIKHEFSSPYTPQQNGVVERKNRTLLDMARTMLDEYKTLDRFWAEAVNTACYAINRLYLHRILKKTSYELLTGKKPNVSYFRVFGSKCFILVKRGRKSKFAPKAVEGFLLGYDSNTRAYRVFNKSTGLVEVSCDIVFDETNGSQVEQVDLDELDDEEAPCVALRNMSIGDVCPKESEEPPHAQDQPSSSMQASTPTQDEDQAQDDEDDDQEEPPQEENNDRGGDANDQDKEDDDGPRPPHPRVHQAIQRDHPVNSILGDIHKGVTTRSRVAHFCEHYSFVSSIEPYRVEDALRDXNXVLAMQEELNNFMRNKVWHLVPRPNQNVVGTKWVFRNKQDXHGVVTRNKARLVAKGYSQVKGLDFGETXYAPVARLESIRILLAYATYHGFKLYXMDVKSAFLNGPIKXEVYVEQPPSFEDXSEYPNHVYKLSKALYGLKQAPRAWYECLRDFLIANGFKVGK

SEQ ID NO: 10169 - protein, 1489 aa, Zea mays
  Clone ID: TF_ZmC951_440.pep
MSGASAKREIGTGEKPATSNGKAPSGESANKVKGSSSHNKSRQSGDKKKKMKKVVYYDTDSSSPSTSGSNTPSVTSKRHERKKFSKIPLRYPRISIRTPLLSVPLGKPPMFDGEDYNMWSDKMRHHLTSLHTSIWDVVEIGVQVPSPGDEDYDSDEVAQIRHFNSQATTILLASLSREEYNKVQGLKSAKEIWDVLKTAHEGDEVTKITKRETIEGELGSKMIIEQGDSSTPEAQLVAFKATEEKKEDSTPSRIPIDASKLDNKEMALIIKSFRQILKQRKGKDYKPRSRKVCYKCGKPGHFIAKCPLSTDSDKGDDKKGKRGEKKRYYKKKGGDAHVCREWDSDESSTDSSSDEDAANIAVTKGLLFPNVGHKCLMAKDGKRKKVKSKSSTKYETSSDEDNSGVEEDNLRTLFANLNMQQKEKLNELISAIHEKDELLDSQEDFLIKENKKHVKVKNAYALEVEKCEKLSSELSTCHDVISNLRNENAKVIVKVDSNVCDVSIPNLIDDNVSLLAKIEELNVSLASLKIENEKLIAKAKDLDVCNVTISNLRSENDILHAKIVELKSCKPSTSIVEHVSICTRCRDINVDAINDHLALIKKQNDHIAQLNAKINEHDLENENFKFARSMLYSGRRPGIKDGIGFQKGDNVKLNAPPKRLSNFVKGKAPMPQDNEGYILYPVGYPKHKIRRIHSRKSHSGPNHAFMYKGETSSSRQSTRAKLPKKKTPIASNNSNISFKTFNASYVLTNKSGKVYASGGSSWIIDSRCTNHMTGEKKMFSSYEKNQDPQRAITFGDGNQGVTVFRRSDDSVAFKGVLEGQLYLVDFNRAELDTCLIAKTNMGWLWHRRLAHVGIKNLHKLLKGEHILRLTNVHFEKDRICSACQAGKQVGVHHPHKNIMTTDRPLELLHMDLFGPIAYISIGGSKYCLVIVDDYSRFTWVFFLQEKSHTQETLKGFLRHAQNEFSLRIKKIRSDNGTEFKNSQIEGFLEEEGIKHEFSSPYTPQQNGVVERKNRTLLDMARTMLDEYKTSDRVFGSKCFILVKRGRKSKFAPKAVEGFLLVYDSNTRAYRVFNKSSRLVEVSCDIVFDETNGSQVEKVDLDELDDEEALCVALRNMSIGDVCPKESEEPPQAQDQQSSSTQASPPTQDEDEAQNDEREDQEVEPPQEESNDQGGDAHDQDEEDKQVPRPPHPRVHQAIQRDHPMNTILGDIQKGVTTRSRVAHFCEHYSFVSSIEPHKVEEALQDSDWVVAMQEELNNFTRNEVWHLVPRPNQNVVGTKWVFRNKQDEHGVVTRNKARLVAKGYSQVEGLDFGETYAPVARLESIRILLAYATYHGFKLYQIDVKSAFLNGPIKEEVYVEQPPGFEDSEYPNHVYKLSKALYGLKQAPRAWYECLRDFLITNGFKVGKADPTLFTKTLENNLFVCQIYVDDIIFVSTNESTCEEFSRIMTQKFEMSMMGELKYFLGFQVKQLQEGTFISQTKYIQDILT

SEQ ID NO: 10170 - protein, 1668 aa, Zea mays
  Clone ID: TF_ZmC951_453.pep
MSGDHTKREMETGDKPTTSHEKASSEESRNKGKGKEKKSSSHKSYRNGDKKKKMRKVVYYETDTSSPSTSGSNAPSVTSKRHERKKFSKIPLRYPCIPKHTPLLSVPLGKPPTFDGEDYARWSDMMRYHLTSLHKSIWDVVEFGVQVPFVGDDDYDEDEVAQIEHFNSQATTILLASLSKEEYNKVQGLKSAKEIWDVLKTAHEGDELTKITKRETIEGELGRFRLHKGEEPQHMYNRLKTLVNQVRNLGSKKWDDHEVVNVILRSLIFLNPTQVQLIRGNPRYTKMTPEEVIGHFVSFECMIKGSKKINELDGPSTSEAQPIAFKATEEKKEESTSSRQPIDASKLDNEEMALIIKSFRQILKQRRGEDYKPRSKKVCYKCGKPGHFIAKCPLSSDSDRGDDKKGRRKEKKKYYKKKGGDAHVCREWDSDESSTDSSSDEDAANIAVTKGLLFPNVGHKCLMAKDDKRKKVKSRSSTKYETSSDEDNASNEEDNLRILFANLNMQQKEKLNELISAIHEKDDLLDTQEDFLIKENKKHVKVKNAYALEVEKCEKLSNELSTCHETINNLRNENASLIAKVDSNACDVSIPNLRNDNDDLLAKIEELNISLASLRIENEKLLAKAKELDVCNVTISDLRDKNDILRAKIVELNSCKPSTSTTEHVTICTRCRDIDVNAIHDHLSMIKQQNDHIAKLDAKIAEHELENEKFKFARSMLYSGRRPGIKDGIGFQKGDNVKLNAPPKRLSNFVKGKAPMPQDNEGYILYPAGYPESKIRRIHSRKSHSGPNHAFMYKGETSSSRKSTHAKLPKKKTLSASNEPSISFKTFDASYVLTNKSGKVYASGGSSWIIDSGCTNHMTGEKKMFSSYEKNQDPQRAITFGDGNQGVTVFRRSDDSIAFKGVLEGQLYLVDFDRAELDTCLIAKTNMGWLWHRRLAHVGMKNLHKLLKGEHILGLTNVHFEKDRICSACQAGKQVGTHHPHKNIMTSDRPLELLHMDLFGPIAYISIGGSKYCLVIGDDYSRFTWVFFLQEKSHTQETLKGFLRRAQIEFGLRIKKIRSDNGMEFKNSQIEGFLEEEGIKHEFSSPYTPQQNGVVERKNRTLLDMARTMLDEYKTPDRFWAEAVNTACYAINRLYLHRILKKTSYELLTGKKPNISYFRVFGSKCFILVKRGRKSKFAPKTVEGFLLGYDSNTKAYRVFNKSSGLVEVSCDVVFDETNGSQVEQVDLDEIGEEQAPYIALRNMSIGDVCPKESEEPPHAQDQPSSSTQASPPTQNEDEAQVDEGEDQRDEPPQDDDNDQGRDANDQDKEDEQPRPPHPRVHQAIQRDHPVDTILDDIHKGVTTRSRVAHFCEHYSFVSSIEPHRVEEALQDSDWVVAMQEELNNVTRNELYQMDVKSAFLNGPIKEEVYVEQPPGFEDSEYPNHVYRLSKALYGLKQAPRAWYECLRDFLIANGFKVGKADPTLFTKTLDNDLFVCQIYVDDIIFGSTNESTCEEFSRIMTQKFVMSMMGELKYFLGFQVKQLQEGTFISQTKYTQDILTKFGMKDAKPIKTPMGTNGHLDLDTGDASQNLIHLPLTILQKTFEKDLQKNLQKCQRFIYNYTKSTVRNTIDYSGQEKLFGKTGQARTVRALAADRPRHKDDPRTEPMQKSESALWTVRRISVDRLRPL

SEQ ID NO: 10171 - protein, 899 aa, Zea mays
  Clone ID: TF_ZM3615.C3.o9.fg.pep
MSGDHAKKEMETGDKPTTSQGSTSSEESRTKRKEKKKDSSKRKEKRFSSSHHKEKKEKSSSHKSHRKGDKHKRMRKVVYYETGTSSTSTSDSDAPSVTSKRQERKKFSKIPLHYPRTSRHTPLLSVPLGKPPTFDDEDYARWSDLMKFHLTSLHKSIWNVVEFGAQVPSVGDEDYDEDEVAQIEHFNSQATTILLASLSKEEYNKVQGLKNAKEIWDLLKTTHEGDELTKITKRETIEGELGRFSLRQGEEPQDMYNRLKTLVNQVRNLGSKKWDDHEVVKVILRSLIFLNPTQVQLIRGNPRYTQMTPEEVIGNFVSFECMIKGSKKINELDEPSTSEAQPVAFKATEEKKEESTPSRQPIDASKLDNEEMALIIKSFRQILKQRKGKDYKSRSKKVCYKCGKPGHFIAKCPLSSDSDRDNDKKGKRKEKKRYHKRRGDAHVCREWDSDESSTDSSSDEDAANIAVTKGLLFPNVGHKCLMAKDGKRKKVKSRSSTKYETSSDEDDASNEEDNLRVLFANLNMEQKEKLNELISAIHEKDDLLHSQEDFLIKENKKHVKVKNAYALEVEKCEKLSSELSTCHETIDNLRNENTRLNAKVDSHVCDVSIPNPRDNNDDLLARIEELNISLASLKIVELNSCKPSTSSVEHVSICTRCRDVDINAIHDHMTLIKQQNDHIAILDAKIAEHNLENEKFKFARSMLYNGRHPGIKDGIGYQRGDNVKLNAPPKNLSNFVKGKAPMPQDNEGYILYPAGYPESKIRRIHSRKSHSGPNHAFMYKGETSSSRQPTRAKLPKKKTPNASNDHDISFKTFDASYVLTNKSGKVYASGGTSWIIDSGCTNHMTGEKKMFSSYEKNQDPQRAITFGDGNQGLVKGVTVFRRSDDSIAFKGVLEGQLYL

SEQ ID NO: 10172 - protein, 746 aa, Zea mays
  unsure (1)..(746): unsure at all Xaa locations
  Clone ID: TF_ZM4166.C5.o13.fg.pep
MSGDHAKKEMGTGEKSITSHGKAPSGESYNKGKGKEKESSSHKSRRSGDKKKKMRKVVYYETDSSSPSTSGFDTPSVTSKRHERKKFNYARWSDMMRYHLTSLHKSIWDVVEFGVQVPSVGDEDYDEDEVAQIVHFNSQATTILLASLSREEYNKVQGLKSAKEIWDMLKTEHEGDEVTKITKRETIEGELNPDDHEVVKEPQDMYNWLKTLVNQVCNLGSKKWDDHEVVKVILRSLVFLIPTQVQLICGNPRYTLMTPEEVIGNFVRFELMIKGSKKINELDGPSMFEAQPVAFKATEEKKEESTSSRTPIDASKLDNKEMALIIKSFRQILKQRKGKDYKPRSKKVCYKCGKPGHFIAKCPLSSASDRDNDKKGKRYHKKRGGDAHVCREWDSDESSSDSSSNEDAANIVVTKGLLFPNVGHKCLMAKDGKRKKVKSKSSTKYETSSDEDNASDEEDNLHILFANLNMQQKEKLNELISAIHEKDELLDTQEDFLIKENKKHVKVKNAYALEIEKCEKLSSELSNCHDTIANLRNENAKLIAKVDSNICDVSIPNLRDENVDLLAKIEELNISLASLRNENEKLIAKAKDFDVCNVTISNLRSENDILHAKVVELKSCKPSTSTVEHTSICTRCRDINIDAIHDHMALIKQQNDHIAKLDAKITEHDLENEKFKFARSMLYSGRRPGIKDGIGFQKGDNVKINAPPKRLSNFVKGKAPMPQDNEGYILYPAGYPXENKIRRIHS

SEQ ID NO: 10173 - protein, 932 aa, Zea mays
  Clone ID: TF_ZM4328.C1.o1.fg.pep
MSGDHAKKEMETGEKPTTSHGSTSSEESRTKRKEKKKSSSNKGKEKKSSSHHKEKKEKSSSHKPHRKGDKHKRMRKVVYYETDTSSTSTSDSDAPSVTSKRQERKKFSKIPLHYPHTSRHTPLLSVPLGKPPTFDGEDYARWSDLMKFHLTSLHKSIWNVVEFGAQVPSVGDEDYDEDEVAQIEHFNSQATTILLASLNREEYNKVQGLKNAKEIWDLLKTAHEGDELTKITKRETIEGELGRFQLRQGEEPQDMYNRLKTLVNQVRNLGSKKWDDHEVVKVILRALIFLNPTQVQLIRGNPRYPLMTPEEVIGNFVSFECMIKGSKKINELDELSTSEAQPVAFKATEEKKEESTPSRQPIDASKLDNEEMALIIKSFRQILKQRKGKDYKSRSKKVCYKCGKPGHFIAKCPLSSDSDRDNDKKGKRREKKRYHKKRGDDAHVCREWDSDESSTESSSDEDAANIAVTKGLLFPNVGHKCLMAKDGKKKKVKSKSSTKYESSSDDNASDEEDNLLTLFANLNMEQKEKLNELISAIHEKDDLLDSQEDFLIKENKKHVKVKNAYALEVEKCQKLSSELSTCHDTIANLRNENASLIAKVESHVCDASIPNLRNDNNDLLAKIKELNDSLANIRVENENLIAKAKDFDVCNSIISDLRTKNDMLHAKIVELKSCKPSTSNVEHVSICTRCRDVDINAIHDHMSLIKQQNDHIALLDAKIAEHNLENEKFKFARSMLYNGRRPGIKDGIGFQRGDNVKLNAPPKNLSNFVKGKAPMPQDNKGYILYPAGYPESKIRRIHSRKSHSGPNHAFMYKGETSSSRQPTRAKLPRKKTPNASNDHAISFKTFDASYVLTNKSGKVYASGGTSWIIDSGCTNHMTGEKKMFSSYEKNQDPQRTITFGDGNQGLVKGVTVFRRSDDSIAFKGVLEGQLYL

SEQ ID NO: 10174 - protein, 1692 aa, Zea mays
  Clone ID: TF_ZM4398.C2.o1.fg.pep
MSGEHAKREMETGDKPIGDKPTTSHEKASSEESHNKKKGKEKKASSHKSHQSGDKKKKMRKVVYYETDTSSPSTSGSDASSVTSKCHERKKFSKIPLRYPRIPKHTPLLSVPLGKPPTFDGEDYARWSDMIRYHLTSLHKSIWDIVEFGVQVPSVGDEDYDEDEVAQIQHFNSQATTILLTSLSREEYNKVQGLKSAKEIWDVLKTAHEGDEVTKITKRETIEGELGRFRLRQGEEPQDMYNRLKTLVNQVRNLGSKKWDDHEVVKVILRSLVFLNPTQVQLICGNPRYTLMTPEEVIGNFVSFELMIKGSKKINELDGPSTPEAQPVAFKATEEKKEESTSSRQPIDASKLDNEEMALIIKSFRQILKQRKGKDYKSRSKKVCYKCGKPGHFIAKCPLSSDSDRDNDKKGRRKEKKRYYKKKGGDAHVCREWDSDESSTDSSSDEDAANIAVTKGLLFPNVGHKCLMAKDGKKKKVKSKSSTKYESSSDDNASDEEDNLRTLFANLNMQQKEKLNELISAIHEKDDLLDTQEDFLIKENKKHVKVKNAYALEVEKCEKLSSELSTCHETIDNLRKENPNLLAKVDSNVCDVSIPNLRNDNNDLLAKIEELNTSIASLRIENEKLLAKAKELDVCNVTISDLRDKNDILRAKIIELNSCKPSTSTTEHVTICTRCRDVDIDAIHDHMVLIKQQNDHIEKLDAKIAEHELENEKFKFARSMLYSGRRPGIKDDIGFQKGDNVKLNASPKKLSNFVKGKAPMPQDNEGYILYPAGYPESKIRRIHSRKSHSGPNHAFMYKGETSSSRQPTRAKLPKKKTPSASNDHSISFKTFDASYVLTNKSGKVVAKYVGGKHKVYASGGSSWIIDSGCTNHMTGEKKMFSSYEKNQDPQRAITFGDGNQGLVKGVIVFRRSDDSIAFKGVLEGQLYLVDFDRAELDTCLIAKTNIGWLWHHRLAHVGMKNLHKLLKGEHILGLTNVHFEKDREKSHTQETLKGFLRRAQNEFGLRVKKIRSDNGTEFKNSQIEGFLEEEGIKHEFSSPYTPQQNGVVERKNRTLLDMARTMLDEYKTSDRLGGGGRKTKFAPKTIEGFLLGYDSNTRAYRVFNKSSGLVEVSCDVVFDETNGSQVEQVDLDEIGDEEALCIALRNMTIGDVCPKESEEPPNAQDQPSSSTQASPPTQNEDEAQVDEGEDQRDEPPQDDGNDQGGDAKDQNKEDEEPRPPHPRVHQAIQRDHPVDTILGDIHKGVTTRSCVAHFCEHYSFVSSIEPHRVEEALQDSDWVVAMQEELNNFTRNEVWHLVPRPNQNVVGTKWVFRNKQDEHGVVTRNKARLVDKGYSQVEGLDFGETYAPVARLESIRILLAYATYHGFKLYQMDVKSAFLNGPIKEEVYVEQSPGFEDSEYPNHVYKLSKALYGLKQAPRSWYECLRDFLITNGFKVGKVDPTLFTKTLDNDLFVCQIYVDDIIFGSTNESTCEEFSRIMTQKFEMSMMGELKYFLGFQVKQLQEGTFISQTKYTQDILNKFGMKDAKPIKTPMGTNGHLDLDTEGCKINRKSTSGTCQFLGRSLVSWASKKQNSVALSTAEAEYIVAGHCCAQLLWMRQTLRDYGYKLTKVPLLCDNESAIRMADNRVEHSRTKHIVIRYHFLRDHQQKGDIDIAYINTKDQLADIFTKPLDEQTFNKLRHELNILDSRNFF

SEQ ID NO: 10175 - protein, 637 aa, Zea mays
  Clone ID: TF_ZM4406.C6.o3.fg.pep
MSGDHAKKEMETGDKPTTSQGSTSSEESRTKRKEKKKSSSNKGKEKKPSSHHKEKKEKSSSHKPHQSGDKHKRMRKVVYYETDTSSTSTSGSDAPSVTSKRQERDEDYDEDEVAQIEHFNSQATTILLASLSKEEYNKVQGLKNAKEIWDLLKTAHEGDELTKITKRETIEGELGRFRLRQGEEPQDMYNRLKTLVNQVRNLGSKKWDDHEVVKVILRSLIFLNPTQVQLIRGNPRYTQMTPEEVIGNFVSFECMIKGSKKINELDEPSTSETQPVAFKATEEKKEESTPSRQPIDASKLDNEEMALIIKSFRQILKQRKGKDYKSRSKKVCYKCGKPGHFIAKCPLSSDSDRDNDKKGKRKEKKRYHKRRGGDAHVCREWDSDESSTDSSSDEDAANIAVTKGLLFPNVGHKCLMAKDGKRKKEKSQTQETLKGFLRRAQNEFGLRIKKIRSDNGTEFKNSQIEGFLEEEGIKHEFSSPYTPQQNGVVERKNRTLLDMARTMLDEYKTSDRFWAEAVNTACYAINRLYLHRILKKTSYELLTGTKWVFRNKQDEHGVVTRNKARLVAKGYSQVEGFQVKQLQEGTFISQTKYTQDILNKFGMKDAKPIKTPMGTNGHLDLDTGDFKPTLRKLTLRP

SEQ ID NO: 10176 - protein, 711 aa, Zea mays
  unsure (1)..(711): unsure at all Xaa locations
  Clone ID: TF_ZM4444.C4.o5.fg.pep
MSGDHAKKEMETGEKPTTSHGSTSSEESRTKRKEKKDSSKGKEKKSSSHKEKKEKSSSHKPRRSGDKKKRMRKVVYYETDSSSASTSGSDAASVTSKRQERKKYSKIPLRYPRISKHTPLLSVPLGKPPTFDGEDYARWSDLMRFHLTSLHKSIWDVVEFGAQVPSVGDEDYDEDEVAQIEHFNSQATTILLASLSREEYNKVQGLKSAKEVWDVLKTAHEGDELTKITKRETIEGELGRFRLRKGEEPQNMYNRLKTLVNQVRNLGSKKWDDHEMVKVILRSLIFLNPTQVQLIRGNPRYTLMTPEEVIGNFVSFECMIEGSRKINELDDPSTSEAQPVAFKVTEEKKEESTSSRTPIDASKLDNEEMALVIKSFRQILKQRRGKDYKSRSKKVCYKCGKPGHFIAKCPLSSDSDRGDDKKGRRKEKKRYYKKKGGDAHVCREWDSDESSSDSSDDEDAANIAVTKGLLFPNVGHKCFMAKDDKKKKDDLLDTQEDFLIKENKKHVKVKNAYALEIEKCEKLSSELSTCHETLDNLRNENANLLAKVDSHVCTSNPRDVNDDLLARIEELNISLDSLRIENEKLLAKAKDFDVCNVXISNLRSENDILHAXRCRDVDINAIHDHMSLIKQQNDHIAKLDAKIAKHNLENEKFKFARSMLYNGRRPGIKDGIGFQRGDNVKLSVPPKRLSNLVKGKALMPQDNEGYILYPA

SEQ ID NO: 10177 - protein, 796 aa, Zea mays
  Clone ID: TF_ZM4491.C2.o4.fg.pep
MKKVVYYETDSSSPSTSESDAASVTSKRQERKKYSKPPMFDGEDYNMWSDKMRHHLTSLHTSIWDVVEIGVQEYNKVQGLKSAKEIWDVLKTAHEGDEVTKITKRETIEGELGRFRLRQGEEPQDMYNRLKTLVNQVRNLGSTKWDDHEMVKVILRSLVFLNPTQVQLIRGDPRYMLMSPEEVIGKFVSFELMIKGSKKIIEQDGPSMPEAQPVAFKATEEKKEESTSSRVSIDASKLDNEEMALIIKSFRQILKQRRGKDYKSRSKKVCYKCGKPGHFIAKCPLSSDSDRGDDKKGKRREKKRYHKKRGEDAHVCREWDSDESSTDEDAANIAVTKGLIFPNIGHKCLMAKDDKRKKVKSKSSTKYETSSDEDNLRTLFANLNMQQKEKLNELISAIHEKDEHLDSQEDFLIKENKKHVKVKNAYALEVEKCEKLSSELSKCHDIIINHRNENASLIAKVDSNVCDDSISNLRDDNPNLLARIEKLNDSLASLRNENENLIAKAKDLDVCNVTIFNLRSENDILHAKIVELKSCKSSTSTTEHVSNCTRCRDINVDAIHDHLALIKKQNDHIAQLNAKINEHDLENEKFKFARSMLYSGRRPDIKDGIGFQKGDNVKLNAPPKRLSNFVKGKALMPQDNEGYILYPAGYPEHKIRRIHSRKSHSGPNHAFMYKGETSSSRQSTRAKLARKKTPIASNDSNISFKTFDASYVLTNKSGKVYASGGSSWIIDSGCTNHMTGEKKMFSSYEKNQDPQRAITFGDGNRGLVKRLGKCWGEGKAATLRSKSSPLSLVRRR

SEQ ID NO: 10178 - protein, 557 aa, Zea mays
  Clone ID: TF_ZM4545.C15.o1.fg.pep
MSGDHAKKEMETGEKPTTSHGSTSSEESRTKRREKKKSSSNKGKEKKSSSHHKEKKERSSSHKPHRSGDKQKRMRKVVYYETDTSSTSTSDSDAPSVTSKCQERKKFSKIPLHYPRISKHAPLLSVPLGKPPTFDGEDYARWSDLMRFHLTSLHKSIWDVVEFGAQVPSVGDKDYDEDEVAQIEHFNSQATTILLASLSREEYNKVQGLKSAKEVWDVLKTAHEGDELTKITKRETIEGELGRFRLGKGEEPQHMYNRLKTLVNQVRNLGSIKWDDHEVVKVILRSLIFLNPTQVQLIRGNRRYTKMTPEEVIGHFVSFECMIEGSRKINELDDPSTSEAQPVAFKATEDKKEESTPSRQPIDASKLDNEEMALVIKSFRQILKQRRGKDYKSRSKKVCYKCGKPGHFIAKCPLSSDSDRGDDKKGRRKEKKRYYKKKGGDAHVCREWDSDESSSDSSDDANIAVTKGLLFPNVGHKCLMAKNGKKKKVKSNSSTKYESSSDDNASGEEDNLRTLFANLNMEQKEKLNELISAIHEKDDLLDSQEDFLIKENKKHVK

SEQ ID NO: 10179 - protein, 532 aa, Zea mays
  Clone ID: TF_ZM4550.C4.o1.fg.pep
MSRDHAKKEMVTGEKPATSHGKAPSGESDNKVNGSPSHNKSQRSGEKKKKMKKVVYYETDSSSPSTSGSDAPSVTSKRHERKKFSKIPLRYPHISKRTPLLSVPLGKPPVFDGEDYCMWSDKMRHHLTSLHASIWDIVEFGAQEPSVGDEGYDSDEVAQIRQFNSQATTILLASLSREEYNKLQGLKSAKEIWDVLKTAHEGDEVTKITKRETIEGELGRFMLHQGEEPQAMYNRLKTLVNQVRNLGSTKWDDHEMVKVILRSLIFINPTQVQLIRGDPRYKLMSPEEVIGKFLSFELMIKGSKKIIEQGVSSTTDVQPVAFKATEEKKDESTSSRLPIDASKLDNKEMQRRGKDYKPRSKKVCYKCGKPGHFIAKCPLSSDSDRGDNKKGRRKEKKKYYKKKGGDAHVCREWDSNESSTDSSSDEDAANIAVNKGLLFPNVDHKCLMEKDGKKKKVKSRSSAKYATSSDEDNSSDDEDNLLTLFANLNMQHKKKLNELISAIHEKDELLDSQEDFLIKENKKHVKVKMLML

SEQ ID NO: 10180 - protein, 640 aa, Zea mays
  Clone ID: TF_ZM4554.C3.o2.fg.pep
MSRDHAKKEMVTGEKPATSHGKAPSGESDNKVNGSPSHNKSQRSGEKKKKMKKVVYYETDSSSPSTSGSDAPSVTSKRHERKKFSKIPLRYPHISKRTPLLSVPLGKPPVFDGEDYCMWSDKMRHHLTSLHASIWDIVEFGAQEPSVGDEGYDSDEVAQIRQFNSQATTILLASLSREEYNKLQGLKSAKEIWDVLKTAHEGDEVTKITKRETIEGELGRFMLHQGEEPQAMYNRLKTLVNQVRNLGSTKWDDHEMVKVILRSLIFINPTQVQLIRGDPRYKLMSPEEVIGKFLSFELMIKGSKKIIEQGVSSTTDVQPVAFKATEEKKDESTSSRLPIDASKLDNKEMQRRGKDYKPRSKKVCYKCGKPGHFIAKCPLSSDSDRGDNKKGRRKEKKKYYKKKGGDAHVCREWDSNESSTDSSSDEDAANIAVNKGLLFPNVDHKCLMEKDGKKKKVEKCEKLTSELSTCHDTISNLRNENSKIIAKVEKSNVCDDSIVDLRNDNASLIAKIDMLNGSLASLKIENEKLIAKAKDLNVCNATITNLRDDNAILQTNIVELNTCKPSTSTVEHVSICTKCRDINVDAIHDHLALIKKQNDHIAQLSAKINEHDLENEKFKFARSMLYSGRRPDIKDGIGFQ

SEQ ID NO: 10181 - protein, 1362 aa, Zea mays
  Clone ID: TF_ZM4579.C1.o1.fg.pep
MSGDHTKREMETGDKPTTSHGSTSSEESRTKRKEKKKDSSNKGKGKEKKSSSHKSHRRGDKNKRMRKVVYYETDTSSTSTSDSDVPSVTSKRQERKKYSKIPLRYPHISKRTSLLSVPLGKPPVFDDEDYNMWSDKMRHHLTSLHTSIWNVVEFGVQVPSVGDEDYDSDEVAQIHHFNSQATTILLASLSREEYNKVQGLKCAKEIWDVLKTAHEGDEVTKITKWETIEGELGRFMLHQGEDPQAMYNRLKTLVNQVRNLGSEKWDDHEMVKVILRSLVFLNPTQVQLIRGDPRYKLMSPEEVIGKFVSFELMIKGSKKIIEQGTSSTPEAQPVAFKATEEKKEESTSSRQLIDASKLDNEEMTLIIKSFRQILKQRRGKDYKPRSKKVCYKCGKPGHFIAKCPLSSDSDRDDDKKGRRREKKRYHKKKGGDAHVCREWDSDESSTDSSFDEDATNIAITKGLLFPNVGHKCLMAKDSKRKKVKSKSSTKYESSSDDNASDEEDNLRTLFVDLNMQQKEKLNELISVIHEKDDLLDSQEDFLIKENKKHVKVKNAYALEVEKCEKLSSELSTCHNTIANLRNENAKLIAKVDSHVCDVSIPNLRNDNDDLLAKIEELNISLASLRVENEKLIAKAKELDVCNVTISDLRDNNDILRAKIVELNSCKPSTSTIEHVSICTRCRDVDIDAIHDHMVLIKQQNDHIAKLDAKIAEHNLENEKFKFARSMLYNGRRPGIKDGIDFQRGDNVKLSAPPKRLSNFVKGKAPMPQDNEGYILYSAGYPESNIRRIHSRKSHSGPNHAFMYKGETSSSRQPTRAKLPKKKTPNASNDHDISFKTFDASYVLTNKSGKVYASGGSSWIIDSGCTNHMTGEKKMFSSYEKNQDPQRAITFGDGNQGLVKGVTVFRRSDDSIAFKGVLEGQLYLVDFDRAELDTCLIAKTNMGWLWNRRLAHVGMKNLHKLLKEEHILGLTDVHFEKDRICSACQAGKQVGVHHPHKNIMTTDRPLELLHMDLFGPIAYISIGGMERKNRTLLDMERTMLDEYKTPDRFWAEAVNTACYAINRLYLHQILKKTSYELLTGKKPNISYFRVFGSKCFILVKRGRKSKFAPKTVEGFLLGYDSNTRAYRVFNKSSGLVEVSCDVVFDETNGSQVEQVDLDEIGDEEAPCIALRNMSIGDVCPKESKEPPNAQDQPSSSTQASPPTQNEDEAQVDGGEDQSGEPPQDDDNDQGEDANDQDKEDDEPRPPHPRVHQAIQRDHPVDTILGDIHKGVTTRSRVAHFCEHYSFVSSIEPHRVEEALQDSDWVMAIQEELNNFIRNEVWHLVPRPNQNVVGTEWVFRNKQDEHGVVTRNKARLVAKGYKSK

SEQ ID NO: 10182 - protein, 770 aa, Zea mays
  Clone ID: TF_ZM4589.C2.o4.fg.pep
MSGDHTKKEMETGEKPTTSHGSTSSEESRTKRKEKKKDSSKRKEKKSSSSHHKEKKEKSSSHKPHRKGDKHKRMRKVVYYETDTSSTSTSDSDAPSVTSKRQERKKYRDEDYDEDEVAQIEHFNSQATTILLASLSREEYNKVQGLKSAKEIWDVLKTAHEGDELTKITKRETIEGELGRFRLRKGEEPQHMYNRLKTLVNQVRNLGSVKWDDHEMVKVILRSLIFLNPTQVQLIRGNPRYTKMTPEEVIGNFVSFECMIEGSRKINELDDATTSEAQPVAFKATEEKKEESTPSRQPIDASKLDNEEMALVIKSFRQILKQRRGKDYKSRSKKVCYKCGKPGHFIAKCPLSSDSDRGDDKKGRRKEKKRYYKKKGGDAHVCREWDSDESSSDSSDDEDAANIAVTKGLLFPNVGHKCLMAKDGKKKKEKSQTQETLKGFLRRAQNEFGLRIKKIRSDNGTEFKNSQIEGFLEEEGIKHEFSSPYTPQQNGVVERKNRTLLDMARTMLDEYKTSNRFWAEAVNTACYAINRVEEALQDSDWVVAMQEELNNFTRNESRGDRRHSTAPLANLTEGQRRLRHSDCSATRQSESDRQLGLAKGATANSAPPDPRARTRAKTRKTANSAPPDPRARTRAKTRKTANSAPPDPRARTRAKTRKTANSAPPDPRARTRAKTRKTANSAPPDPRARTRAKTRKTANSAPPDPRARTRAKTRKTANSAPPDPRARTRAKTRKTTKLRLARPQGSDSALASAGRLPPRPTPWLGLGHGN

SEQ ID NO: 10183 - protein, 965 aa, Zea mays
  Clone ID: TF_ZM4590.C6.o1.fg.pep
MSGDHAKKEMETDDKPTTSHGSTSSEESRTKRKEKRKDSSKGKKSSSHSKGKEKKSSSHHKEKKEKSSSHKPHRSGDKKKRMRKVVYYETDSSSTSTSGSDAASVTSKRQERKKYSKIPLRYPHISKHTLLLSVPLGKPPTFDGEDYARWSDLMRFHLTSLHKSIWDVVEFGAQVPSVGDEDYDEDEVAQIEHFNSQATTILLASLSKEEYNKVQGLKNAKEIWDLLKTAHEGDELTKITKRETIEGELGRFRLRQGEEPQDMYNRLKTLVNQVRNLGSKKWDDHEVVKVILRSLIFLNPTQVQLIRGNPRYTLMTPEEVIGNFVSFECMIKGSKKINELDDPSTSEAQPVAFKATEEKKEESAPSRQPIDASKLDNEKMALIIKSFRQIHKQRKGKDYKSRSKKVCYKCGKPGHFIAKCPLSSDSDRDNDKKGKRREKKRYHKKRGGDAHVCREWDSDESSTESSSDEDAANIAVTKGLLFPNVGHKCLMANDGKKKKVKSKSSTRYESSSDENASDEEDNLHTLFANLNMEQKEKLNELISAIHEKDDLLDSQEDFLIKENKKHVKVKNAYALQIEKCEKLSSELSTCHETIDNLRNENGKLLAKVDSHVCIDSISNPRDDNVDLLARIDELNISLDSLRIENEKLIAKAKDFDVCNTTISDLRTKNDMLHAKVVELKSCKPSTSTVEHTSICTRCRDVDINAIHGHMALIKQQNDHIAILDAKIVEHNLENEKFKFARSMLYNGRRPSIKDGIGYQKGDNVKLSAPPKRLSNFVKGKAPMPQDNEGYILYPAGYPESKIRRIHSRKSHSGSNHAFMYKGETSSSRQPTRAKLPRKKTPNASNDHDISFKTFDASYVLTNKSGKIVAKFVGGKHKGSKTCVWVPKVLVSNAKGPKTVWVYASGGSSWILNSGCTNHMTGEKKMFSSYEKNQDPQRAITFGDGNQGVTVFRRSDDSIAFKGVLE

SEQ ID NO: 10184 - protein, 533 aa, Zea mays
  Clone ID: TF_ZM4611.C1.o1.fg.pep
MVIGGKKSATSHRKAPSRESANNKKDGSPSRIRSHKSGEKKKKMKKVVYYETDSSSPSTSGSDAASVTSKRQERKKYRDEDYDEDEVAQIVHFNSQATTILLTSLSREEYNKVQGLKSAKEIWDVLKTAHEGDEVTKITKQETIEGELGCFRLRQGEEPQEMYNRLKTLVNQVRNLGSKKWDDHEMVKVILRSLVFLNPTQVQLIRGDPRYTLMSPEEVIRKFVSFELMIKVSKKIIEQDAPSTSEAQPVAFKATEKKKEESTSSRLPIDASKLDNEEMVLIIKSFRQILKQRRGKDYKSRSKKVCYKCGKPGHFIAKCPLSSNNDRGEDKKGKRREKKTYYKKKGGDAHVCREWNSDESSTDSSDDEDAANIAVTKGLLFPNVGHKCLMAKDDKRKKVKSRSSTKYASSSDEDNSSDEEDNLRTLFANLNMQQKEKLNELISAIHEKDELLDSQEDFLIKENKKHVKVKNAYALEVEKCEKLSSELNTCHDIIANLRNENAKIIAKVDSNACDVSIPNLRDDNVSYLLRLKN

SEQ ID NO: 10185 - protein, 1245 aa, Zea mays
  Clone ID: TF_ZM4618.C5.o1.fg.pep
MYNRLKTLVNQVRNLGSTKWDDHEMVKVILRSLVFLNPTQVQLIRGDPRYKLMSLEKVIGKFVSFELMIKGSKKIIEQGASSTPKMQPVAFKATEEKKEESTSSRLPIDASKLDNEEMALIIKSFRQILKQRRGKDFKPRSKKVCYKCGKPGHFIAKCPLSSDSGRDNDKRGKKKEKKRYYKKKGGDAHVCQEWDSNESSTDSSSDEDAANITINKGLLFPNVGHKCLMAKDDKRKKDDLLTLFANLNMQQKEKLNELISAIHEKDELLDSQEDFLIKENKNHVKVKNAYAQEIEKCEKLTSELSTCHDTISNLRFENDKLIAKVEKVNVGDDYLVNLRNDNANLIAKIDKLNASLSILKIENEKLIAKAKDLNVCNVSISNLRDENAILHAKIVELSTCKPSTSAVEHVTICTRCRDINVDAIHDHLALIKQQNDHIAQLSAKISEHDLENEKFKFARSMLYSGRRPGIKDGISFQKGDNVKLNAPKKLSNFVKGKAPMAQDNEGYILYPAGYLEHKIRRIHSRKSHSGSHHAFMYKSEASSSRQSTHVKLPKKKSPIASNEPNISFKTFDASYVLTNKSGKVVAKYVGGKHKGSKTCVWVPKVYASGGSSWIIDSGCTNHMTGEKRMLSSYEKNHDPQRAITFGDGNQDSLDYNLLSVSQLCKMGYNCLFTDIGVTIFRRSDDSVAFKEKSQTQETLEGFLRRAQNEFGLRIKKIRSDNGMEFKNSQIEGFLEDEGIKHEFSSPYTPQQNGVVERKNRTLLNMARTMLDEYKTLDRFWAEAINTACYAINCLYLHRILKKTSYELLTGKNPNVSYFRVFGSKCFILVKRGRKSKFAPKAVEGFLLGYDSNTRAYRVFNKSTGLAEVSCDIVFDETNGSQVEQVDLDELDDEEAPCVALRNMSIGDVCPKESEEPPQAQDQPSSSMQASPPTQDEDQAQEDENEDQEDEPPQEGDNDQGRDAHDQDKEDDDGPRPPHPRVHRAIQRDHPVNSILGDIHKGVTTRSRVAHFCEHYSFVSSIEPYRVEDALRDSDWVLAIQEELNNFTRNELYQMDMKSAFLNGPIKEEVYVEQPPGFEDSEYPNHVYKLSKALYGLKQAPRAWYECLRDFLIANGFKVGKADPTLFTKTIANDLFVCQIYVDDIIFGSTNKSTCEEFSRIMVQKFEMSMMGELKYFLGFQVKQLQEGTFISQTKYIQDILTKFGMKDAKPIKTPMGTNGHLDLDTGGKSVDQKVCVGINHQKGGD

SEQ ID NO: 10186 - protein, 308 aa, Zea mays
  Clone ID: TF_ZM4630.C3.o1.fg.pep
MSLEKVIGKFVSFELMIKGSKKIIEQGASSTPKMQPVAFKATEEKKEESTSSRLPIDASKLDNEEMALIIKSFRQILKQRRGKDFKPRSKKVCYKCGKPGHFIAKCPLSSDSGRDNDKRGKKKEKKRYYKKKGGDAHVCQEWDSNESSTDSSSDEDAANITINKGLLFPNVGHKCLMAKDDKGKKVKSRASTKYESSSDDNASDEEDNLRTLFANLNMQQKEKLNELISDIHEKDDLLDTQEDFLIKENKKHVKVKNAYALEVEKCEKLSSELSTCHETIDNLRSENANLLAKVDFKCLQCFNSQSRK

SEQ ID NO: 10187 - protein, 532 aa, Zea mays
  Clone ID: TF_ZM4644.C10.o1.fg.pep
MSGASAKREIGTGEKPATSNGKAPSGESANKVKGSSSHNKSRQSGDKKKKMKKVVYYDTDSSSPSTSGSNTPSVTSKRHERKKFSKIPLRYPRISIRTPLLSVPLGKPPMFDGEDYNMWSDKMRHHLTSLHTSIWDVVEIGVQVPSPGDEDYDSDEVAQIRHFNSQATTILLASLSREEYNKVQGLKSAKEIWDVLKTAHEGDGGSKMIIEQGDSSTPEAQLVAFKATEEKKEDSTPSRIPIDASKLDNKEMALIIKSFRQILKQRKGKDYKPRSRKVCYKCGKPGHFIAKCPLSTDSDKGDDKKGKRGEKKRYYKKKGGDAHVCREWDSDESSTDSSSDEDAANIAVTKGLLFPNVGHKCLMAKDGKRKKVKSKSSTKYETSSDEDNSGVEEDNLRTLFANLNMQQKEKLNELISAIHEKDELLDSQEDFLIKENKKHVKVKNAYALEVEKCEKLSSELSTCHDVISNLRNENAKVIVKVDSNVCDVSIPNLIDDNVSLLAKIEELNVSLASLKIENEKLIAKAKDLDVCN

SEQ ID NO: 10188 - protein, 597 aa, Zea mays
  Clone ID: TF_ZM4792.C4.o6.fg.pep
MKEDEAKREAQEEEERKKVEEDEKGKTKVDYFDDLVELLVSKVHRNAQAVSVIKGSLGQEEYQKVQGREDARDIWNILKMSHEGDPKAKRHRIEVLESELARDRDDYDEMTPHQLFTKIQQHELVEAPIKTRDSHALVTNDQESSKKSSTNKDHKSKKMIESSSEDESSSDEDIVMFIKSFRKFVRKGDKYQRKGKKRACYECGKTGHSIADCPNKKEQEEKKDFKKDKSKKGERSKGCFKKKKKVSPKVEVKQILKKCSSNDGSSEVVPKYKPLRNNNGKKGLGYNIFKANPSIEGTTLYDALGRIHSSNGNITHEKIDVYSSGGSIWVFDSGCTNHMIGERNMFQSLQLTKESQEIVFGDSVKGEVIGIGETQEILKTFMRHAQNEFELKINKVRSDNGTEFKNSCIEEFLGEEGIKHEFSVPYTPQQNGVMERKSQTLIEAAKTMQDESKTHDNYWVEAINTACHAINRLYLHKIYKKTAYELLTGNKPKVDYFQVFGCKCFILNKKAKSSKFAPKVNEGFLHGYASNVHGYCVFNNTIGLVEIVLNMTFDESNGSQGHVASDIAGDEQQPCDVTKKLAIAEIRPREKENEGRI

SEQ ID NO: 10189 - protein, 1179 aa, Zea mays
  Clone ID: TF_ZM4796.C4.o1.fg.pep
MKVVYYETDSSSPSTSGSESASATSKRHERKKYSKMPLHYPRISKRTPLLSVPLGKPPMFEGEYYSMWSDKMRHHLTSLHKSIWDIVEYGAQVPKKGDKDYDSEEVEQIQHFNSQVTTILLASLSREEYNKVQGLKSAKEIWDVLKTAHEGDEVTKITKRETIEGELGCFMLHQGEEPQVMYNRLKTLVNQVRNLGSTKWDDHEMVKVILRSLVFLNPTQVQLIRGDPRYKLMSLEEVIGKFVSFELMIKGSKQIIERGATSTPEVQPVAFKATEEKKEEFTPSRLPIDASKLDNKEMALIIKSYRQILKQRKGRDYKLRSKKVCYKCGKPGHFIAKCPLSSDSDRGDDKKGKRREKKRYYKKKGGDAHVCREWDSDESSTDSSSDEDAANIAINKGLLFPNVGHKCPMAKYGKKKEKLNELISVIHEKDELLDSQEDFLIKENKRHVNTKNAYAQETIENEKLIAKAKDLNVCNISISNLKNENAILHAKIDELNACKPSTSTVEHVTICTRCRDINVDAIHDHLTLIKQQNDHIAQLSAKINEHDLENENFKFARSMLYSGRCPGIKDGISFQQGDNVKLNAPKRLSNFVKGKALMVQDNEGYILYPTGYPEHKIRRIHSRKSHSGSHHAFMYKSEASSSRQSTHAKLPKKKTPIASNEPNISFKTFDASYVLTNKSGKVVAKYVGGKHKGSKTCVWVPKVLVSNVKGPKTVWVYASGGSSWIIDSGCTNHMTWEKRMFSSYEKNQDPQRAITFRDGNQAHVGMKNLSKLLKGEHILGLTNVHFEKDRDKSQTQETLKGFLRRAQNEFGLRIKKIRSDNGTEFKNSQIEGFLEEEGIKHEFSSSYTPQQNGVVERKNRTLLDMVRTMLDEYKTSDRVFGSKCFILVKRGRKSKFAPKVVEGFLLGYDSNTRVYRVFNKSTGLVEVSCDIVFDETNGSQVEQVDLDELDDEEAPCVVLRNMSIGDVCPKESEEPPQAQDQPSSSMQASPPTQDEDQAQEDENEDQEDEPPQEEDNDQGGDANNQDKEDDDARLESIRILLAYGTYHGFKLYQMDVKSAFLNGPIKEEVYIEQPPGFEDKFSRIMVQKFEMSMMGELKYFLGFQVKQLQEGTFISQTKYIQHILTKFGMKDAKPIKTPMGTNGHLDLDTGGNEQPVVLDCVAEDLPEQQPGEGKCPLIV

SEQ ID NO: 10190 - protein, 322 aa, Zea mays
  Clone ID: TF_ZM4844.C2.o1.fg.pep
MKKVVYYETDSSSPSTSESDAASVTSKRQERKKYKEYNKVQGLKSAKEIWDVLKTAHEGDEVTKITKRETIEGELGRFRLRQGEEPQDMYNRLKTLVNQVRNLGSTKWDDHEMVKVILRSLVFLNPTQVQLIRGDPRYMLMSPEEVIGKFVSFELMIKGSKKIIEQDGPSMPEAQPVAFKATEEKKEESTSSRVSIDASKLDNEEMALIIKSFRQILKQRRGKDYKSRSKKVCYKCGKPGHFIAKCPLSSDSDRGDDKKGKRREKKRYHKKRGEDAHVCREWDSDESSTDEDAANIAVTKGLIFPNIGHKCLMAKDDKRKKR

SEQ ID NO: 10191 - protein, 518 aa, Zea mays
  Clone ID: TF_ZM4887.C4.o3.fg.pep
MSGASAKRDLETGDKSACSGRTHSRESAHKHKEESSSSIKSHRMGDKKKKMKKVVYYETDSSSPSTSGSESASTTSKRHERKKYSKPPMFEGEDYSMWSDKMRHHLTSLHKSIWDIVEYGVQEVEQIHHFNSQATTILLASLSREEYNKVQGLKSAKEIWDVLKTAHEGDEVTKITKRESIEGELGRFRLRQGEEPQDMYNRLKTLVNQVSNLGSKKWDDHEMVKVILRSLVFLNPTQVQLIRGNPRYTLMSPEEVIGNFVSFELMIKGSKKIIEHDGPSTPEAQPVAFKATEEKEEESTSSRLPIDASKLDNEEMALIIKSFRQILKQRRGKDYKSRSKKVCYKCGKPGHFIAKCPLSSDSDRGDDKKGKKREKKRYYKKKGGDAHVCREWDSDESSSDSSSDEDAANIAVTKGLLFPNVGHKCLMAKYGKRKKDELLDSQEDFLIKENKKHVKVKNAHALEVEKCEKLSSELSTCNDIIVNLRNENAKLIAKVDSNVNDVSIPNLRDDNVSLLAKI

SEQ ID NO: 10192 - protein, 1696 aa, Zea mays
  unsure (1)..(1696): unsure at all Xaa locations
  Clone ID: TF_ZM4920.C3.o11.fg.pep
MSGDHAKKEMETGDKPTPSHGKASSEESRNKGKGKEKKPSSHKSHRSGDKKKKMRKVVYYETDTSSPSTSGSDAPSITSKRHEHKKFSKIPLRYPRIPKHTPLLSVPLGKPPTFDGEDYARWSDLMRFHLTSLHKSIWDVVEFGVQVPSVGDEDYDEDEVAQIEHFNSQATTILLASLSREEYNKVQGLKSAKEVWDVLKTAHEGDELTKITKRETIEGELGRFRLRQGEEPQDMYNRLKTLVNQVRNLGSKKWDDHEMVKVIFRSLIFLNPTQVQLVRGNPRYTLMTPEEVIGNFVSFEFMIKGSRKINELDGPSTSEAQPVAFKAMEEKKEESTSTRTPINASKLDNEEMSLVIKSFRQILKQRRGKDYKRRSKKVCYKCGKPGHFIAKCPLSSDSDRGNDKKGRKKEKKKYYKKKGGDAHVCREWDSDESSSDSSSDEDAANIAINKGLLFPNVGHKCLLAKNGKKKKVKSKSSTRYESSSDDNASDEEDNLRTLFANLNMQQKEKLNELISAIHEKDDLLDTQEDILIKENKKHVKVKNVYALEVEKCEKLTSELSTCHDVINNLRNENASLIAKVDSNACDVPIPNLRNDNDDLLAKIEELNISLASLRNENEKLIAKAKDFDVCNATISDLRSKNDILHAKVVELKSCKPSTSTIEHTSICTRCRDVDIDAIHDHMVLIKQQNDHIAKLDAKIAEHELENEKFKFARSMFYNGRRPGIKDGIGFQQGGNVKLNAPPKKLSNFVKGKAPMPQDNEGYILYPVGYPESKIRRIHSRKSHSGPNHAFMYKGETSSSRQPTRAKLSKKKTPRASNDSNISFKTFDASYVLTNKSGNVVAKYVGGKHKGSKTCVWVPKVLVSNAKGPKTIWVYASGGSSWVIDSGCTNHMTGEKKMFSSYEKNHDPQRAITFGDGNQGVTVFRRSDDSIAFKGVLEGQLYLEKSHTQETLKGFLRRAQNEFGLRIKKIRSDNGMEFKNSQIEGFLEEEGIKHELSSPYTPQQNGVVERKNRTLLDMARTMLDVLDYGEATLAQNKIFNPIKPRTTAVIGHGITTRRAEQRKTSRCRRTRRAVPCSHRRPSRPRTVRPSAPDAAPPRYPHVQGGSAAYRTARFATAAWRGREASGYSFVGGKLGVFGSKCFILVKRGRKSKFAPKTVEGFLLGYDSNTRAYRVFNKSTGQVEVSCDVVFDETNGSQIEQVDLDEIGDEEAPCIALRNMSIGDVCPKQYEEPPNAQDQPSSSTQASPSTRNEDEAQVDEGEEQRDEPPKDDANDQGGDANDQDKEDEEPRPPHPRVHQAIQRDHPVDTILGDIHKGXVEEALQDSDWVVAMQEXLNNFTRNEVWHLVPRPNQNVVGTKWVFRNKQDEHGVVTRNKARLVAKGYSQVEGLDFGETYAPVARLESIRILLACATYHGFKLYQMDVKSAFLNGPINEEVYVEQPPSFEESEYPNHVYKLSKALYGLKQAPRAWYECLRDFLITNGFKVGKADPTLFTKTLENDLFVCQIYVDDIIFGSTNESTCEEFSRIMTQKFEMSMMGELKYFLGFQVKQLQEGTFISQTKYTQDILNKFGMKDAKPIKTPMGTNEHLDLDTEDIMLSVCMCARFQANPKEAHLTAVKRTLRYLVYTPKFGLWYPRGSTFDLIGYSDANWEGCKINKKSTSGTCQFLGRSLVSWASKKQNSVALSTAEAEYIAADFG

SEQ ID NO: 10193 - protein, 437 aa, Zea mays
  Clone ID: TF_ZM4921.C4.o1.fg.pep
MSGDHAKKEMETDDKPTTSHGSTSSEESRTKRKEKRKDSSKGKKSSSHSKGKEKKSSSHHKEKKEKSSSHKPHRSGDKKKRMRKVVYYETDSSSTSTSGSDAASVTSKRQERKKYRDEDYDEDEVAQIEHFNSQATTILLASLSKEEYNKVQGLKNAKEIWDLLKTAHEGDELTKITKRETIEGELGRFRLRQGEEPQDMYNRLKTLVNQVRNLGSKKWDDHEVVKVILRSLIFLNPTQVQLIRGNPRYTLMTPEEVIGNFVSFECMIKGSKKINELDDPSTSEAQPVAFKATEEKKEESAPSRQPIDASKLDNEKMALIIKSFRQIHKQRKGKDYKSRSKKVCYKCGKPGHFIAKCPLSSDSDRDNDKKGKRREKKRYHKKRGGDAHVCREWDSDESSTESSSDEDAANIAVTKGLLFPNVGHKCLMANDGKKKKP

SEQ ID NO: 10194 - protein, 920 aa, Zea mays
  Clone ID: TF_ZM4951.C1.o3.fg.pep
MSGDHAKKEMETGEKPTTSHGSTSSEESRTKRKEKKNSSKGKEKKSSSHQKEKKEKSSSHKTRRSGDKKKRMRKVVYYETDSSSTSGSDAASVTSKRQERKKYSKIPLRYPRISKHTPLLSVPLGKPPTFDGEDYARWSDLMRFHLTSLHKSIWDVVEFGAQVPFVGDEDYDEDEVAQIEHFNSQATTILLASLSREEYNKVQGWKSAKEVWDVLKTAHEGDELTKITKRETIEGELGRFRLRKGEEPQNMYNRLKTLVNQVRNLGSKKWDDHEVVKVILRSLIFLNPTQVQLICGNPRYTLMTPEEVIGNFVSFECMIEGSRKINELDEPSTSEAQPVAFKATEEKKEESTPSRQPIDASKLDNEEMALIIKSFRQILKQRKGKDYKSRSKKVCYKCGKPGHFIAKCPLSSDSDRDNDKKGKRREKKRYYKKKGGDAHVCREWDSDESSTDSSSDEDAANIVVTKGLLFPNVGHKCLMAKDGKKKKVKSKSSTRYESSSDNNASDEEDNLRTLFANLNMEQKEKLNELISAIHEKDDLLDSQEDFLIKENKKHVKVKNAYALEIEKCEKLSSELSTCHETIDNLRNENANLLAKVDSHVCNVSIANSRNNDDDLLARIEELNISLASLRIENEKLLAKAKDFDVCNATISDLITKNDMLHAKVVELKSCKPATSIVEHVSICTRCRDVDINAIHDHMSLIKQQNDHIAKLDAKIAEHNLENENFKFARSMLYSGRRPGIKDDIGFQKGDNVKLNTPPKRLFNFVKGKAPMPQDNEGYILYPAGYPEDKIRRIHSRKSHSGPNHAFMYKGETSSSRQPTRAKLPKKKTPSASNEHSVSFKTFDASYVLTNKSGKVVAKYVGGKHKGSKTCVWVPKVLVSNAKGPKTIWVYASGGSSWIIDSGCTNHMTGEKKMFSSYEKN

SEQ ID NO: 10195 - protein, 1411 aa, Zea mays
  Clone ID: TF_ZM4959.C2.o1.fg.pep
MSGEHAKKEMETGKKPTTSHGKASSEESRKKGKGKEKKASSHKSHQSGDKKKKMRKVVYYETDTSSPSTSDSDAPSVTSKRHERKKFSKIPLHYPRTSRHTPLLSIPLGKPPTFDGEDYARWSDLMKFHLTSLHKSIWNVVEFGAQVPSVKDEDYDEDEVAQIEHFNSQATTILLASLSREEYNKVQGLKSAKEVWDVLKTAHEGDELTKITKQETIKGELGRFRLRQGEEPQDMYNRLKTLVNQVRNLGSKKWDDHEMVKVILRSLIFLNPTQVQLIRGNPRYTLMTPEEVIGNFVSFEFMIKGSRKINELDGPSTSEAQPVAFKATEEKKEESTPSRTPIDASKLDNEEMALVIKSFRQILKQRRGKDYKPRFKKVCYKCGKPGHFIAKCPLSSDSDRGDDKKGRRKEKKKYYKKKGGDAHICREWDSDESSYDSSDEDAANIAINKGLLFPNVGHKCLMAKDGKRKKVKSKSSIRYESSSDDNASDEEDNLRTLFANLNMQQKEKLNELISAIHEKDDLLDTQEDFLIKENEKHVKVKNAYALEVEKCEKLSSELSTCHETIDNLRIENANLLAKVDSNVCNVSIPNLRNDNDDLLAKIEELNISLASLGVENEKLLAKAKDFYVCNVTISDLRSKNDILHAKVVELKSCKPSTSTVEHTSICTRCRDVDVNAIHDHMALIKQQNYHIAKLDAKIAEHELENEKFKFARSMLYSGRRPGIKDGIGFQKGDNVKINAPPKKLSNFVKGKATMPQDNEGYILYPVGYPESKIRRIHSRKSHSGPNHAFMYKGETSSSSQPTRAKLPNKKTPSASNDHGISFKTFDASYVLTNKSGKVYASGGSSWIIDSGCTNHTTGEKKMFSSYEKNQDPQRAITFGDGNQGLVKGLDSLDYNLLSVSQLCQMGYNCLFTEEKSHTQETLKGFLRRAQNEFGLRIKKIRSDNGTEFKNSQIEGFLEEEGIKHELSSPYTPQQNGVVERKNRTLLDMARTMLDEYKTSDRFWAEAVNTACYAINRLYLHQILKKSSYELLTEQVDLDEIGDEEAPCIVLRNMSIGDVCPKESEEPPNAQDQPSSSTQASPPTQNEDEAQVDEEEDQTNEPPQDDDNDQGGDANDQEKEDEEPRPPHPRPHKVEEALQDSDWVVVMQEELNNFTRNEVWHLVPRPNQNVVGTKWVFHNKQDEHGVVTRNKARLVAKGYSQVEGLDFGETYAPVARLESIHILLAYATYHGFKLYQMDVKSAFLNGPIKEEVYVEQPPGFEDSEYPNHVYKLSKALYGLKQAPRAWYECLRDFLIDNGFKVGKADPTLFTKTLENDLFVCQIYVDEIIFGSTNESTCEEFSRIMTQKFEMSMMGELKYFLGFQVKQLHEGTFISQTKYTQDILNKFGMKDAKPIKTPMGTNGHLDLDTEGRK

SEQ ID NO: 10196 - protein, 1347 aa, Zea mays
  unsure (1)..(1347): unsure at all Xaa locations
  Clone ID: TF_ZM4989.C5.o1.fg.pep
MSGASAKKEIGTGDKSASSGRTHSRESAHKHKEESSSSIKSQWKGDKKKKMKKVVYYETDSSSPSTSGKPLMLDGEDYSMWSDKMRHHLTSLHKSIWDIFEYGAQVQKEGDKDYDSEEVEQIQHFNSQATTILLASLSREEYNKVQGLKSAKEIWDVLKTTHEGDEVTKITKRETIEGELGRFMLHQGEEPQAMYNRLKTLMNQVHNLGSTKWDDHEMIKVILRSLVFLNPTQVQLIRGDPRYKLMSPEEVIGKFVSFELMIKGSKKIIEQGATSTPEVQPVAFKATEEEKKDSTPSRIPIDASKLDNEEMTLIIKSFRQILKQRRGKDYKPSSKKVCYKCGKPGHFIAKCPLSSDCDRGDDKKGKRREKKRYYKKKGGDTHVCREWDSDESSIDFSSDEDATNIAVTKGLLFPNVGHNQEDFLIKENKKHVKVKNAYALEVEKCEKLTSELSTCHDTNSNLRIENANLIAKVEKSNICDDSIVNLRNDNASSIAKIEKLNASLASLRNENEKLIAKAKDLDVCNVSISNLRDENTILHAKIVELKTCKPSTSTIEHVTICTRCRDINVDAIHDHLALIKKQNDHIAQLSAKINEHDLENEKIKFARSMXYSGRRPGIKDGIGFQQGDNVKLNAPPKRLSNFVKGKAPMPQDNEGYILYPAGYPEHKIRRIHSRKSHSGSHHAFMYKXEKSQTQETLKEFLRQAQNEFGLRIKKIRSDNGTEFKNSQIEGFLEEEGIKHEFSSPYTPQQNGVVERKNRTLLDMERTMLDEYKTSDRFWAEAVNTACYAINRVFGSKCFILVKRGRKTKFAPKVVEGFLLGYDSNTRAYRVFNKSTGLVEVSCDIVFDETNGSQVEQVDLDELDDEEAPCVALRNMSIGDVCPKESEEPPHAQDQPSSSMQASPPTQDEDGSQDDEGEDQEDEPPQEDDNDQGXDANDQDKEDEQDPRPPHPRVHQAIQQDHPXVEEALQDLDWVLAMQEDLNNFTRNEVWHLVPRPNQNVIETKWVFHNKQDEHGVVTRNKARLVAKGYSQVEGLDFGETYAPIARLESICILLAYATYHGFKLYQMDVKSAFLNGPIKEEVYVGQPPGFEDSEYPNHVYKLSKVLYGLKQAPRAWYECLRDFLITNSFKVGKADPTLFTKTIENDLFVCQIYVDDIIFGSTNKSICEEFSRIMTQKFEMSMMGELKYFLGFQVKQLQEGTFISQTKYIQDILTKFGMKDAKPIKTPMGTNGHLDLDTGACKIDRKSTSGTCQLLGRSLVSWASKKQNSVALSTAEAEYIAAGHCCAQLLWIRQTHRDYGYKLTKVPLLCDNESAIRMADNPVEHSRTKHIVIRYHFLRDHQQRGIS

SEQ ID NO: 10197 - protein, 445 aa, Zea mays
  Clone ID: TF_ZM4997.C1.o12.fg.pep
MLGDHAKKELETSDKPTTSHGKASSEESRNKGKGKEKKSSSHKSHQSGDKKKKMRKVPFVGDEDYDEDEVAQIEHFNSQATTILLASLSREEYNKVQGLKSAKEVWDVLKTAHEGDELTKITKRETIEGELGRFRLRQGEEPQDMYNRLKTLVNQVRNLGSKKWDDHEMVKVILRSLIFLNPTQVQLIRGNPRYTLMTPEEVIGNFVSFEFMIKGSRKINELDGPSTSEAQLVTFKATEEKKEESTSSRTPIDASKLNNEEMALVIKSFRQIIKQRRGKDYKPRSKKVCYKCGKPGHFIAKCPLSSDSDRGDDKKGRRKEKKRYYKKKGGDAHVCREWDSDKSSSDSSSDEDAANIAVTKGLLFPNVGHKCLMAKDGKKKKVYASGGSSWIIDSGCTNHMTGENKMFSSYEKNQDPQRAITFGDGNQGKISYPRDLKGILKTSSK

SEQ ID NO: 10198 - protein, 2049 aa, Zea mays
  Clone ID: TF_ZM5031.C1.o8.fg.pep
MGALVRSAFKFPRASSASGVQVKRSAFLKRRYKGNPLSPRREMKRLRAARHPMTLCTPFKSLMGPMLVMAAIFSGLASMPRSETMNPRSMPQGTSKTHFSRLSFNPFARRHPKVTSRSERRCCFTGRAPARISSECSATSLGMPGMSEGLHAKNLGVCAEEVDEHYFLFGVELGADPDVLAGVVAGVEGDGLNRLGRFEVAGVALRIRRLLGEAIQVGDEGLGLGDVLSVLHAFHVALVSVAFALDYEFYRCQSEKTATSHGKAPSSESANKKKDGSPSRIRSHKSGEKKKKMKKVVYYETDSSSPSTSGSDATSVTSKRQERKKYSKIPLRYPRIPKHIPLLSVPLGKPPTFDSEDYSRWSDMMRYHLTSLHKSIWDVVEFGVQVPSVGDEDYDEDEVAQIEHFNSQATTILLTSLSREEYNKVQGLKSAKEIWDMLKTAHEGDEVTKITKRETIEGELSRFRLRQGEEPQEMYNRLKTLVNQVRNLRSTKWDDHEMVKEVIGKFVSFELMIKGSNKIIEQDASSTPEAQPVAFNATEEKKEESTSSRLPIDASKLDNEEMALIIKSFYQILKQRRGKDYKSRSKKVCYKCGKPGHFIAKCPLSSDSDRDNDKKGKRRENNRYHKKKGGDAHVCREWNSDESSTDSSSDEDAANITVTKGLLFPNVGHKCLMAKDDKRKKVKSRSSTKYASSSDEDNSSDKEDNLCTLFANLNMQQKEKLNELIIVIHEKDELLDTQEDFLIKENKKHVKVKNANALEVEKCEKLSSELSTCHDIITNLRNKNARLIAKIDSNVCDDSISNLRDDNVSLLAKIEELNVSLASLRNENEKLIAKTKDLDVCNANISNLRSENDILHAKIVELKSCKPSTSTVEHVSICTRCRDINVDAIHDHLALIKKQNDHIAQLNAKINEHDLENENFKFARSMLYSGRRPGIKDGIGFQKGDNVKLNAPPKKLSNFVKGKAPMAQDNEGYILYPADYPEHKIRRIHYMKFHSGSNHAFMYKSETSSSRQSTRAKLPKKKTPIASNETSISFKTFDASYVLTNKSGKIVAKYIGGKHKGSKTCVWVPKVLVSNVKGPKTIWVYASGGSSWIIDSGCTNHMTGEKKMFSSYEKNQDPQRAITFGDGNQDLVKGLGKIVISPDHSISNVFLVDFLDYNFLSVSQLCKMGYNCLFTDIGVNVFRRSDDSVAFKGVLEGQLYLVDFDRAELDTCLIATTNMGWLWHRRLAHVGMKNLHKLLKGEHILGLTNVHFEKDMICSACQAGKQVGVHHPHKNIMTTDRPLELLHMDLFGPIAYISIDESKYCLVIVDDYSRFTWVFFLQEKSHTQETLKGFLRRAQNEFGLRIKKIRSDNGTEFKNSQIEGFLEEEGIKHEFSSPYTPQQNGVVERKNRTLLDMARTMLDEYKTSDRFWAEAVNTACYAINRLYLHRILKKTSYELLTGKKPNISYFRVFGSKCFILVKRGRKSKFAPKAVKGFLLGYDSNTRAYRVFNKSSGLVEVSCDIVFDETNGSQVEQVDLDELDNEEAPCVALRNMSIGDVCPKESEEPPNTKDQQSSSMQASPPTQDEDEVQDDEGEDQEDEPPQEESNDQGGDAHDQDEEDEQVPKPPHPRVHQAIQRDHPVNTILGDIQKGVTTRSRVAHFCEHYSFVSSIEPHKVEEALQGTKWFFRNKQDEHGVVTRNKARLVAKGYSQVEGLDFGETYAPVARLESIRILLAYATYHGFKLYQMDVKSAFLNGPIKEEVYVEQPPGFEDSEYPNHVYKLSKALYGLKQAPRAWYECLRDFLITNGFKVGKTDPTLFTKTLANDLFVCQIYVDDIIFGSTNESTCEEFSRIMTQKFEMSMMGELKYFLGFQVKQLQKGTFISQTKYIQDILNKFGMKDAKPIKTPMGTNRHLDLDTGGCKINRKSTSGTCQFLGRSLVSWASKKQNSVALSTAEAEYIAVGHCCVQLLWMRQTLRDYGYKLTKVPLLCDNESAIRMADNPVEHSRTKHIAIRYHFLRDHQQKGDIEIAYINTKEQLADIFTKPLDEQTFNKLRHELNILDSRNFF

SEQ ID NO: 10199 - protein, 953 aa, Zea mays
  Clone ID: TF_ZM5031.C3.o1.fg.pep
MSGDHAKKEMETGEKPTTNHGSTSSEESRTKRKEKKKISSNKGKEKKSSSHHKEKKEKSSSHKPRRSGDKQKRMRKVVYYETDTSSTSTSDSDAPSVTSKRQERKKFSKIPLHYPRISKHAPLLSVPLGKPPTFDGEDYARWSDLMRFHLTSLHKSIWDVVEFGTQVPSVGDKDYDEDEVAQIEHFNSQATTILLASLSREEYNKVQGLKSAKEVWDVLKTAHEGDELTKITKRETIEGELGRFRLRKGEEPQHMYNRLKTLVNQVRNLGSVKWDDHEVVKVILRSLIFLNPTQVQLIRGNRRYTKMTPEEVIGHFVSFECMIEGSRKINELDDPSTSVAQPVAFKAMEEKKEESTPSRQPIDASKLDNEEMALVIKSFRQILKQRRGKDYKSRSKKVCYKCGKPGHFIAKCPLSSDSDRDNDKKGKRREKKRYYKKKGGDAHVCREWDSDESSSDSSDDEDAANIAVTKGLLFPNVGHKCLMAKDGKRKKVKSNSSTKYESSSDDNASDEEDNLRSLFANLNIAQKEKLNELVSAIHEKDDLLDSQEDCLIKENKKHVKVKNAYALEIEKCEKLSSELSTCREMIDNLRNENASLNAKVDSHICNVSILNPKDNNDNLLARIEELNISLASLRVENENLIAKAKELDVCNAIISNLRDKNDILHAKIVELNSCIPSTSIVEHVSICTRCRDVDVNAIHDHMALIKQQNDHIAKLDAKIAEHNLENEKFKFARSMLYNGRRPGIKDGIGFQRGDNVKISAPPKRLSNFVKGKAPMPQDNEGYILYPAGYPESKIRRIHSRKSHSGPNHAFMYKGETSSSRQPTRAKLPKKTPTASNEHNLSFKTFDASYVLTNKSGKVYASGGSSWILDSGCTNHMTGEKRMFSSYEKNQDPQRAITFGDGNQGLVKDYNLLSVSQLCQMGYNCLFTDVGVTVFRRSDDSIAFKGMLEGQLYL

SEQ ID NO: 10200 - protein, 890 aa, Zea mays
  Clone ID: TF_ZM5043.C3.o2.fg.pep
MSGDHAKKEMETGEKPTTSHGSTSSEESRTKRKEKKKSSSNKGKEKKSSSHHKEMKERSSSHKPHRSGDKKKRMRKVVYYETDSSSASTSGSDAASITSKRQERKKYSKIPLHYPRISKHTPLLSVPLGKPPTFDGEDYARWSDLMRFHLTSLHKSIWDVVEFGAQVPSIGDKDYDEDEVAQIEHFNSQATTILLASLSREEYNKVQGLKSAKEVWDVLKTAHEGDELTKITKRETIEGELGRFRLRKGEEPQHMYSRLKTLVNQVRNLGSKKWDDHEMVKVILRSLIFLNPTQVQLIRGNPRYTKMTPEEVIGNFVSFECMIEGSRKINELDDPSTSEAQPVAFKATEEKKEESTPSRQPIDASKLDNEEMALVIKSFRQILKQRRGKDYKSRSKKVCYKCGKPGHFIAKCPLSSDSDRDNDKKGKRREKKRYYKKKGGDAHVCREWDSDESSSDSSSDEDAANIVVTKGLLFPNVGHKCLMAKDGKRKKDGLLDSQEDLLIKENKKHVKVKNAYALEIEKCEKLSSELSTCREMIDNLRNENASLNAKVDSHVCNVSIPHPRDNNDDLLARIEELNISLASLRSENEKLITKAKDFDVCKVTISDLRDKNDILHAKIVELNSCKPSTSTIEHVTICTRCRDIDVDAIHDHMILIKQQNDHIAKLDAKIAEHNLENEKFKFARSMLYNGRRPGIKDGIGFQRGDNVKISAPPKRLSNFVKGKAPMPQDNEGYILYPAGYPEDKIRKIHSRKSHSGSNHAFMYKSETSSSRQPTRAKLPKKKIPIASNDHNISFKTFDASYVLTNKSGKVYASGGSSWILDSGCTNHMTGEKKMFSSYEKNQDPQRAITFGDGNQDSLDYNLLSVSQLCQMGYNCLFTDVGVTDSRLEGG

SEQ ID NO: 10201 - protein, 640 aa, Zea mays
  Clone ID: TF_ZM5107.C1.o2.fg.pep
MSGDHAKKEIETGEKPTTSHESTSSEKSRTKRKEKKKDSSKGKEKRSSSHHKEKKEKSSSHKPHRSGDKKKRMRKVVYYETDSSSASTSGSDAASVTSKRQERKKYSKIPLRYPRISKHTPLLSVPLGKPPTFDGEDYARWSDLMQFHLTSLHKSIWDVVEFGAQVPFVGDENYDEDEVAQIEHFNSQATTILLASLSREEYNKVQGLKNAKEIWDLLKTAHEGDELTKITKRETIEGELGRFRLRQGEEPQDMYNRLKTLVNQVRNLGSKKWDDHEVVKVILRSLIFLNPTQVQLIRGNPRYTLMTPEEVIGNFVSFECMIKGSKKINELDDPSTSEAQPVAFKATEEKKEESTLSRQPIDASKLDNEEMALIIKSFRQILKQRKGKDYKSRSKKVCYKCGKPGHFIAKCPLSSDSDRDNDKKGKRREKKRYHKKRGGDAHVCREWDSDESSIDSSDDEDAANIAVTKGLLFPNVGHKCLMAKDGKRKKVKSKSSTKYESSSDDNASDEEDNLRTLFANLNIEQKEKLNKLISAIHEKDDLLDSQEDFLIKENKKHVKVKNAYALEIEKCEKLSSELSTCHDTITNLRNENAKLIAKVDSHICNVSTSNPRDDNVDLLARIDELNVSIASLRIENEKLQ

SEQ ID NO: 10202 - protein, 140 aa, Zea mays
  unsure (1)..(140): unsure at all Xaa locations
  Clone ID: TF_LIB4699-002-R1-K1-D10.pep
QRGKPRKARGGAFAEARGQAQGGARGGAQGGAVGNKKPTRDDGCHNCGKLGHWARECXQPRRGQGNVAXRRRRSRXALLLAHASIKIPSASPAAAALLHLDESKAHAFLGDGYNNDMIEGWCCLSLVLKCCESRIRQHNC

SEQ ID NO: 10203 - protein, 506 aa, Zea mays
  Clone ID: TF_ZmC1028_2.pep
MKNKAMVFKCFVLISDMDAVDALVLCGILLTNQTYNRLKTLVNKIRSYGSTRWTDHDIVRLMLRSFTVLDPHLVNNIRENPRYTKMTPEEILGKFVSERMIIKEATYVDGALNGPINEPQPLTLKATRSKETLPSKVAQIEAAGLNDEEMALIIKRFKTRDGNGYPRPDTRWVFTPLGWLNDARNFTMTALKGRKGQPSKTKTKGKRSCFKCGKLGHFIANCPDNDSDQDQGNKREKKKNYKKAKGEAHLGKEWDSDCSSSDSDNEGLAATAFNKSSLFPNERHTCLMAREKKVCTRNSTYASSSEDESSDEDEIDYSCLFKGLDRTKVDKINELIDALNDKNRLLEKQEDLLYEEHDKFVEAQKSHALEVKRNEMLSCELSSCHETISNLRSINDDLNAKLEIASKSTSCVEIVATCNRCKDFDIDACSEYLVSISKLNDELASLNAQLKTSKSEFDKLKFARDAYTIGRHPSIKDGLGFKREAKNLTSHKVPIPANEKGKAPRQ

SEQ ID NO: 10204 - protein, 768 aa, Zea mays
  unsure (1)..(768): unsure at all Xaa locations
  Clone ID: TF_ZmC119_1385.pep
MDPKGKGIVINDKEKESFVNEPKDDKPTDSGSGQRRKEGKKKKTRRIKEIVYYDSDESTSSQKDEDHNDYERRKPVNSNFSFDYSRIPQSSHSHLLSIPLGKPPHFDGEDYGFWSHKMRSHLFSLHPSIWEIVESGMHFDSSDSPMFINEQIHKNAQATTVLLASLCKNEYHKVSGLDNAKQIWDTLKISHEGNDVTLLTKMELVEGELGRFAMIRGEEPTQTYNRLKTLINKIRSYGSTRWTDHDVVRLMLRSFTVLDPHLVNNIRENPRYTKMSPEEVLGKFVSGRMMIKEARYVDDALNGPINEPQPLTLKATRSKEALPSKVAQIEAAGLNDEEMALIIKRFKTVLKGRNGQPSKTKTKGKRSCFKCGKLGHFIANCPDNESDQEKGNKREKKKQYKKAKGEAHLGKEWDSDCSSSDSDNEGLAATAFNKSALFPNERLTCLMAREKKVSTQDSTYASSSDSESSDDDIDYSCLFKGLDRSKIDKINELIDALNEKDRLLEKQEDLLYDEHDKFVEAQKSYALEVKRNEMLSYELSTCHETISTLQGVNNDLNAKLEIANKSNSCVEHVKICTRCKDFDVDACSEHLVLISKLNKEVASLNAQLKTSKNEVDKIKFARDAYTVGRHPSIKDGLGFKREAKNLTSHKAPIFVKEKGKAPMASSAKKNHAFIYSDRKFSRNAYRNYSYDSYXMTASSSSIVHDMPRKNVIHHMPRRNVVHVPRKASNEPSTIYHACNTSFAICRNDKKVIARKLGAKCKGDKTCIL

SEQ ID NO: 10205 - protein, 444 aa, Zea mays
  Clone ID: TF_ZmC119_1489.pep
MDPKGKGIVINDKEKESFVNEPKDDKPTDSGSGHRRKEGKKKKTRRIKEIVYYDDSDESSSSQKDNDDNDYDKQKTVNSNFSFDYSRIPHSSNAHLLPIPLGKPPHFDGEDYGFWSHKMRTHLFSLHPSIWEIVESGMKFDSSDSPSFINEQIHKNAQATTVLLASLCRDEYHKVSGLDNAKQIWDTLKISHEGNDVTLLTKMELVEGELGRFAMIRGEEPTQTYNRLKILINKIRSYGSTRWTDHDVVRLMLRSFTVLDPHLVNNIRENPRYIKMSPEEIHGKFVSGRMMIKEARYVDDALNGPIHEPQPIALKATRSKEALPSKVAQIEAAGLNDEEMALIIKRFKTALKGRKGQPSKTKTKGKRSCFKCGKLGHFIANCPDNDSDQEHGSKREKKKHYKKAKGEALKGKCALGPFLNILVIECQHKCLNVNQCPWMNKVQI

SEQ ID NO: 10206 - protein, 1707 aa, Zea mays
  Clone ID: TF_ZmC29741_13.pep
MDPKGKGIVINDKEKESFVNEPKDDKPTDSGSGHRRKDGKKKKTRRIKEIVYYDDSDESTSSHKDNDDNDYDKRKTVNSNFSFDYSRIPQSANAHLLSIPLGKPPHFDGEDYGFWSHKMRSHLFSLHPSIWEIVESGMHFDSSDSPMFINEQIHKNAQATTVLLASLCRDEYHKMELVEGELGRFAMIRGEEPTQTYNRLKTLINKIRSYGSTRWTDHDVVRLMLRSFTVLDPHLVNNIRENPRYTKMSPEEVLGKFVSGRMMIKEARYVDDALNGPINEPQPLALKATRSKEALPSKVAQIEAAGLNDEEMALIIKRFKTALKGRKGQPSKTKAKGKRSCFKCGKLGHFIANCPDNDSDQDQGNKREKKKNYKKAKGEAHLGKEWDSDCSSSDSDNEGLAATAFNKSSLFPNERHTCLMAREKKVCTRDSTYASSSEDESSDEEIDYSSLFKGLDRNKIDKINELIDALNEKDRLLEKQEDLLYDEHDKFVEAQKSYALEVKRNEMLSYELSTCHETISTLQSVNNDLNAKLEVANKSNSCVEHVMICTRCKNFDIDACNGHLVSISRLNDEVASLNAQLKTSKSDFDKLKFARDAYTIGRHPSIKDGLGFKREAKDLTSHKAPISAKEKGKAPMASSTKKNHAFMYNNRRQSHRSCNALDSHAYDSYAMYASSSSYMHCRDMPRKNIHHVPRKNFAHAPRKVMNGPSTIYHALNASFAICRKDRKIVARKLGAKCKGDKTCIWVPKEIVTNLVGPNKSWVYASGGSSWIIDSGCTNHMTGEKKMFTSYVKNKDSQDSIIFGDGNQGKVKGLGKIAISNEHSISNVFLVESLGYNLLSVSQLCNMGYNCLFTNVDVSVFRRCDGSLAFKGVLDGKLYLVDFAKEEVGLDACLMAKTCMGWLWHRRLAHVGMKNLHKLLKGEHVIGLTNVHFEKDRPCAACQAGKQVRGAHHSKNVMTTSRPLELLHMDLFGPVAYLSIGGSKYGLVIVDDFSRFTWVFFLQDKSETQGTLKRFLRRAQNEFELKVKKIRSDNGSEFKNLQVEEFLEEEGIKHEFSAPYTPQQNGVVERKNRTLIDMARTMLGEFKTPECFWSEAVNTACHTINRVYLHRLLKKTSYELLTVKKGRNSKFAPKAVEGFLLGYDSNTKAYRVFNKSSGLVEVSSDVVFDETNGSPREQVVDLDDVDEEDVPTAAIRTMAIGDVRPQEHLEQDQPSSSTMVHPPTQDDKQVPQVEAHDQGGAQDVQVEEEEAPQAPPTQVRATIQRDHHVDQILGDISKGVTTRSRLVNFCEHYSFVSSIEPFRVEEALLDLDWVLAMQEELNNFKHNEVWTLVPRPKQNVVGTKWVFRNKQDEHGVVTRNKARLVAKGYAQVAEEVYVEQPPGFEDERYPDHVCKLSKALYGLKQAPRAWYECLRDFLIANAFKVGKADPTLFTKTCDGDLFVCQVYVDDIIFGSTNQKSCEEFSRVMTQKFEMSMMGELNYFLGFQVKQLKDDTFISQTKYTQDFLKRFGMKDAKPAKTPMGTDRHTDLNKGVATPCFGIWYPKGSNFDLIGYSDSDYAGCKVDRKSTSGTCQFLGRSLVSWNSKKQTSVALSTAEAEYVAAGQCCAQLLWMRQTLRDFGYNLSKVPLLCDNESAIRIAENPVEHSRTKHIDIRHHFLRDHQQKGDIKVFHVSTENQLADIFTKPLDEKTFCRLRSELNILDSRNLD

SEQ ID NO: 10207 - protein, 923 aa, Zea mays
  Clone ID: TF_ZmC29741_17.pep
MDPKGKGIVINDKEKESFVNEPRDDKSNDSGSGHKRKDGKKKKTRRIKEIVYYDSDESSSSQKDDDHDKQKTVNSNFSFDYSRIPYSSNAHLLPIPLGKPPHFDGEDYGFWSHKMRTHLFSLHPSIWEIVENGMKFDSSDSPSFINEQIHKNAQATTVLLASLCRDEYNKVSGLDNAKQIWDTLKISHEGNDVTLLTKTELVEGELGRFAMIRGEEPTQTYNRLKTLINKIRSYGSTRWTDHDVVRLMLRSFTVLDPHLVNNIRENPRYTKMSPEEVLGKFVSGRMMIKEARYVDDALNGPINEPQPFALNATRSKEALPSKVAQIEAVGLNDEEMALIIKRFKTVLKGRNGQPSKTKTKGKRSCFKCGKLGHFIANCPDNESDQEKGNKREKKKHYKKAKGEAHLGKEWDSDCSSSDSDNEGLAATAFNKSALFPNERHTCLMAKEKKVSTRNSTHASSSGDDSSDDDEIDYSSLFKGLDRITIGKINELIDALNEKDKLLEKQEDLLYEEHDKFLEAQKSHALEVKRNEMLTCELSSCHETISKLKSINDELNAKIEIASKSTTCVENVVICNRCKDFDIDACSEHIASIAKLNNEVASLNAQLKTSKSDFEKLKFARDAYTVGRHPSIKDGLGFKREAKNLTSHKAPISAKEKGKAPMATSAKRNHAFLYHDKRQTRNRSYDAFDSYVYDSHAMFAPSSSYVYDRNITRRNVVPKRNVANVHKKVYASGGSSWIIDSGCTNHMTGEKKMFTSYVKNKDSQDSIIFGDGNQGKVKGLDVSVFRRSDGSLAFKGVLDSKLYLVDFAKEEAGLDACLIAKTSMGWLWHRRLAHVGMKNLHKLLKGEHVIGLTNVQFEKDRPCAACQAGKQVGGSHHTKNVMTTSRPLEMLHMDLFGPVAYLSIGGRKVRNPRDSQTLPQESSK

SEQ ID NO: 10208 - protein, 936 aa, Zea mays
  Clone ID: TF_ZmC29741_18.pep
MDPKGKGIVINDKEKESFVNEPKDDKPTDSGSGHRRKEGKKKKTRRIKEIVYYDDSDESSSSQKDNNDYDKQKTVNSNFSFDYSRIPHSSNAHLLPIPLGKPPHFDGEDYGFWSHKMRTHLFSLHPSIWEIVESGMKFDSSDSPSFINEQIHKNAQATTVLLASLCRDEYHKVSGLDNAKQIWDTLKISHEGNDVTLLTKMELVEGELGRFAMIRGEEPTQTYNRLKILINKIRSYGSTRWTDHDVVRLMLRSFTVLDPHLVNNIRENPRYIKMSPEEILGKFVSGRMMIKKARYVDDALNGPIHEPQPIALKATRSKEALPSKVAQIEAAGLNDEEMALIIKRFKTTLKGRKGQPSKTKTKGKRSCFKCGKLGHFIANCPDNDSDQEHGSKREKKKHYKKAKGEAHIGKEWDSDCSSSDSDNEGLAATAFNKSSLFPNERHTCLMAREKKVCNQNNVTYDSSSDDESSDDEIDYSSLFKGLDRTKVDKINELIDALNEKDRLLEKQEDLLYEEHDKFVEAQKSYALEVKRNEVLSSELSSCHETIATLKSVNDDLKAKLEVASKSNSCVEHVEICTRCKDFDVDACSDHLVSISKLTEELASLNAQLKTSKNEFEKLKFARDAYTVGRHPSIKDGLGFKREVKNLTSHKAPISAKEKGKAPMSSSAKKNHAFMYHDKRQIRNAYRSYNAYDDFDSHDMFASSSFYVHDRNVGRRNVVHNTPRKNVVNVYASGGSSWIIDSGCTNHMTGEKKMFTSYVKNKDSQDSIIFGDGNQGKVKGLVESLGYNLLSVSQLCNMGYNCLFTNVDVSVFRRSDGSLAFKGVLDGKLYLVDFAKEEAGLDACLIAKTSMGWLWHRRLAHVGMKNLHKLLKGEHVIGLTNVQFEKDRPCAACQAGKQVGGAHHNKNVMTTSRPLELLHMDLFGPVAYLSIGGMYHG

SEQ ID NO: 10209 - protein, 780 aa, Zea mays
  Clone ID: TF_ZmC29741_34.pep
MDPKGKGMVINDKEKETFVNEPNDDKPTDSGSGHKRKDGRKKKTRRIKEIVYYDSDESSSSQKDDDDHDRRKTVNSNFSFDYSRIPHSSNAQLLPIPLGKPPHFDGEDYGFWSHKMRTHLFSLHPSIWEIVESGMKFDSSDSPVFINEQIHKNAQATTVLLASLCRDEYHKVSGLDNAKQIWDTLKISHEGNDVTLLTKMELVEGELGRFAMIRGEEPTQTYNRLKTLINKIRSYGSTRWTDHDVVRLMLRSFTVLDPHLVNNIRENPRYTKMSPEEVLGKFVSGRMMIEEARYVDDALNGPINEPQPLALKATRSKEALPSKVAQIEAAGLNDEEMALIIKRFKTVLKDRKGQPSKTKAKGKRSCFKCGKLGHFIANCPDNDSDQDQGNKREKKKNYKKAKGEAHLGKEWDSDCSSSDSDNEGLAATAFNKSSLFPNERHTCLMAREKKVSTPNTSTYASSSEDESSDDDEIDYSCLFKGLDRTKEDTVREARGAVEGRNILLEKQEDLLYEEHDKFVEAQKSLALEIKRNEMLSSELSSCHETIAKLKSFNDDLNAKLKVASKSNSCVEIVETCNRCKDFDIDACSDHLVSISKLNEELASLNAQLKTSKNEFDKLKFARDAYTIGRHPSIKDGLGYKREAKNLTSHKAPISTKEKGKAPMASSVQKNHAFMYHDRRQSRNSYRSCNAYNAIDSHAMFASSSSYVHDRNVGRRNAVHNLPRRNVVNVPRKVYASGGSSWIIDSGCTNHMTGEKKMFTSYVKNKDSQDSIIFGDGNQGK

SEQ ID NO: 10210 - protein, 792 aa, Zea mays
  Clone ID: TF_ZmC29741_40.pep
MDPKGKGMVINDKEKETFVNEPNDDKPTDSGSGHKRKDGRKKKTRRIKEIVYYDSDESSSSQKDDDDHDRRKTVNSNFSFDYSRIPHSSNAQLLPIPLGKPPHFDGEDYGFWSHKMRTHLFSLHPSIWEIVESGMKFDSSDSPVFINEQIHKNAQATTVLLASLCRDEYHKVSGLDNAKQIWDTLKISHEGNDVTLLTKMELVEGELGRFAMIRGEEPTQTYNRLKTLINKIRSYGSTRWTDHDVVRLMLRSFTVLDPHLVNNIRENPRYTKMSPEEVLGEFVSGRMMIKEARYVDDALNGPINEPQPLALKATRSKEALPSKVAQIEAAGLNDEEMALIIKRFKTVLKGRKGQPSKTKAKGKRSCFKCGKLGHFIANCPDNDSDQDQGNKREKKKNYKKAKGEAHLGKEWDSDCSSSDSDNEGLAATAFNKSSLFPNERHTCLMAREKKVSTPNTSTYASSSEDESSDDDEIDYSCLFKGLDRTKVDKINELIDALNDRNILLEKQEDLLYEEHDKFVEAQKSLALEIKRNEMLSSELSSCHETIAKLKGFNDDLNAKLEVASKSNSCVEIVETCNRCKDFDIDACSDHLVSISKLNEELASLNAQLKTSKNEFDKLKFARDAYTIGRHPSIKDGLGYKREAKNLTSHKAPISAKEKGKAPMASSVQKNHAFMYHDRRQSYRSCNAYDAFDSHAMFASGSSYMHGRDMPRKNIHHVPRKNIVHVPRKVVNGPSTIYHALNASFAICRKDRKIVARKLGAKCKGDKTCISVPKDICTNLVGPNMSWVPKTQA

SEQ ID NO: 10211 - protein, 667 aa, Zea mays
  Clone ID: TF_ZmC29741_48.pep
MDPKGKGIVINDKEKESFVNEPKDDKPTDSGSGHRRKEGKKKKTRRIKEIVYYDDSDESSSSQKDNDDNDYDKQKTVNSNFSFDYSRIPHSSNAHLLPIPLGKPPHFDGEDYGFWSHKMRTHLFSLHPSIWEIVESGMKFDSSDSPSFINEQIHKNAQATTVLLASLCRDEYHKVSGLDNAKQIWDTLKISHEGNDVTLLTKMELVEGELGRFAMIRGEEPTQTYNRLKILINKIRSYGSTRWTDHDVVRLMLRSFTVLDPHLVNNIRENPRYIKMSPEEILGKFVSGRMMIKEARYVDDALNGPIHEPQPIALKATRSKEALPSKVAQIEAAGLNDEEMALIIKRFKTALKGRKGQPSKTKTKGKRSCFKCGKLGHFIANCPDNDSDQEHGSKREKKKHYKKAKGEAHIGKEWDSDCSSSDSDNEGLAATAFNKSSLFPNERHTCLMAREKKVCNQNNVTYDSSSDDESSDDEIDYSSLFKGLDRTKVDTINELIDALNEKDRLLEKQEDLLYEEHDKFVEAQKSYALEVKRNEVLSSELSSCHETIATLKSVNDDLNAKLEVASKSNSCVEHVEICTRCKDFDVDACSDHLVSISKLNEELASLNAQLKTSKNEFDKLKFARDAYTIGRHPSIKDGLGFKREAKNLTSHKAPIPAKEKGKAPMAT

SEQ ID NO: 10212 - protein, 751 aa, Zea mays
  Clone ID: TF_ZmC29741_49.pep
MDPKGKGIVINDKEKESFVNEPRDDKSNDSGSGHKRKDGKKKKTRHIKEIVYYDSDESSSSQKDDDHDKQKTVNSNFSFDYSRIPYSSNAHLLPIPLGKPPHFDGEDYGFWSHIMRTHLFSLHPSIWEIVESGMKFDSSDSPSFINEQIHKNAQATTVLLASLCRDEYNKVSGLDNAKQIWDTLKISHEGNDVTLLTKMELVEGELGRFAMIRGEEPTQTYNRLKTLINKIRSYGSTRWTDHDVVRLMLRSFTVLDPHLVNNIRENPRYTKMSPEEVLGKFVSGRMMIKEARYVDDALNGPINEPQPFALKATRSKEALPSKVAQIEAAGLNDEEMALIIKRFKTVLKGRNGQPSKTKTKGKRSCFKCGKLGHFIANCPDNESDQEKGNKREKKKHYKKAKGEAHLGKEWDSDCSSSDSDNEGLAATAFNKSALFPNERHTCLMAKEKKVSTRNSTYASSSDNDSSDDDEIDYSSVFKGLDRITIGKINELIDALNEKDKLLEKQEDLLYEEHDKFLEAQKSHALEVKRNEMLTCELSSCHETISKLKSINDELNVKIEIASKSTTCVENVAICNRCKEFDIDACSEHIASIAKLNNEVASLNVQLKTSKSEFDKLKFARDAYTIGRHPSIKDGLGFKREAKNLISHKDPIPAKEKGKAPMDTSAKRNHAFLYHDRRQTRNVSHDAFDSYVYDSHAMFAPSSSYVYDRNATRINVVPKRNAIHHVPRRNVIHAPRKIANEPSTIYCALNFP

SEQ ID NO: 10213 - protein, 437 aa, Zea mays
  Clone ID: TF_ZmC29741_72.pep
MDPKGKGIVINDKEKESFVNEPKDDKPTDSGSGHRRKEGKKKKTRRIKEIVYYDDSDESSSSQKDNNDNDYDKQKTVNSNFSFDYSRIPHSSNAHLLPIPLGKPPHFDGEDYRFWSHKMRTHLFSLHPSIWEIVESGMKFDSSDSPSFINEQIHKNAQATTVLLASLCRDEYHKVSGLDNAKQIWDTLKISHEGNDVTLLTKIELVEGELGRFAMIRGEEPTQTYNRLKILINKIRSYGSTRWTDHDVVRLMLRSFTVLDPHLVNNIRENPRYIKMSPEEILGKFVSGRMMIKEARYVDDALNGPIHEPQPIALKATRSKEVLPSKVAQIEAAGLNDEEMALIIKRFKTALKGRKGQPSKTKTKGKRSCFKCGKLGHFIANCPDNDSDQEHGSKREKKKHYKKAKGEAHIGKEWDSDCSSSDSDNEGLTATAFNKSS

SEQ ID NO: 10214 - protein, 386 aa, Zea mays
  Clone ID: TF_ZmC29741_78.pep
MDPKGKGMVINDKEKETFVNEPNDDKPTDSGSGHKRKDGRKKKTRRIKEIVYYDSDESSSSQKDDDDHDRRKTIHKNAQATTVLLASLCRDEYHKVSGLDNAKQIWDTLKISHEGNDVTLLTKMELVEGELGRFAMIRGEEPTQTYNRLKTLINKIRSYGSTRWTDHDVDRLMLRSFTVLDPHLVNNIRENPRYTKMSPEEVLGEFVSGRMMIKEARYVDDALNGPINEPQPLALKATRSKEALPSKVAQIEAAGLNDEEMALIIKRFKTVLKGRKGQPSKTKAKGKRSCFKCGKLGHFIANCPDNDSDQDQGNKREKKKNYKKAKGEAHLGKEWDSDCSSSDSDNEGLAATAFNKSSLFPNERHTCLMAREKKEYTVRKARGFVV

SEQ ID NO: 10215 - protein, 179 aa, Zea mays
  Clone ID: TF_ZmC29741_90.pep
MSPEEVLGKFVSGRMMIKEARYVDDALNGPIHEPQPLALKATRSKEALPSKVAQVEAAGLNDEEMALIIKRFKTALKGRKGQPSKTKAKGKRSCFKCGKLGHFIANCPDNESDQEQGDKREKKKHYKKAKGEAHLGKEWDSDCSSSDSDNEGLAATAFNKSSLFPNERHTCLMAREKKV

SEQ ID NO: 10216 - protein, 418 aa, Zea mays
  Clone ID: TF_ZmC4916_360.pep
MDPKGKGIVINDKEKESFVNKPKDDKPTDSGSGHRRKEGKKKKTRHIKEIVYYDDSDESTSSQKDDDHNDYERRKPVNSNFSFDYSRIPQSSNSHLLSIPLGKPPHFDGEDYGFWSHKMRSHLFSLHPSIWEIVESGMNFDSSDSPMFINEQIHKNAQATTVLLASLCRDEYHKVSGLDNAKQIWDTLKISHEGNDVTLLTKMELVEGELGRFAMIRGEEPTQTYNRLKTLINKIRSYGSTRWTDHDVVRLMLRSFTVLDPHLVNNIRENPRYTKMSPEEVLGKFVSGRMMIKEARYVDDALNGPINEPQPLALKATRSKEALPSKVAQIEAAGLNDEEMALIIKRFKTALKGRKGQPSKTKAKGKRSCFKCGKLGHFIANCPDNDSDQDQGNKREKKKNYKKAKGEARDGNGYIPVG

SEQ ID NO: 10217 - protein, 1669 aa, Zea mays
  unsure (1)..(1669): unsure at all Xaa locations
  Clone ID: TF_ZmC4916_361.pep
MDPKGKGIVINDKEKESFVNEPRDDKSNDSGSGHKRRDGKKKKTRRIKEIVYYDSDESSSSQKDDDHDKQRKPVNSNFSFDYSRIPQSSNSHLLSIPLGKPPHFDGEDYGFWSHKMRSHLFSLHPSIWEIVDSGMHFNSSDSPIFINEQIHKNAQATTVLLASLCRDEYNKVSGLDNAKQIWDTLKISHEGNDATLLTKMELVEGELGRFAMIRGEEPTQTYNRLKTLINKIRSYGSTRWTDHDVVRLMLRSFTVLDPHLVNNIRENPRYTKMSPEEVLGKFVSGRMMIKEARYVDDALNGPINEPQPFALKATGNKEALPSKVAQIEAAGLNEEEMTLIIKRFKTVLKGRNGQPSKTKTKGKRSCFKCGKLGHFIANCPDNDSDQEKGNKREKKKHYKKAKGEAHLGKEWDSDCSSSDSDNEGLAATAFDKSTLFPNERHTCLMAREKKVCTRNSTYASSSEDESSDEDEVDYSCLFKGLDRSKIDKINELIDALNEKNILLEKQEDLLYEEHDKFVEAQKSYALEVKRNKMLSFELSTCHETISTLKGVNNDLNAKLEVANKSNSCVEHVEICTRCKDFDINACSEHLVSISKLNDELASLNAQLKTSKNDFDKLKFARDAYTIGRHPSIKDGLGFKREAKNLTSHKAPIPAKEKGKXAPMASNVQKNHAFMYYDRRQTRNAYRSYNAFDDFDSHAMFAPSSSYVYDRNVTRRNVVPKRNTIHHVSRKNAIHAPRKVVNEPSTIYYALNASFAICRKDKKIVARKLGAKCKGDKTCIWVPKDICTNLVGPNMSWVYASGGSSWIIDSGCTNHMTGEKKMFTSYVKNKDSQDSIIFGDGNQGKDKSETQGTLKRFLRRAQNEFELKVKKIRSDNGSEFKNLQVEEFLEEEGIKHEFSAPYTPQQNGVVERKNRTLIDMARTMLGEFKTPECFWTEAVNTACHAINRVYLHRLLKKTSYELLTGNKPNVSYFRVFGSKCYILVKKGRNSKFAPKAVEGFLLGYDSNTKAYRVFNKSSGLVEVSSDVVFDETNGSPREQVFDCDDIDEEDVPTAAIRTMAIGEVRPQEQDEQDQPSSSIMVHPSTQDDEQVHQKEACDQGGAQDDHVMEEEAQPAPPTQVRATIQRDHPVDQILGDISKGVTTRSRLVNFCEHYSFVSSIEPFRVEEALLDPDWVLAMQEELNNFKRNEVWTLVPRPKQNVVGTKWVFRNKQDEHGVVTRNKARLVAKGYAQVAGLDFEETFAPVARLESIRILLAYAAHHSFRLYQMDVKSAFLNGPIKEEVYVEQPPGFEDERYPDHVCKLSKALYGLKQAPRAWYECLRDFLLANAFRVGKADPTLFTKTCDGDLFVCQIYVDDIIFGSTNQKSCEEFSRVMTQKFEMSMMGELNYFLGFQVKQLKDGTFISQTKYTQDLLKRFGMKDAKPAKTPMGTDGHTDLNKGGKSVDQKAYRSMIGSLLYLCASRPDIMLSVCMCARFQSDPKECHLVAVKRILRYLVATPCFGLWYPKGSTFDLVGYSDSDYAGCKVDRKSTSGTCQFLGRSLVSWNSKKQTSVALSTAEAEYVAAGQCCAQLLWMRQTLRDFGYNLSKVPLLCDNESAIRMAENPVEHSRTKHIDIRHHFLRDHQQKGDIEVFHVSTENQLADIFTKPLDEKTFCRLRSELNVLDSRNLD

SEQ ID NO: 10218 - protein, 1595 aa, Zea mays
  Clone ID: TF_ZmC4916_362.pep
MDPKGKGIVINDKEKESFVNEPRDDKSNDSGSGHKRKDGKKKKTRRIKEIVYYDSDESSSSQKDDDHDYKKTVNSNFSFDYSRIQHSSNSHLLSIPLGKPPHFDGEDYGFWSHKMRSHLFSLHPSIWEIVENGMKFDSSDSPMLINEQIHRNAQATTVLLASLCREEYNKVSGLDNAKQIWDTLKISHEGNDITMLTKMELVEGELGRFAMIRGEEPTQTYNRLKTLINKIRSYGSTRWTDHDVVRLMLRSFTVLDPHLVNNIRENPRYMMMTPEEVLGKFVSGRMMIKEARYVDDALNGPLHEPQPIALKATRSKESLPSKVAQIEAAGLNEEEMALIIKRFKTVLKGRNGQPSKTKTKGKRSCFKCGKLGHFIANCPDNDSDQEKGNKREKKKHYKKAKGEAHLGKEWDSDCSSSDSDNEGLAATAFNKSALFPNEHHTCLMAREKKVITRNANTYDSSSDDESSEDEIDYSSLFKGLDRTKIAKINELIDALNEKDRTLEKQEDLLYEEHDKFVSAQNSLALEVKRNGILSCELSTCNETISSLKGEIKDLTTKLEVASNSYVENITICTRCKDFDVNACSEHLVSISKLSDEVASLNAQLKTSKSDFEKLKFARDAYTVGRHPSIKDGLGFKREAKNLTSHKAPIPAKEKGKAPMATSAKRNHAFLYHERRHTRNDVFDSHAYDSYAMTASSSHVMHDRRNVVHQMPRKNVVHNAPRKVYASGGSSWIIDSGCTNHMTGEKKMFTSYVKNKDSQDSIIFGDGNQGKDKSETQGTLKRFLRRAQNEFELKVKKIRSDNGSEFKNLQVEEFLEEEGIKHEFSAPYTPQQNGVVERKNRTLIDMARTMLGEFKTPECFWTEAVNTACHAINRVYLHRLLKKTSYELLTGNKPNVSYFRVFGSKCYILVKKGRNSKFAPKAVEGFLLGYDSNTKAYRVFNKSSGLVEVSSDVVFDETNGSPREQVVDLDDVDEEDVPTAAIRTMAIGDVRPQEQEEQDQPSSSTMVNPPTQDDEQVHQQEACDQGGAQDDLVVEEEAQPAPPTQVRAMIQRDHPVDQILGDISKGVTTRSRLVNFCEHYSFVSSIEPFRVEEALLDPDWVSAMQEELNNFKRNEVWTLVPRPKQNVVGTKWVFRNKQDEHGVVTRNKARLVAKGYAQVAGLDFEETFAPVARLESIRILLAYAAHHSFRLFQMDVKSAFLNGPIKEEVYVEQPPGFEDERYPDHVCKLSKALYGLKQAPRAWYECLRDFLIANAFKVGKADPTLFTKTCDGDLFVCQIYVDDIIFGSTNQKSCEEFSRVMTQKFEMSMMGELNYFLGFQVKQLKDGTFISQTKYTQDLLKRFGMKDAKPAKTPMGTDGHTDLNKGGKSVDQKAYRSMIGSLLYLCASRPDIMLSVCMCARFQSDPKECHLVAVKRILRYLVATPCFGLWYPKGSTFDLVGYSDSDYAGCKVDRKSTSGTCQFLGRSLVSWNSKKQTSVALSTAEAEYVAAGQCCAQLLWMRQTLRDFGYNLSKVPLLCDNESAIRMAENPVEHSRTKHIDIRHHFLRDHQQKGDIEVFHVSTENQLADIFTKPLDEKTFCRLRSELNVLDSRNLD

SEQ ID NO: 10219 - protein, 609 aa, Zea mays
  Clone ID: TF_ZmC4916_369.pep
MDPKGKGMMINDKEKETFVNEPNDDKPTDSGSGHKRKDGRKKKTKRIKEIVYYDSDESSSSQKDDDDHDRRKTIHKNAQATTVLLASLCRDEYHKVSGLDNAKQIWDTLKISHEGNDVTLLTKMELVEGELGRFAMIRGEEPTQTYNRLKTLINKIRSYGSTRWTDHDVVRLMLRSFTVLDPHLVNNIRENPRYTKMSPEEVLGEFVSGRMMIKEARYVDDALNGPINEPQPLALKATRSKEALPSKVAQIEAAGLNNEEMALIIKRFKTVLKGRKGQPSKTKAKGKRSCFKCGKLGHFIANCPDNDSDQDQGNKREKKKNYKKAKGEAHLGKEWDSDCSSSDSDNEGLAATAFNKSSLFPNERHTCLMAREKKDKSKTQGTLKRFLRRAQNEFELKVKKIRSDNGSEFKNLQVEEFLEEEGIKHEFSAPYTPQQNGVVERKNRTLIDMAWTMLGEFKTPECFWSEAVNTACHATNRVYLHRLLKKTSLYQMDVKSAFLNGPIKEEVYVEQPPGFEDERYPDHSCEEFSRVMTQKFEMSMMGELNYFLGFQVKQLKDGTFISQTKYTQDLLKRFGMKDAKPAKTPMGTDGHIDLNKGDFGEAMGLKGQD

SEQ ID NO: 10220 - protein, 1778 aa, Zea mays
  Clone ID: TF_ZmC4916_372.pep
MDPKGKGMVVNDKEKESLFVNDPKEDKPTDSGSSHKRKDGRKKKTRRIKEIVYYDSDESSSSQKDDDNVYENKKTVNSYFSFDYSHIPQTTNAHLLSIPLASLCRDEYHKVSGLDNAKQIWDTLKISHEGNDVTMLTKMELVEGELGRFAMIRGEEPTQTYNRLKTLVNKIRSYGSTRWTDHDVVRLMLRSFTVLDPHLVNNIRENPRYTKMSPEEILGKFVSGRMMIKEARYIDDALNGPIHEPQIVALKATRSKEALPSKVAQVEAAGLNEEEMALIIKRFKTALKGRKEHPNKNKTKGKRSCFKCGKIGHFITNCPDNDSDQEKKSGKWEKKKNYKKAKGEAHLGKEWDSDCSSFDSDNEGLAATAFNKSSLFPNEHHTCLMAKEKKVCTRNNITYASSSEDESSDDDEIDYSCLFKGLDRTKIDKINELIDALNDKNRLLEKQEDLLYEEHDKFVSAQNSLALEVKRNEMLSCELSTCHETISTLKGVNDDLNAKLEVANKSNSCVEHVMICNRCKDFNVDACSEHLVCISKLNNEVASLNAQLKSSKSEFDKLKFARDAYTIGRHPSIKDGLGFKREVKNLTSHKASISAKEKGKAPMASNAQKNHAFMYHDRKHSRNGYRSYDALDSHAMVVSSSSIMHDRNLAWRNVINHMPRRNVVHVSRKIINEPSTIYHACNASFAIYRKDRKVIARKLGAKCKGDKTCIWVPKDIITNLVGPNKSWVYASGGSSWIIDSGCTNHMTGEKKMFTSYVKNKDSQDSIIFGDGNQGKVKGLGKIAISNEHSISNVFLVESLGYNLLSVSQLCNMGYNCLLTNVDVSVFRRSDGSLAFKGVLDDKLYLVDFAKEEVGLDACLIAKTSMGWLWHRRLAHVGMKNLHKLLKGEHVIGLTNVTFEKDRPCAACQAGKQVGSSHRAKNVMTTSRPLELLHMDLFGPVAYLSIGGSKYGLVIVDDFSRFTWVFFLQDKSETQGTLKRFLRRAQNEFELKVKKIRSDNGSEFKNLQVEEYLEEEGIKHEFSAPYTPQQNGVVERKNRTLIDMARTMLGEFKTPERFWSEVVNTACHTINRVYLHRLLKKTSYELLTGNKPNVSYFRVFGSKCYILVKKGRNSKFAPKAVEGFLLGYDSNTKAYRVFNKSLGLVEVSSDVVFDETNGSPKEQVVDLDDVDEEDVPTAAIRTMAIGDVRPQEQNERDQPSSSTMVHPPTQDDEQVHQEEAYDQGGAQDDHVMEEEAQPAPPTQVRAMIQRDHPVDQILGDISKGVTTRSRLVNFCEHYSFVSSIEPFREELNNFKRNEVWTLVPRPKQNVVGTKWVFRNKQDEHGVGTRNKARLVAKGYAQVAGLDFEETFAPVARLESIRILLAYAAHHSFRLFQMDVKSAFLNGPIKEEVYVEQPPGFEDEQYPDHICKLSKALYGLKQAPRAWYECLRDFLIANTFKVGKADPTLFTKTCDGDLFVCQIYVDDIIFGSTNQKSCEEFSRVMTQKFEMSMMGELSYFLGFQVRQLKDGTFISQTKYTQDLIKRFGMKDAKPAKTPMGTDGHTDLNKGGKSVDQKAYQSMLVSLLYLCASRPDIMLSVCMCARFQSDPRECHLVAVKRILRYLVATPCFGIWYPKGSTFDLIGYSDSNYAGCKVDRKSTSGTCQFLGRSLVSWSSKKQTFVALSTAEAEYVSAGQCCAQLLWMRQTLRDFGYNLSKVPLLCDNESAIRMVDNPVEHSRTKHIDIRHHFLRDHQQKGDIEVFHVSTENQLADIFTKPLDESTFCRLRSELNVLDSRNLD

SEQ ID NO: 10221 - protein, 548 aa, Zea mays
  Clone ID: TF_ZmC4916_373.pep
MTWLAHRTCPVCTGLSGDFQKGIVINDKEKESFVNEPKDDKPIDSGSGHKRKDGKKKKTKRIKEIVYYDDSDESTSSQKNDNNDYEKKKTVNSNFSFDYSRIPQSTNAHLLSIPLGKPPHFDGEDYGFWSHKMRSHLFSLHPSIWEIVESGMHFDSSDSPMFINEQIHKNAQATTVLLASLCRDEYHKVSGLDNAKQIWDTLKISHEGNDVTMLTKMELVEDELGRFAMIRGEEPTQTYNRLKPLVNKIRSYGSTRWTDHDVVRLMLRSFTVLDPHLVNNIRENPRYTKMTPEEILGKFVSGRMMIKEARYVDDALNGPINEPQPIALKATRSNEMLPSKVAQIEAAGLNDEEMALIIKRFKTALKGRKGQPSKTKTKGKRSCFKCGKLGHFIANCPDNDSDQDQGNKREKKKNYKKAKGEAHLGKEWDSDCSSSDSDIEGLAATAFNKSSLFPNERHTCLMAREKKVSTPNTSTYASSSEDESSDDDEIDYSCLFKGLDRTKVDKINELIDALNDRNILLEKQEDLLYEEHEKFVEAQKSLAKSRPA

SEQ ID NO: 10222 - protein, 1664 aa, Zea mays
  Clone ID: TF_ZmC4916_387.pep
MDPKGKGIVINDKEKESFVNEPKDDKTTDSGSGHKCKDGKKKKTRRIKEIVYYDDSDESTSSQKDDDNDYRKTVNSNFSFDYSRIPHSSNSHLLSIPLGKPPHFDGEDYGFWSHKMRSHLFSLHPSIWEIVENGMKFDSSDSPMLINEQIHRNAQATTVLLASLCREEYNKVSGLDNAKQIWDTLKISHEGNDITMLTKMELVEGELGRFAMIRGEEPTQTYNRLKTLINKIRSYGSTRWTDHDVVRLMLRSFTVLDPHLVNNIRENPRYTKMSPEEVLGKFVSGRMMIKEARYVDDALNGPIHEPQPIALKATRSKEALPSKVAQVEAAGLNNEEMALIIKRFKTALKGRKGQPSKTKTKEKRSCFKCGKLGHFIANCPDNESDQEQGSKREKKKAYKKAKGEAHLGKEWDSDCSSSDSDNEGLAATAFNKSSLFPNEHHTCLMAREKKVSTQDSTYASSSDNESSDDDDIDYSCLFKGLDRSKIDKINELIDALNDKNRLLEKQEDLLYEEHDKFVSAQNSLALEIKRNEVLSSELSSCHETIATLKGVNNDLNAKLEVASKSNSCVEHVMVCTRCKDFNIDACSKHLVSISKLNDEVASLNAQLKTSKSDFDKLKFARDAYTIGRHPSIKDGLGFKREVKNLTSHKAPIPTKEKGKAPMATSAKKNHAFLYHDRKNSRNAFRSYDVFNSHAYDSYAMTASSSSYMHGRNVTRRNAIHHVPRKNIIHAPRKVVNEPSTIYCALNASFAICRKDRKIVARKLGARCKGDKTCIWVPKDICANLVGPNMSWVYASGGSSWIIDSGCTNHMTGEKKMFTSYVKNKDSQDSIIFGDGNQGKDKSETQGTLKRFLRRAQNEFELKVKKIRSDNGSEFKNLQVEEFLEEEGIKHEFSAPYTPQQNGVVERKNRTLIDMARTMLGEFKTPERFWSEAVNTACHAINRVYLHRLLKKTSYELLTGNKPNVSYFRVFGSKCYILVKKGRNSKFTPKAVEGFLLGYDSNTKAYRVFNKSSGLVEVSSDVVFDETNGSPREQVVDCDDVDEEDVPTAAIRTMAIGEVRPQEHDERDQTSSSTMVLPPTQDDEQVHQQEACDQGGAQDDRVMEEDAQPAPPTQVRAMIQRDHPVDQILGDISKGVTTRSRLVNFCEHYSFVSSIEPFRVEEALLDPDWILAMQEELNNFKRNEVWTLVPRPKQNVVGTKWVFRNKQDEHGVVTRNKARLVAKGYAQVAGLDFEETFAPVARLESIRILLAYAAHHSFRLYQMDVKSAFLNGPIKEEVYVEQPPGFEDERYPDYVCKLSKALYGLKQAPRAWYECLRDFLIANAFKVGKADPTLFTKTCDGDLFVCQIYVDDIIFGSTNQKSCEEFSRVMTQKFEMSMMGELNYFLGFQVKQLKDGTFISQTKYTQDLLKRFGMKDAKPAKTPMGTDGHTDLNKGGKSVDQKAYRSMIGSLLYLCASRPDIMLSVCMCARFQSNPKECHLVAVKRILRYLVATPCFGLWYPKGSTFDLVGYSDSDYAGCKVDRKSTSGTCQFLGRSLVSWNSKKQTSVALSTAEAEYVAAGQCCAQLLWMRQTLRDFGYNLSKVPLLCDNESAIRMAENPVEHSRTKHIDIRHHFLRDHQQKGDIEVFHVSTENQLADIFTKPLDEKTFCRLRSELNVLDSRNLD

SEQ ID NO: 10223 - protein, 660 aa, Zea mays
  Clone ID: TF_ZmC4916_389.pep
MDPKGKGIVINDKEKESFINEPKDDKPTDSGSGHKRKDGKKKKTRRIKEIVYYDDSDESTSSQKDDYRKTVNSNFSFDYSRIPHSSNSHLLSIPLGKPPHFDGEDYGFWSHKMRSHLFSLHPSIWEIVENGMKFDSSDSPMLINEQIHKNAQATTVLLASLCREEYNKVSGLDNAKQIWDTLKISHEGNDITMLTKMELVEGELGRFAMIRGEEPTQTYNRLKTLINKIRSYGSTRWTDHDVVRLMLRSFTVLDPHLVNNIRENPRYMMMTPEEVLGKFVSGRMMIKEARYVDDALNGPINEPQPLALKATRSKEMLPSKVAQIEAAGLNDEEMALIIKRFKTTLKGRKGQPSKTKTKGKRSCFKCGKLGHFIANCPDNDSDQDQGNKREKKKNYKKAKGEAHLGKEWDSDCFLSDSDNEGLAATAFNKSSFFPNEHHTCLMAREKKVSTRDPTYASSSDNESSDDDDIDYSCLFKGLDRSKIDKINELIDALNDKNRLLEKQEDLLYEEHDKFVEAQKSYALEVKRNEMLSYELSTCHETISTLQGVNNDLNAKLEVANKSNSCEEHVIICTRCKDFDIDACSEHLVSISRLNDEVASLNAQLKTSKSDFDKLKFARDAYTVGRHPSIKDGLGFKREAKNLTSHKAPISAKEKGKAPMA

SEQ ID NO: 10224 - protein, 1705 aa, Zea mays
  unsure (1)..(1705): unsure at all Xaa locations
  Clone ID: TF_ZmC4916_393.pep
MDPKGKGIVINDKEKESFVNEPKDDKPTDSGSGNRRKEGKKKKTRRIKEIVYYDDNDESTSSQKDDDHNDYERGKPVNSNFSFDYSCIPQSSNSHLLSIPLGKPPHFDGEDYGFWSHKMRSHLFSLHPSIWEIVESGMHFDSSDSPMFINEQIHKNAQATTVLLASLCRDEYHKVSGLDNAKQIWDTLKISHEGNDVTLLTKMELVEGELGRFAMIRGEEPTQTYNRLKILINKIRSYRSTRWTDHDVVRLMLRSFTVLDPHLVNNIRKNPRYVDDALNGPINEPQPLALKATRSKEALPSKVAQFEAAGLNDEEMALIIKRFKTALKGHKGQPSKTKTKGKRSCFKCGKLGHFIANCPDNDSDQEKGNKREKKKNYKKAKGEAHIGKEWDSDCSSSDSDNEGLAATAFNKSSLFPNEHHTCLMAKEKKVCTRDSTTYDSSSDDDSSDEEIDYSSLFKGLDRNKIDKINELIDALNEKDRLLEKQEDLLYDEHDKFVEAQKSYALEVKRNEMLSYELSTCHETISTLQGVNNDLNAKLEAANKSNSCVEHVMICIRCKDFDIDACSEHLVSISRLNDEIASLNDQLKTSKSDFDKLKFARDAYTIGRHPSIKDGLGFKREVKDLTSHKAPISTKEKGKAPMAISAKKNHAFMYHDRRHARNANRSYDAFDSHVYDSYAMFASSSXVYASGGSNWIIDSGCTNHMTGEKKMFTSYVKNKDXQDSIIFGDGNQGKVKGLDVSVVRRSDGSLAFKGVLDDKLYLVDFAKEEAGLDACLIAKTSMGWLWHRRLAHVGMKNLHKLLKGEHVICLTNVQFEKDRPCAACQAGKLVGSSHHIKNVMTTSRPLEMLHMDLFGPVAYLSIGGSKYGLVIVDDFSRFTWVFFLQDKSETQGTLKRFLRRAQNEFELKVKKIRSDNGSEFKNLQVEEYLEEEGIKHEFSAPYTPQQNGVVERKNMTLIDMARTMLGEFKTLERFWSEAVNTACHAINRVYLHRLLKKMSYELLTGNKPNFSYFRVFGSKCYILVKKGRNSKFAPKAVEGFLLGYDSNTKAYRVFNKSSGLVEVSSDVVFDETNGSPREQVVDFDDADEEEVPTTAICTMAIGDVRPQEQDEQDQPSSSTMVQPPSQDDEQEVCDQGGAQDDLAMEEEAQSAPPTQVRAMIQRDHPVDQILGDISKGVTTRSRLVNFCEHYSFVSSIEPFRVEEALLDPDWVLAMQEELNNFKRNEVWTLVPRPKQNVVGTKWVFRKKQDEHGVVTRNKARLVAKGYAQVAGLDFEETFAPVARLESIRILLAYAAHHSFRLFQMDVKSAFLNGPIKEEVYVEQPPGFEDERYPDHVCKLSKALYGLKQAPRAWYECLRDFLIANAFKVGKADPTLFTKTCDGDLFVCQIYVDDIIFGSTNQKSCEEFSKVMTQKFEMSMMGELSYFLGFQVRQLKDGTFISQTKYTQDLIKRFGMKDAKPAKTPMGTDGHTDLNKGGKSVDQKAYRSMIGSLLYLCASRPDIMLSVCMCARFESDPKECHLVAVKRILRYLVATPCFRIWYPKGSTFDLIGYSDSDYAGCKVDRKSTSGMCQFLGRSLVSWSSKKQTSVALSTAEAEYVAAGQCCAQLLWMRQTLRDFGYNLSKVPLLCDNESAIHKADNPVEHSRTKHIDIRHHFLRDHQQKGDIEVFHVSSENQLADIFTKPLDEQTFCKLRSELNVLDSRNLD

SEQ ID NO: 10225 - protein, 1095 aa, Zea mays
  unsure (1)..(1095): unsure at all Xaa locations
  Clone ID: TF_ZmC4916_408.pep
MDPKGKGIVINDKEKESFVNEPRDDKSNDSGSGHKRRDGKKKKTRRIKEIVYYDSDKSSSSQKDDDHDKQRKPVNSNFSFDYSRIPQSSNSHLLSIPLGKPPHFDGEDYGFWSHKMRSHLFSLHPSIWEIVDSGMHFNSSDSPIFINEQIHKNAQATTVLLASLCRDEYNKVSGLDNAKQIWDTLKISHEGNDATLLTKMELVEGELGRFAMIRGEEPTQTYNRLKTLINKIRSYGSTRWTDHDVVRLMLRSFTVLDPHLVNNIRENPRYTKMSPEEVLGKFVSGRMMIKEARYVDDALNGPINEPQPFALKATGNKEALPSKVAQIEAAGLNEEEMALIIKRFKTVLKGRNGQPSKTKTKGKRSCFKCGKLGHFIANCPDNDSDQEKGNKREKKKHYKKAKGEAHLGKEWDSDCSSSDSDNEGLAATAFNKSTLFPNERHTCLMAREKKVCTRNSTYASSSEDESSDEDEVDYSCLFKGLDRSKIDKINELIDALNEKNILLEKQEDLLYEEHDKFVEAQKSYTLEVKRNEMLSFELSTCHETISTLKGVNNDLNAKLEVANKSNSCVEHVEICTRCKDFDIDACSEHLVSISKLNDELASLNAQLKTSKNDFDKLKFARDAYTIGRHPSIKDGLGFKREAKNLTSHKAPILAKEKGKAPMASNVQKNHAFMYYDRRYSRNAFRGHDVFDSHAYDSYAMTASSSHVMHGRNMSRRNAIHHVPRKNVIHAPRKVVNEPSTIYCALNTSFAICRKDRKVIARKLGAKCKGDKTCIWVPKEIVTNLVGPNKSWVYASGGSSWIIDSGCTNHMTGEKKMFTSYVKNKDSQDSIIFGDGNQGKDKSETQGTLKRFLRRAQNEFELKVKKIRSDNGSEFKNLQVEEFLEEEGIKHEFSAPYTPQQNGVVERKNRMLIDMARTMLGEFKTPESFWTEAVNTACHTINRVYLHRLLKKTSYELLTGNKPNVSYFRVFGSKCYILVKKGINSKFAPKAVEGFLLGYDSNTKAYRVFNKSSGLVEVSSDVVFDETNGSPREKVVDLDDVDEEDVPTAAIRTMAIGEVRPQEQDKRDQPSPSTEDDEKVPQVEALDQGXAQDDQV

SEQ ID NO: 10226 - protein, 1809 aa, Zea mays
  Clone ID: TF_ZmC4916_409.pep
MDPKGKGIVINDKEKESFVNEPKDDKSNDLGSGHRRKDGKKKKTRRIKEIVYYDSDESSSSQKDDDNNYRKTVNSNFSFDYSRIPHNSNSHLLSIPLGKPPHFDGEDYGFWSHKMRSHLFSLHPSIWEIVENGMKFDSSDSPMLINEQIHRNAQATTVLLASLCREEYNKVSGLDNAKQIWDTLKISHEGNDVTMLTKMELVEGELGRFAMIRGEDHLALTEPRDDKSNNSGSGHKRKDGKKKKTRRIKEIVYYDSDESSSSQKNDDNDYRKTVNSNFSFDYSRIPHSSNSHLLSIPLGKPPHFDGEDYGFWSHKMRSHLFSLHPSIWEIVENGMKFDSSDSPMFINEQIHKNAQATTVLLASLCREEYNKVSGLDNAKQIWDTLKISHEGNDITMLTKMELVEGELGRFAMIRGEEPTQTYNRLKTLINKIRSYGSTRWTDHDVVRLMLRSFTVLDPHLVNNIRENPRYTMMTPEEVLGKFVSGRMMIKEARYVDDALNGPIHEPQPIALKASRSKEALPSKVAQIEAAGLNDEEMALIIKRFKTVLKGRNGQPSKTKTKGKRSCFKCGKLGHFIANCPDNESDQEKGNKREKKKHYKKAKGEAHLGKEWDSDCSSSDSDNEGLAATAFNKSTLFPNERHTCLMAREKKICTRNSTYASSSEDESSDEDEVDYSCLFKGLDRSKIDKINELIDALNEKNILLEKQEDLLYEEHDKFVEAQKSYALEVKRNEMLSFELSTCHETISTLKGVNNDLNAKLEVANKSNSCVEHVEICTRCKDVDINACSEHLVSISKLSDEVASLNARLKTSKSDFEKLKFARDAYTVGRHPSIKDGLGFKREAKNLTSHKAPIPAKEKGKAPMATSAKRNHAFLYHDKRQTRNRSYDAFDSYVYDSHAIKDRKVIARKLGAKCKGDKTCIWVPKEIVTNLVGPNKSWVYASGGSSWIIDSGCTNHMTGEKKMFTSYVKNKDSQDSIVFGDGNQGKEKSETQGTLKRFLRRAQNEFELKVKKIRSDNGSEFKNLQVEEFLEEEGIKHEFSVPYTPQQNGVVERKNRTLIDMARTMLGEYKTPECFWTEAVNTACHAINRVYLHRLLKKTSYELLTGNKPNVSYFRVFGSKCYILVKKGRNSKFAPKAVEGFLLGYDSNTKAYRVFNKSSGLVEVSSDVVFDETNGSPREQVVDCDDVDEEDVPTAAIRTMAIGEVRPQEQDERNQPSSSTMVHPPTEDDEQVPQVEALDQGGAQDNHVMEEEVQPAPPTQVRAMIQRDHPVDQILGDISKGVTTRSRLVNFCEHYSFVSSIEPFRVEEALLDPDWVLAMQEELNNFKRNEVWTLVPRPKQNVVGTKWVFRNKQDEHGVVTRNKARLVAKGYAQVAGLDFEETFAPVARLESIRILLAYAAHHSFRLYQMDVKSAFLNGPIKEEVYVEQPPGFEDERYPDHVCKLSKALYGLKQAPRAWYECLRDFLLANAFKVGKADPTLFTKTSDGDLFVCQIYVDDIIFGSTNQKSCEEFSRVMTQKFEMSMMGELNYFLGFQVKQLKEGTFISQTKYTQDLLKRFGMKDAKPAKTPMGTDGHTDLNKGGKSVDQKAYRSMIGSLLYLCASRPDIMLSVCMCARFQSDPKECHLVAVKRILRYLVATPCFGLWYPKGSTFDLVGYSDSDYAGCKVDRKSTSGTCQFLGRSLVSWNSKKQTSVALSTAEAEYVAAGQCCVQLLWMRQTLRDFGYNLSKVPLLCDNESAIRMAENPVEHSRTKHIDIRHHFLRDHQQKGDIEVFHVSTENQLADIFTKPLDEKTFCRLRSELNVLDSRNLD

SEQ ID NO: 10227 - protein, 837 aa, Zea mays
  Clone ID: TF_ZmC4916_428.pep
MDPKGKGMVVNNNEKESIFNEPKDDKPIDSGSSHKRKDGKKKKTRRIKEIKDDDDYEKKKTINSNFSFDYSRIPHSTNAHLLSIPLGKPPHFDREDYGFWSHKMRSHLFSLHPSIWEIVENGMHFDSSDSPMFINEQIHKNAQATTVLLASLCRDEYHKVSGLDNAKQIWDTLKISHEGNDVTMLTKMELVEGELRRFAMIRGEEPTQTYNRLKTLVNKIRSYGSTRWTDHDVVRLMLRSFTVLDPHLVNNIRENPRYTKMTPEEILGKFVSGRMMIKEARYVDDALNGPINEPQPLALKATRSKETLPSKVAQIEAAGLNDEEMALIIKRFKTALKGRKGQPSKTKTKGKRSCFKCGKLGHFIANCPDNDSDQDQGNKREKKKNYKKAKGEAHLGKEWDSDCSSSDSDNEGLAATAFNKSSFFPNEHHTCLMAREKKVYASGGSNWIIDSRCTNHMTGEKKMFTSYVKNKDSQDSIIFGDGNQGKDKSETQETLKHFLRRAQNEFELKVKKIRSDNGSEFKNLQVEEYLEEEGIKHEFSAPYTPQQNGVVERKNRTLIDMARTKLGEFKTPERFWSEAVNTACHAINRVYLHRLLKKTSYELLTGYDSNTKAYRVFNKSSGLVEVSSDVVFDETNGSPREQVVDLDDVDEEDVPTAAIRTMAIGEVRPQEQKEQDQPSSSTMVHPPTQDDEQVHQQEACDQGGSQDDHVMEEETHPAPPTQVRAMIQRDHPVDQILGDISKGVTTQSRLVNFCEHYSFVSSIEPFRVEEALLDPDWVLAMQEELNNFKRNEVWTLVPRPKQNVVGTKWVFVGVLGPTAHPGLPLKVFLGVGRCRQL

SEQ ID NO: 10228 - protein, 1817 aa, Zea mays
  Clone ID: TF_ZmC4916_434.pep
MDPKGKGMVINDKETFVNELNDDKPTDSGSSHKRKDGRKKKTRRIKEIVYYDSDESSSSQKDDDDHDRRKTVNSNFSFDYSRIPQSSNSHLLSIPLGKPPHFDGEDYGFWSHKMRSHLFSLHPSIWEIVENGMKFDSSDSPMLINEQIHRNAQATTVLLASLCREEYNKVSGLDNAKQIWDTLKISHEGNDITMLTKMELVEGELGRFAMIRGEEPTQTYNRLKTLINKIRSYGSTRWTDHDVVRLMLRSFTVLDPHLVNNIRENPRYTMMTPEEVLGKFVSGRMMIKEARYVDDALNGPINEPQPLALKATRSKEALPSKVAQIEAAGLNDEEMALIIKRFKTALKGRKGQPSKTKTKEKRLCFKCGKLGHFIANCPDNDSDQDQGNKREKKKNYKKAKGEAHLGKEWDSDCSSSDSDNEGLTVTAFNKSTLFPNERHTCLMAREKKVCTRNSTYASSSEDESSDEDEVDYSCLFKGLDRTKVDKINELIDALNDKNMLLEKQEDLLYEEHDKFVEAQRSHALEVKRNEMLSCELSSCHETISKLRSINDNLNAKLEIASKSNSCVEIVETCNRCKDFDIDACSDHLVSISKLNEELASLNAQLKTSKNEFDKLKFARDAYTIGRHPSIKDGLGFKREAKNLTSHKALIPAKEKGKAPMASSVQKNHAFMYHDKRQTRNAYRSYNAYNAFDSHAMIASSSFYVHDRNVGRRNVVHNLPRRNVVNVPRRVNEPSTIYHALNDSFAICRKDRKIVARKLGAKCKGYKTCIWVPKDICTNLVGPNMSWVYASGGSSWIIDSGCTNHMTGEKKMFTSYVKNKDSQDSIIFGDGNQGKVKGLVKSLGYNLLSVSQLCNMGYNCLFTNVDVSVFRRSDGSLAFKGVLDGKLYLVDFAKEEADLDACLIAKTSMGWLWHRRLAHVGMKNLHKLLKGEHVIGLTNVQFEKYRPCAACQAGKQVGGAHHSKNVMTTSRPLELLHMDLFGPVAYLSIGGSKYGLVIVDDFSRFTWVFFLQDKSETQGTLKRFLRRAQNEFELKVKKIRSDNGSEFKNLQVEEFLEEEGIKHEFSAPYTPQQNGVVERKNRTLIDMARTMLGEFKTPERFWSEAVNTACHAINQVYLHRLLKKTSYELLTGNKPNVSYFRVFGSKCYILVKKVRNSKFAPKAVEGFLLGYDSNTKAYRVFNKSSGLVEVSSDVVFDETNGSPREQVVDLDDVDDEDVPTAAIRTMTIGDVRPREQLEQDQLSSSTMVHPPTQDDEQVPQVEAHDQGGAQDVQVEEEEAQSAPPTQVRAVIQRDYPVDQILGDISKGVTTRSRLVNFCEHYSFVSSIEPFKVEEALLDPDWVLAMQEELNNFKRNEVWTLDEHRVVTRNKARLVAKGYAQVTGLDFEETFAPVARLESIRILLAYASHHSFRLFQMDVKSAFLNGPIKEEVYVEQPPGFEDERYPDHVCKLSKALYGLKQAPRAWYECLRDFLIANAFKVGKADPTLFTKTCDGDLFVCQIYVDDIIFGSTNQKSCEEFSRVMTQKFEMSMMGELNYFLGFQVKQLKDGTFISQTKYTQDLLKRFGMKDAKPAKTPMGTDGHTDLNKGGKSVDQKAYRSMIGSLLYLCASRPDIMLSVCMCARFQSDPKECHLVAVKRILRYLVATPCFGLWYPKGSTFDLVGYSGSDYAAYKVDRKSTSGTCQFLGRSLVSWNSKKQTSVALSTAEAEYVAAGQCCAQLLWMRQTLRDFGYNLSKVPLLCDNESAIRMAENPVEHSRTKHIDIRHQFLRDHQQKGDIEVFHVSTENQLADIFTKPLDEKTFCRLRSELNVLDSRNLD

SEQ ID NO: 10229 - protein, 1669 aa, Zea mays
  Clone ID: TF_ZmC4916_454.pep
MDPKGKGIVINDKEKESFVNEPKDDKPTDSGSGQRRKEGKKKKTRRIKEIVYYDSDESTSSQKDEDHNDYERRKPVNSNFSFDYSRIPHSSNSHLLSIPLGKPPHFDGEDYGFWSHKMRSHLFSLHPSIWEIVESGMHFDSSDSPMFINEQIHKNAQATTVLLASLCRNEYHKVSGLDNAKQIWDTLKISHEGNDVTLLTKMELVEGELGRFAMIRGEEPTQTYNRLKTLINKIRSYGSTRWTDHDVVRLMLRSFTVLDPHLVNNIRENPRYTKMSPEEVLGKFVSGRMMIKEARYVDDALNGPINEPQPLALKATRSKEALPSKVAQIEAAGLNDEEMALIIKRFKTALNGRKGQPSKTKTKGKRSCFKCGKLGHFIANCPDNESDQEKGNKREKKKQYKKAKGEAHLGKEWDSDCSSSDSDNEGLAATAFNKSALFPNERLTCLMAREKKVSTQDSTYASSSDSESSDDDIDYSCLFKGLDRSKIDKINELIDALNEKDRLLEKQEDLLYDEHDKFVEAQKSYALEVKRNEMLSYELSTCHETISTLQGVNNDLNAKLEVANKSNSCVEHVEICTRCKDFDINACSEHLVSISKLNDELASLNAQLKTSKNDFDKLKFARDAYTIGRHPSIKDGLGFKREAKNLTSHKAPIPAKEKGKAPMATSAKRNHAFLYHDRRQTRNVSHDAYDSYVYDSHTMFAPSSSYVYDRNVTRRNVVPKRNAIHHVPRRNVIHAPRKIANETSTIYYALNASFAICRKDKKIVARKLGAKCKGDKTCIWVPKDICTNLVGPNMSWVYASGGSSWIIDSRCTNHMTGEKKMFTSYVKNKDSQDSIIFGDGNQGKDKSETQGTLKRFLRRAQNEFELKVKKIRSDNGSEFKNLQVEEFLEEEGIKHEFSAPYTPQQNGVVERKNRTLIDMARTMLGEFKTPECFWTEAVNTACHAINRVYLHRLLKKTSYELLTGNKPNVSYFRVFGSKCYILVKKGRNSKFAPKAVEGFLLGYDSNTKAYRVFNKSSGLVEVSSDVVFDETNGSPIEQVVDCDDVDEEDVPTAAIRTMAIGEVRPQEQDERDQPSSSTMVQPPTKDDEQVPQVEALDQGGAQNDQVIEEEAQPAPPTQVRAMIQRDHPVDQILGDISKGVTTRSRLVNFCEHYSFVSSIEPFRVEEALLDPDWVLAMQEELNNFKRNEVWTLVPRPKQNVVGTKWVFRNKQDEHGVVTRNKARLVAKGYAQVAGLDFKETFAPVARLESIRILLAYAAHHSFRLFQMDVKSAFLNGPIKEEVYVEQPPGFEDERYPDHVCKLSKALYGLKQAPRAWYECLRDFLIANAFKVGKADPTLFTKTCNGDLFVCQIYVDDIIFGSTNQKSCEEFSRVMTQKFEMSMMGELNYFLGFQVKQLKDGTFISQTKYTQDLLKRFGMKDAKPAKTPMGTDGHTDLNKGGKSVDQKAYRSMIGSLLYLCASRPDIMLSVCMCARFQSDPKECHLVAVKRILRYLVATPCFGLWYPKGSTFDLVGYSDSDYAGCKVDRKSTSGTCQFLGRSLVSWNSKKQTSVALSTAEAEYVAAGQCCAQLLWMRQTLRDFGYNLSKVPLLCDNESAIRMAENPVEHSRTKHIDIRHHFLRDHQQKGDIEVFHVSTENQLADIFTKPLDEKTFCRLRSELNVLDSRNLD

SEQ ID NO: 10230 - protein, 1661 aa, Zea mays
  Clone ID: TF_ZmC4916_471.pep
MDPKGKGIVINDKEKESFVNEPKDDKPTDSGSGHKRKDGKKKKTRRIKEIVYYDDSDESTSSQKDDDNDYRKTVNSNFSFDYSRIPHSSNSHLLSIPLGKPPHFDGEDYGFWSHKMRSHLFSLHPSMWEIVENGMKFDSSDSPMLINEQIHRNAQATTVLLASLCREEYNKVSGLDNAKQIWDTLKISHEGNDITMLTKMELVEGELGRFAMIRGEEPTQTYNRLKTLINKIRSYGSTRWTDHDVVRLMLRSFTVLDPHLVNNIRENPRYTMMTPEEVLGKFVSGRMMIKEARYVDDALNGPINEPQPLALKATRSKEMLPSKVAQIEAAGLNDEEMALIIKRFKTALKGRKGQPSKTKTKGKRSCFKCGKLGHFIANCPDNDSDQDQGNKREKKKNYKKAKGEAHLGKEWDSDCSSSDSDNEGLAATAFNKSSLFPNERHTCLMAREKKVSTRDSTYASSSDNESSDDDDIDYSCLFKGLDRSKIDKINELIDALNDKNRLLEKQEDLLYDEHDKFVSAQNSLALEIKRNEMLSGELSTCHNTISTLEGVNNDLNAKLEVANKSNSCEEYVVICTRCKDFDIDACSEHLVSISKLNDELASLNAQLKTSKNDFDKLKFARDAYTIGRHPSIKDGLGFKREAKNLTSHKAPISAKEKGKAPMASSTKRNHAFMYHDRRQTRNAYRNNNAYDDFDPHAMFASSSSYMHGRNMSRRNAIHHVPKKNIIHAPRKVVNEPSTIYCALNASFAICRKDRKIIARKLGAKCKGDKTCIWVPKDICTNLVGPNMSWVYASGGSSWIIDSGCTNHMTGEKKMFTSYVKNKDSQDSIIFGDGNQGKDKSETQGTLKRFLRRAQNEFELKVKKIRSDNGSEFKNLQVEEFLEEEGIKHEFSAPYTPQQNGVVERKNRTLIDMARTMLGEFKTPECFWSEAVNTACHAINRVYLHRLLKKTSYELLTGNKPNVSYFRVFGSKCYILVKKSRNSKFAPKAVEGFLLGYDSNTKAYRVFNKSSGLVEVSSDVVFDETNGSPREQVVDLDDVDEEDVPTAAMRTMAIGDVRPQEQLEQDQPSSSTMMHPPTQNDEQVHQEECGQGGAQDDHVMEKEAQPAPPTQVRAMIQRDHPVDQILGDISKGVTTRSRLVNFCEHYSFVSSIEPFRVEEALLDPDWVLAMQEELNNFKRNEVWTLVPRPKQNVVGTKWVFRNKQDEHGVVTRNKARLVAKGYAQVAGLDFEETFAPVARLESIRILLAYAAHHSFRLYQMDVKSAFLNGPIKEEVYVEQPSGFEDERYPDHVCKLSKALYGLKQAPRAWYECLRDFLIVNSFKVGKADPTLFTKTCDGDLFVCQIYVDDIIFDSTNQKSCQEFSRVMTQKFEMSMMGELNYFLGFQVKQLKDGTFISQTKYTQDLLKRFGMKDAKPAKTPMGTDGHTDLNKGGKSVDQKAYRSMIGSLLYLCASRPDIMLSVCMCARFQSNPKECHLVAVKRILRYLVATPCFGLWYPKRSTFDLVGYSDSDYAGCKVDRKSTSGTCQFLGRSLVSWNSKKQTSVALSTAEAEYVATGQCCAQLLWMRQTLRDFGYNLSKVPLLCDNESAIRMAENPVEHSRTKHIDIRHHFLRDYQQKGDIEVFHVSTENQLADIFTKPLDEKTFCRLRSELNVLDSRNLD

SEQ ID NO: 10231 - protein, 1574 aa, Zea mays
  Clone ID: TF_ZmC951_358.pep
MSGDHAKKEMGTGEKPITSHGEAPSGESYNKGKGKEKESPSHKSRRSGDKKKKKMRKVVYYETDSSSPSTSGSDTPSVTSKRHERKKFSKIPLRYPRIPKHTPLLSVPLGKPPMFDGEDYARWSDMMRYHLTSLHKRDEDYDEDEVAQIMHFNSQATTILLASLSREEYNKVQGLNSAKEIWDVLKTAHEGDEVTKITKRETIEGELDRFRLRQGEEPQDMYNRLKTLVNQVRNLGSKKWDDHEMVKVILRSLVFLNPTQVQLIRGSKKINELDGPSTSEAQPVAFKATEEKKEKSTSSRTPIDASKLDNEEMTLIIKSFSQILTQRRGKDYKPRSKKVCYKCGKPGHFISKCPLSSDSDRGDDKKGRRKEKKRYYKKKGGDAHVCREWDSDESSTDSSSDEDAANIAVTKGLLFPNVGHNSIHEKDELLDTQEDFLIKENKKHVKVKNAYALEVEKCEKLTSELGTSHDLIANLRNENARLITKVDSNACDVSIPNLRNDNVDLLAKIEELNISLASLRIENEKLLAKAKELDVCNASISDLRDNNDILCAKIVELNSCKPSTSTTEHVTICTRCRDINIDAIHDHMALIKQQNDHIAKLDAKIAEHDLENEKFKFARSMLYSGRRPGIKDDIGFQKGDNIKLNAPPKRLSNFVKGKAPMPQDNEGYIFYPAGYPESKIRRIHSRKSHSGPNHAFMYKGETSSSRQSTHAKLPKKKTPSASNDHNISFKTFDASYVLTNKSGNVVAKYVGGKHKGSKTCVWVYASGGSSWIIDSGCTNHMTGEKKMFSSYEKNQDPQRAITFEDGNQDVGVTVFRRSDDSIAFKGVLEGQLYLVDFDRAELDTCLIAKTNMGWLWHRRLAHVGMKNVHKLLKGEHILGLTNVHFEKDRICSACQAGKQVGVHHPHKNIMTTDRPLELLHMDLFGPIAYISIGGRKISYPRNLNGFLRRAQNEFGLRIKKIRSDNGTEFKNSQIEGFLEEEGIKHEFSSPYTPQQNGVVERKNRTLLDMARTMLDEYKTSDRFWAEAVNTACYAINRLYLHRILKKTSYELLIGKKPNISYFRVFGSKCFILVKRGRKSKFAPKTVEGFLLGYDSNTRAYRVFNKSSGQVEVSCDVVFDETNGSQVEQVDLDEIGDEEAPCVALRNMSIGDVCPKESKEPPNAQDQPSSSTQASPPTQNEDEAQVDEGEDQKDEPPQDDSNDQGGDANDQDKEDAEPRPPHPRVHQAIQRDHPVDTILGDIHKGVTTRSRVAHFCEHYSFVSSIEPHKVEEALQDSDWVVAMQEELNNFTRNEVWHLVPRPNQNVVGTKWVFRNKQDEHGVVTRNKARLVAKGYSQVEGLDFGETYAPIARLESIRILLAYATYHGFKLYQMDVKSAFLNGSIKEEVYVEQPPGFEDSEYPNYVYKLSKALYGLKQAPRAWYECLRDFLITNGFKVGKADPTLFTKTFDNDLFVCQIYVDDIIFGSTNESTCEEFSRIMTQKFEMSMMGELKYFLGFQVKQLQEGTFISQTKYIQDILNKFGMKDAKPIKTPMGTNGHLDLNTGGKFVDQKVYRSMIGSLLYLCASRPDIIEST

SEQ ID NO: 10232 - protein, 1721 aa, Zea mays
  Clone ID: TF_ZM3612.C6.o4.fg.pep
MDPKGKGMVINDKEKESFVNEPNDDRSTDSGSGHKRKDERKKKTRRIKEIVYYDSDESSSSQKDVDDYDKRKMVNSNFSFDYSRIPHSSNAQLLPIPLGKPPHFDGEDYGFWSHKMCTHLFSLHPSIWEIVESGMKFDSSDSPVFINEQIHKNAQATTVLLASLCRDEYHKVSGLDNAKQIWDTLKISHEGNDVTLLTKMELVEGELGRFAMIRGEEPTQTYNRLKTLINKIRSYGSTRWTDHDVVRLMLRSFTVLDPHLVNNIRENPRYTKMSPEEVLGKFVSGRMMIKEARYVDDALNGPINEPQPLALKATRSKEALPSKVAQIEAAGLNDEEMALIIKRFKTVLKGRKGQPSKTKAKGKRSCFKCGKLGHFIANCPDNDSDQDQGNKREKKKNYKKAKGEAHLGKEWDSDCSSSDSDNEGLAATAFNKSSLFPNERHTCLMAREKKVSTHNTSTYASSSEDESSDDDEIDYSCLFKGLDRTKVDKINELIDALNDRNILLEKQEDLLYEEHDKFVEAQKSLALEIKRNEMLSSELSSCHETIAKLKSFNDDLNAKLEVASKSNSCVEIVETCNRCKDFDIDACSDHLVSISKLNDELASLNAQLKTSKNEFDKLKFARDAYTIGRHPSIKDGLGYKREAKNLTSHKAPISAKEKGKAPMASSVQKNHAFMYHDRRQPRNAYRSCNAYNVFDSHAMFASSSSYVHDRNVGRRNVIHNMPRKNVVNVPRKVNEPSTIYHALNASFAICRKDRKIVARKLGARCKGDKTCIWVPKDICANLVGPNMSWVYASGGSSWIIDSGCTNHMTGEKKMFTSYVKNKDSQDSIIFSDGNQGKVKGLGKIAISNEHSISNVFLVESLGYNLLSVSQLCNMGYNCLFTNVDVSVFRRCDGSLAFKGVLDGKLYLVNFAKEEAGLDACLMAKTCMGWLWHRRLAHVGMKNLHKLLKGEHVIGLTNVHFEKDRPCAACQAGKQVGSSHHTKNVMTTSRPLELLHMDLFGPVAYLSIGGSKYGLVIVDDFSRFTWVFFLQDKSETQGTLKRFLRRAQNEFELKVKKIRSDNGSEFKNLQVEEFLEEEGIKHEFSAPYTPQQNGVVERKNRTLIDMARTMLGEFKTPKCFWSEAVNTACHAINRVYLHRLLKKTSYELLTGNKPNVSYFRVFGSKCYILVKKGRNSKFAPKAVEGFLLGYDSNTKAYRVFNKSSGLVEVSSDVVFDETNGSPREQVVDLDDVDEEDVPTAAIRTMAIGDVRPQEHLEQDQPSSSTMPFRVEEALLDPDWVLAMQEELNNFKRNEVWTLVPRPKQNVVGTKWVFHNKQDEHGVVTRNKARLVAKGYAQVAGLNFEETFAPVARLESIRILLAYAAHHSFRLYQMDVKSAFLNGPIKEEVYVEQPPGFEDERYPDHVCKLSKALYGLKQAPRAWYECLRDFLIANAFKVGKADPTLFTKTCDSDLFVCQIYVDDIIFGSTNQKSCEEFSRVMTQKFEMSMMGELTYFLGFQVKQLKDGTFISQTKYTQDLLKRFGMKDAKPAKTPMGTNGHTNLNKGGSLLYLCASRPDIMLSVCMCARFQSDPKECHLVAVKRILRYLVATPCFGIWYPKGSNFDLIGYSDSDYAGCKVDRKSTSGTCQFLGRSLVSWNSKKQTSVALSTAEAEYVAAGQCCAQLLWMRQTLRDFGYNLSKVPLLCDNESAIRIAENPVEHSRTKHIDIRHHFLRDHQQKGDI

SEQ ID NO: 10233 - protein, 1364 aa, Zea mays
  Clone ID: TF_ZM3654.C1.o3.fg.pep
MDPKGKGIVINDKEKESFVNEPKNDKPTDSGSGHKRKDGKKKKTRRIKEIVYYDDSDESTSSQKDDDNDYRKTVNSNFSFDYSRIPHSSNSHLLSIPLGKPPHFDGEDYRFWSHKMRSHLFSLHPSIWEIVENGMKFDSSDSPMLINEQIHRNAQATTVLLASLCREEYNKVSGLDNAKQIWDTLKISHEGNDITMLTKMELVEGELGRFAMIRGEEPTQTYNRLKTLINKIRSYGSTRWTDHDAVRLMLRSFTVLDPHLVNNIRENPRYTTMTPEEVLGKFVSGRMMIKEARYVDDALNGPINEPQPLALKATRSKEMLPSKVAQIEAAGLNDEEMALIIKRFKTALKGRKGQPSKTKTKGKRSCFKCGKLGHFIANCPDNDSDQDQGNKREKKKNYKKAKGEAHLGKEWDSDCSSSDSDNEGLAATAFNKSSLFPNERHTCLMAREKKVYASGGSSWIIDSGCTNHMTGEKKMFTSYVKNKDSQDSIIFGDGNQGKVKGLVESLGYNLLSVSQLCNMGYNCLFTNIDVSVFRRSDGSLAFKGVLDGKLYLVEFAKEETGLDACLIAKTSMGWLWHRRLAHVGMKNLHKLLKGEHVIGLTNVQFEKDRPCAACQAGKQVGGAHHSKNVMTTSRPLELLHMDLFGPVTYLSIGGSKYGLVIVDDFSRFTWVFFLQDKSETQGTLKRFLRRAQNEFELKVKKIRSDNGSEFKNLQVEEFLEEEGIKHEFSAPYTPQQNGVVERKNRTLIDMARTMLGEFKTPECFWSEAVNTACHTINRVYLHRLLKKTLYELLTGNKPNVSYFRVFGSKCYILVKKGRKSKFAPKAVEGFLLGYDSNTKAYRVFNKSSGLVEVSSDVVFDETNGSPREQVVDCDDVDEEDVPTAAIHTMAIGDVRPQEQKEQDQPYSSTMVLPPTQDDEQVHQQEACDQGGAQDDHVMEEEAQPAPPTQVRAMIQRDHPVDQILGDISKGVTTRSRLVNFCEHYSFVSSIEPFRVEEALLDPDWVLAMQEELNNFKCNEVWTLVPRPKQNVVGTKLFQMDVKNAFLNGPIKEEVYVEQLPGFEDERYPDHVCKLSKALYGLKQAPRAWYECLRDFLIANAFKVGKADPTLFTKTCDGDLFVCQIYVDDIIFGSTNKKSCEEFSRVMTQKFEMSMMGELNYFLGFQVKQLKDGTFISQTKYTQDLLKQFGMKDAKPAKTPMGTDGHTDLNKGDSDYAGCKVDRKSTSGTCQFLGRSLVSWNSKKQTSVALSTAEAEYVAAGQCCAQLLWMRQTLRDFGYNLSKVPLLCDNESAIRMAENPVEHSRTKHIDIRHHFLRDHQQKGDIEVFHVSTENQLADIFTKPLDEKTFCRLRSELNVLDSRNLD

SEQ ID NO: 10234 - protein, 1447 aa, Zea mays
  unsure (1)..(1447): unsure at all Xaa locations
  Clone ID: TF_ZM3667.C6.o2.fg.pep
MDPKGKGMVIDNNEKESILNEPKNDKSTDLGSSHKRKDGKKKKTRHIKEIVYYDDSDESTSSQKDDDNDYRKTVNSNFSFDYSRIPHSSNSHLLSIPLGKPAQFDGEDYGFWSHKMRSHLFSLHPSIWEIVENGMKFDSSDSPMLINEQIHRNAQTTIVLLASLCREEYNKVSGLDNAKQIWDTLKISHDGNDITMLTKMELVEGELGRFAMIRGEEPTQTYNRLKTLINKIRSYGSTRWTDHDVVRLMLRSFTVLDPHLVNNIRENLRYTMMTPEEVLGKFVSGRMMIKEARYVDDALNGPINEPQPLALKATRSKETLPSKVAQIEAAGLNDEEMALIIKRFKTALKGRKGQPSKTKTKGKRSCFKCGKLGHFIANCPDNDSDQDQGNKREKKKNYKKAKGEAHLGKEWDSDCSSSDSDNEGLAATAFNKSSLFPNERHTCLMAREKKVSTQDSTYAFSSDNESSDDDDIDYSCLFKGLDRSKIDKINELIDALNDKNRLLEKQEDLLYEEHDKFVETQKSLALEIKRNEMLSFELSTCHETISTLKGVXNDLNAKLEVANKSNSCVEHVVICTRCKDFDIDACSEHLVSISKLNDELASLNVYASGGSSWIIDSGCTNHMTGEKKMFTSYVKNKDSQDSIIFGDGNQGKNKSETQGTLKRFLRRAQNEFELKVKKIRSDNGSEFKNLQVEEFLEEEGIQHEFSAPYTPQQNAVNTACHAINRVYLHRLLKKTSYELLTGNKPNVSYFRVFGSKCYILVKKGRNSKFAPKAVEGFLLGYDSNTKAYRVFNKSSDLVEVSSDVVFDETNGSPREQVVDLDDVDEEDVPTAAIRTMAIGDVRPQEQDEQDQPSSSTMVHPPTQDDEQVHQQETCDQGGAQDDHVMGEEAQPAPPTQVRAMIQRDHPVDQILGDISKGVTTRSRLVNFCEHYSFVSFIEPFRVEEALLDPYWVLAMQEELNNFKRNEVWTLVPRPKQNVVGTKWVFRNKQDEHGVVTRNKARLVAKGYAQVAGLDFEETFAPVARLESIRILLAYAAHHSFRLFQMDVKSAFLNGPIKEEVYVEQPPGFEDERYPDHVCKLSKALYGLKQAPRAWYECLRDFLIANAFKVGKADPTLFTKTCDGDLFVCQIYVDDIIFGSTNKKSCEEFSRVMTQKFEMLMMGELNYFLGFQVKQLKDGTFISQTKYTQDLLKRFGMKDAKPAKTPMGTDGHTDLNKGGKSVDQKAYRSMIGSLLYLCASRPDIMLSVCMCARFQYDPKECHLVAVKRILRYLVATPCFGLWYPKGSTFDLIGYSDSDYAGCKVDRKSTSGTCQFLGRSLVSWNSKKQTSVALSTAEAEYVVAGQCCAQLLWMRQTLRDFGYNLSKVPLLCDNESVIRMAENPVEHSRTKHIDIRHHFLRDHQQKGDIEVFHVSTENQLADIFTKPLDEKTFCRLRSELNVLDSRNLD

SEQ ID NO: 10235 - protein, 865 aa, Zea mays
  Clone ID: TF_ZM4163.C7.o1.fg.pep
MDPKGKGIVINDKEKESFVNEPRDDKSNDSSSGHRRKDGKKKKTRRIKEIVYYDSDESTSSQKDEDNDYKQKTVNSNFSFDYSRIPHSSNAHLLPIPLGKPPHFDGEDYGFWSHKMRTHLFSLHPSIWEIVESGMKFDSSDSPSFINEQIHKNAQATTVLLASLCRDEYHKVSGLDNAKQIWDTLKISHEGNDVTLLTKMELVEGELGRFAMIRGEEPTQTYNRLKILINKIRSYGSTRWTDHDVVRLMLRSFTVLDPHLVNNIRENPRYIKMSPEEILGKFVSGRMMIKEARYVDDALNGPIHEPQPIALKATRSKEALPSKVAQIEAAGLNDEEMALIIKRFKTALKGRKGQPSKTKTKGKRSCFKCGKLGHFIANCPDNDSDQDHGSKREKKKHYKKAKGEAHIRKEWDSDCSSSDSDNEGLAATAFNKTSLFPNERHTCLMAREKKVCNQDNVTYDSSSDNESSDDEIDYSSLFKGLDRTKVDKINELIDALNEKDRLLEKQEDLLYEEHDKFVEAQKSYALEVKRNKVLSSELSSCHETIATLKRVNDDLNAKLEVASKSNSCVEHVEICTRCKDFDIDACSEHLVSISKLNDELASLNAQLKTIKSNFDKLKFARDAYTIGRHPSIKDGLGFKREAKNLTSHKAPIPAKEKGKAPMATSAKKNHAFLYHDRRQTRNAYRSYNAYNDLSHAMFASSSSYVYDRNVGRRDVVHNMPRRNVVNIPRKVNEPSTIYHALNASFAICRKDRKVYASGGSSWIIDSGCTNHMTGEKKMFTSYVKNKDSQDSIIFGDGNQGKDKSETQGTLKRFLRRAQNEFELKVKKIRSDNGSEFKNLQVEEFLEEEGIKHEFSAPYTPQQNGV

SEQ ID NO: 10236 - protein, 1613 aa, Zea mays
  unsure (1)..(1613): unsure at all Xaa locations
  Clone ID: TF_ZM4323.C9.o5.fg.pep
MDPKGKGIVINDKEKESFVNEPKDDKHTDSGSGHRRKEGKKKKTRRIKEIVYYDDSDESSSSQKDNDDNDYDKQKTVNSNFSFDYSRIPHSSNAHLLPIPLGKPPHFDGEDYGFWSHKMRTHLFSLHPSIWEIVESGMKFDSSDSPSFINEQIHKNAQATTVLLASLCRDEYHKVSGLDNAKQIWDTLKISHEGNDVTLLTKMELVEGELGRFAMIRGEEPTQTYNRLKILINKIRSYGSTRWTDHDVVRLMLRSFTVLDPHLVNNIRENPRYIKMSPEEILGKFVSGRMMIKEARYVDDALNGPIHEPQPIALKATRSKEALPSKVAQIEAAGLNDEEMALIIKRFKTALKGRKGQPSKTKAKGKRSCFKCGKLGHFIANCPDNDSDQDQVNKREKKKHYKKAKGEAHLGKEWDSDCSSSDSDNEGLAATAFNKSTLFPNERHTCLMAREKKVCTRNSTYASSSEDESSDEDEVDYSCLFKGLDRTKVDKINELIDALNEKNMLLEKQEDLLYEEHDKFIEAQKSYALEVKRNEMLSFELSTCHETISTLKGVNNDLNAKLEVANKSNSCVEHVAICSRCKDFDINACSEHLVSISKLNDELASLNAQLKTSKSDFDKLKFARDAYTVGRHPSIKDGLGFKREAKNLTSHKAPIPAKEKGKAPMATSTKKNHAFLYHDRRQSRSAYRGYNAFDSHHMIASSSSYMHGRNMSRRNAIHHVPRKNVSHAPRKVVNEFSTVYHALNASFAICRKDRKVIARKLGAKCKGDKTCIWVPKKICANLVGPNMSWVYASGGSSWIIDSGCTNHMTGEKKMFTSYVKSKDSQDSIIFGDGNQGKDKSETQGTLKRFLRRAQNEFELKVKKIRSDNGSEFKNLQVEEFLEEEGIKHEFSAPYTPQQNGVVERKNRTLIDMARTMLGEFKTPERFWSEVVNTXACHAINRVYLHRLLKKTXAYRVFNKSLGLVEVSSDVVFDETNGSPREQVVDLDEVDEEDVPTAAIRTMAIGDVRPQEQDEQDQPSSSTMVHSPTQDDEQVHQQEACDQGGAQDDHVMEEEAQPAPPTQVRAMIQRDHPVDQILGDISKGVTTRSRLVNFCEHYSFVSSIEPFRVEEALLDPDWVLAMQEELNNFKRNEVWTLVPRPKQNVVGTKWVFRNKQDEHGVVTRNKARLVAKGYAQVAGLDFEETFAPVARLESIRILLAYAAHHSFRLFQMDVKSAFLNGPIKEEVYVEQPPGFEDERYPDHVCKLSKALYGLKQAPRAWYECLRDFLIANAFKVGKADPTLFTKTCDGDLFVCQIYVDDIIFGSTNKKSCEEFSRVMTQKFEMSMMGELNYFLGFQVKQLKDGTFISQTKYTQDLLKRFGMKDAKPAKTPMGTDGHTDLNKGGKSVDQKAYRSMIGSLLYLCASRPDIMLSVCMCARFQSDPKECHLVAVKRILRYLVATPCLGLWYPKGSTFDLIGYSDSDYAGCKVDRKSTSGTCQFLGRSLVSWKSKKQTSVALSTAEAEYIAAGQCCAQLLWMRQTLRDFGYTLSKVPLLCDNESAIRMAENPVEHSRTKHIDIRHHFLRDHQQKGDIEVFHVSTENQLADIFTKPLDEKTFCRLRSELNVLDSRNLD

SEQ ID NO: 10237 - protein, 1645 aa, Zea mays
  Clone ID: TF_ZM4330.C2.o1.fg.pep
MDPKGKGIMINDKEKESFVNEPKDDKPTDSGSGHRRKDGKKKKTRRIKEIIYYDDSDEFTSSQKDNNDDDYKKKKTVNSNFSFDYSRIPQSTNAHLLSIPLGKPPHFDGEDYGFWSHKMRSHLFSLHPSIWEIVESGMHFDSTDSPMFINEQIHKNAQATTVLLASLCRDEYHKVSGLDNAKQIWDTLKISHEGNDVTMLTKMELVEGELGRFAMIRGEESTQTYNQIKTLVNKIRSYGSTSFTVLDPHLVNNIRENPKYTKMTPEEILGKFVSGRMMIKEERYVDDALNGPINEPQPLALKATRSKETVPSKVAQIEAAGLNDEEMALIIKRFKTALKGCKGQPSKTKTKGKRSCFKCGKLGHFIANCPDNDSDQDQGNKREKKKNYKKAKGEAHLGKEWDSDCSSSDSDNEGLAATAFNKSSLFPNERHTCLMAREKKVCTRNSTYASSSEDESSDEDEIDYSCLFKGLDRTKVDKINELIDALNDKNRLLENQEDLLYEEHDKFVEAQKSHALEVKRNEVLSCELSSCHETISSLRSINDDLNARLEIASKSTSCVEIVETCNRCKDFDINACSKHLVSISKLSDEVASLSAQLKTSKSNFDKLKFSRDAYTVGRHPSIKDGLGFKREAKNLTSHKAPISAKEKGKAPMASSTKKNHAFMYNDRRQSYRSCNAYNAFDAHAYDSYAMFASSSSYMHGRDMPRKNIVHVARKVMDGPSTIYHTLNAFFAICKKDRKIVARKLGAKCKGDKTCIWVPKTIVTNLVGPNKSWVYASGGSSWIIDSGCTNHMTGEKKMFTSYVKNKDSQDSIIFGDGNQGKDKSETQGTLKRFLRRAQNEFELKVKKIRSDNGSEFKNLQVEEFLEEEGIKHEFSAPYTPQQNGVVERKNRTLIDMARTMLGEFKTPECFWSEAVNTACHAINRVYLHHLLKKTSYELLTGNKPNVSYFRVFGSKCYILVKKGRNSKFAPKAVEGFLLGYDSNTKAYRVFNKSSSLVEVSSDVVFDKTNGSPREQVVDCDDVDEEDVLTAAIRTMAIGDVRPQEQKKQDQPSSSTMVHPPTQDDEQVHQQEACDQGGAQDDHVMEEEAQPAPPTQVRAMIQRDHPVDQILGDISKGVTTRSRLVNFCEHYSFVSSIEPFRVEEALLDPDWVLAMQEELNNFKRNEVWTLVPRPKQNVVGTKWVFRNKQDEHGVVTRNKARLVAKGYAQVAGLDFEETFAPVARLESIRILLAYATHHSFRLFQMDVKSAFLNGPIKEEVYVEQPPGFEDERYPDHVCKLSKALYGLKQAPRAWYECLRDFLIANAFKVGKADPTLFTKTCDGDIFVCQIYVDDIIFGSTNKKSCEEFSRVMTQKFKMSMMGELNYFLGFQVKQLKDGTFISQTKYTQDLLKRFGMKDAKPAKTPMGTDGHTDLNKGGKSVDQKAYRSMIGSLLYLCASRPDIMLSVCMCARFQSDPKECHLVAVKRILRYLVATPCFGLWYPKGSTFDLIGYSDSDYAGCKVDRKSTSGTCQFLGRSLVSWNSKKQTSVALSTAEAEYVAAGQCCAQLLWMRQTLKDFGYNLSKVPLLCDNESTIRMAENPVEHSRTKHIDIRHHFLRDHQQKGDIEVFHVSTENQLADIFTKPLDETTFCRLRSELNVLDSWNLD

SEQ ID NO: 10238 - protein, 1817 aa, Zea mays
  Clone ID: TF_ZM4333.C3.o1.fg.pep
MDPKGKGIVINDKEKESFVNEPRDDKSNDSGSGHRRKDGKKKKTRRIKEIVYYDSDESTSSQKDDDHNEYERKKPVNSNFSFDYSRIPQSTNAHLLSIPLGKPPHVDGEDYGFWSHKMRSHLFSLHPSIWEIVESGMHFDSTDSPMFINEQIHKNAQATTVLLASLCRDEYHKVSGLDNAKQIWDTLKISHEGNNVTLLTKMELVEGELGRFAMIRGEEPTQTYNRLKTLINKIRSYGSTRWTDHDVVRLMLRSFTILDPHLVNNIRENPRYTKMSPEEVLGKFVSGRMMIKEARYVDDALNGPINEPQPLALKATRSKEALPSKVAQIEAAGLNDEEMALIIKRFKTVLKGRKGQPSKTKAKGKRSCFKCGKLGHFIANCPDNDSDQDQGNKRERKKNYKKAKGEAHLGKEWDSDCSSSDSDNEGLAATAFNKSSLFPNERHTCLMAREKKVSTHNTSTYASSSEDESSDDDEIDYSCLFKGLDRTKVDKINELIDALNDRNILLEKQEDLLYEEHDKFVEAQKSLALEIKRNEMLSSELSSCHETIAKLKSFNDDLNARLEVASKSNSCVEHVMDCTRCKDFNVDACSEHLVSISKLNDEVASLNAQLKTSKSNFDKLKFARDSYTIGRHPSIKDGLGYKREAKDLTSHKAPISAKEKGKAPMASSAKKNHAFMYHDRRHTRNANRSYNVFDSYAYDSHDMFASSSFYVHGRNVGRRNVVHNMTRRNVVNVPRKVNEPSTIYHALNASFAICRKDRKVIARKLGAKCKGDKTCIWIPKEIVTNLVGPNKSWVYASGGSSWIIDSGCTNHMTGEKKMFTSYVKNKDSQDLIIFGDGNQGKVKGLDVSVFRRCDGSLAFKGILDGKLYLVDFAKEEAGLDACLMAKTCMGWLWHRRLAHVGMKNLHKLLKGEHVIGLTNVHFEKDRPCAACQAGKQVGGSHHTKNVMTTSRPLELLHMDLFGPVAYLSIGGSKYGLVIVDDFSHFTWVFFLQDKSETQGTLKRFIRRAQNEFELKVKKIRSDNGSEFKNLQVEEFLEEEGIKHEFSAPYTPQQNGVVERKNRTLIDMARTMLGEFKTPECFWSEAVNTACHAINRVYLHRLLKKTSYELLTGNKPNVSYFRVFGSKCYILVKKGRNSKFAPKAVEGFLLGYDSNTKAYRVFNKSSGLVEVSSDIVFDETNGSPREQVVDCDDVDEEDVPTAAIRTMAIGEVRPQEQDERDQPSSSTTVHSPTQDDEQVHQKEACDQGGAQDDHVMEEEAQPAPPTQVRAVIQRDHPVDQILGDISKGVTTRSRLVNFCEHYSFVSSIEPFRVEEALLDPDWVLAMQEELNNFKRNEVWTLVPRPKQNVVGTKWVFRNKQDEHGVVTRNKARLVAKGYAQVAGLDFEETFAPVARLESICILLAYAAHHSFRLYQMDVKSAFLNGPIKEEVYVEQPPGFEDERYPDHVCKLSKALYGLKQAPRAWYECLRDFLIANAFKVGKADPTLFTKTCDGDLFVCQIYVDDIIFGSTNQKSCEEFSRVMTQKFEMSMMGELNYFLGFQVKQLKDGTFISQTKYTQDLLKRFGMKDAKPAKTPMGTDGHTDLNKGGKSVDQKAYRSMIGSLLYLCASRPDIMLSVCMCARFQSDPKECHLVAVKRILRYLVATPCFGIWYPKGSNFDLIGYSDSDYAGCKVDRKSTSGTCQFLGRSLVSWNSKKQTSVALSTAEAEYVAAGQCYAQLLWMRQTLRDFGYNLSKVPLLCDNESAIRMAENPVEHSRTKHIDIRHHFLRDHQQKGDIEVFHVSTENQLADIFTKPLDEKTFCRLRNELNVLDSRNLD

SEQ ID NO: 10239 - protein, 665 aa, Zea mays
  Clone ID: TF_ZM4454.C3.o1.fg.pep
MDPKGKGMVINDKEKESFVNEPNDDKLTDSGSGHKRKDGRKKKARRIKEIVYYDSDESSSSQKDDDDYDKRKTVNSNFSFDYSRIPHSSNAQLLPIPLGKPPHFDGEDYGFWSHKMRTHLFSLHPSIWEIVESGMKFDSSDSPMFINEQIHRNAQATTVLLASLCRDEYHKVSGLDNAKQIWDTLKISHEGNDVTLLTKMELVEGELGRFAMIRGEEPTQTYNRLKTLINKIRSYGSTRWTDHDVVRLMLRSFTVLDPHLVNNIRENPRYTKMSPEEVLGKFVSGRMMIKEARYVDDALNGPINEPQPLALKATRSKEALPSKVAQFEAAGLNDEEMALIIKRFKTVLKGRKGQPSKTKAKGKRSCFKCGKLGHFIANCPDNDSDQDQGNKREKKKNYKKAKGEAHLGKEWDSDCSLSDSDNEGLAATAFNKSSLFPNKRHTCLMAREKKVSTHNTSTYASSSEDESSDDDEIDYSCLFKGLDRTKVDKINELIDALNDRNILLEKQEDLLYEEHDKFVEAQKSLALEIKRNEMLSSELSSCHETIATLKSVNDDLNAKLEVASKSNSCVEHVEICTRCKDFDVDACSDHLVSISKLTEELASLNAQLKTSKNEFDKLKFARDAYTIGRHPSIKDGLGFKREAKNLTSHKAPIPAKEKGKAPMAT

SEQ ID NO: 10240 - protein, 662 aa, Zea mays
  Clone ID: TF_ZM4496.C1.o2.fg.pep
MDPKGKGIVINDKEKESFVNEPRDDKSNNSGSGHKRRDGKKKKTRRIKEIVYYDSDESSSSQKDDDHDKQRKPVNSNFSFDYSRIPHSSNSHLLSIPLGKPPHFDGEDYGFWSHKMRSHLFSLHPSIWEIVENGMNFDSSDSPMFINEQIHKNAQATTVLLASLCREEYNKVSGLDNAKQIWDTLKISHEGNDITMLTKMELVEGELGRFAMIRGEEPTQTYNRLKTLINKIRSYGSTRWTDHDVVRLMLRSFTVLDPHLVNNIRENPRYTKMSPEEVLGKFVSGRMMIKEARYVDDALNGPINEPQPFALKATGNKEALLSKVAQIEAAGLNEEEMALIIKRFKTVLKGRNGQPSKTKTKGKRSCFKCGKLGHFIANCPDNESDQEKGNKREKKKQYKKAKGEAHLGKEWDSDCSSSDSDNEGLAATAFNKSALFPNERLTCLMAREKKVSTQDSTYASSSDSESSDDDIDYSCLFKGLDRSKIDKINELIDALNEKDRLLEKQEDLLYDEHDKFVEAQKSYALEVKRNEMLSYELSTCHETISTLQGVNNDLNAKLEVANKSNSCVEHVKICTRCKDFDVDACSEHLVLISKLNKEVASLNAQLKTSKNEVDKIKFARDAYTVGRHPSIKDGLGFKREAKNLTSHKAPIFVKEKGKAPMA

SEQ ID NO: 10241 - protein, 705 aa, Zea mays
  Clone ID: TF_ZM4496.C6.o4.fg.pep
MDPKGKGIVINDKEKESFVNEPRDDKSNDSGSGHKRRDGKKKKTRRIKEIVYYDSDESSSSQKDDDYDKQRKPVNSNFSFDYSRIPHSSNSHLLSIPLGKPPHFDGEDYGFWSHKMRSHLFSLHPSIWEIVENGMKFDSSDSPMFINEQIHKNAQATTVLLASLCREEYNKVSGLDNAKQIWDTLKISHEGNDITMLTKMELVEGELGRFAMIRGEEPTQTYNRLKTLINKIRSYGSTRWTDHDVVRLMLRSFTVLDPHLVNNIRENPRYTMMTPEEVLGKFVSGRMMIKEARYVDDALNGPIHEPQPIALKASRSKEALPSKVAQIEAAGLNDEEMALIIKRFKTVLKGRNGQPSKTKTKGKRSCFKCGKLGHFIANCPDNESDQEKGNKREKKKHYKKAKGEAHLGKEWDSDCSSSDSDNEGLAATAFNKSTLFPNERHTCLMAREKKVGTRNSTYASSSEEESSDEDEVDYSCLFKGLDRSKIDKINELIDALNEKNILLEKQEDLLYEEHDKFVEAQKSYALEVKRNEMLSFELSTCHETISTLKGVNNDLNAKLEVANKSNSCVEHVEICTRCKDFDINACSEHLVSISKLNDELASLNAQLKTSKNDFDKLKFARDAYTIGRHPSIKDGLGFKREAKDLTSHKAPIPAKEKGKAPMASNVQKNHAFMYYDRRQTRNAYRSYNAFDDFDSHAMFAPSSSY

SEQ ID NO: 10242 - protein, 1669 aa, Zea mays
  Clone ID: TF_ZM4551.C4.o7.fg.pep
MDPKGKGIVINDKEKESFVNEPKDDKPTDSGSGQRRKEGKKKKTRRIKEIVYYDSDESTSSQKDEDHNDYERRKPVNSNFSFDYSRIPQSSHSHLLSIPLGKPPHFDGEDYGFWSHKMRSHLFSLHPSIWEIVESGMHFDSSDSPMFINEQIHKNAQATTVLLASLCRNEYHKVSGLDNAKQIWDTLKISHEGNDVTLLTKMELVEGELGRFAMIRGQEPTQTYNRLKTLINKIRSYGSTRWTDHDVVRLMLRSFTVLDPHLVNNIRENPRYTKMSPEEVLGKFVSGRMMIKEARYVDDALNGPINEPQPLALKATRSKEALPSKVAQIEAAGLNDEEMALIIKRFKTALNGRKGQPSKTKTKGKRSCFKCGKLGHFIANCPDNESDQEKGNKREKKKQYKKAKGEAHLGKEWDSDCSSSDSDNEGLAATAFNKSALFPNERLTCLMAREKKVSTQDSTYASSSDSESSDDDIDYSCLFKGLDRSKIDKINELIDALNEKDRLLEKQEDLLYDEHDKFVEAQKSYALEVKRNEMLSFELSTCHETISTLKGVNNDLNAKLEVANKSNSCVEHVEICTRCKDFDINACSEHLVSISKLNDELASLNAQLKTSKNDFDKLKFARDAYTIGRHPSIKDGLGFKREAKNLTSHKAPIPAKEKGKAPMATSAKRNHAFLYHDRRQTRNVSHDAYDSYVYDSHTMFAPSSSYVYDRNVTRRNVVPKRNAIHHVPRRNVIHAPRKIANEPSTIYYALNASFAICRKDKKIVARKLGAKCKGDKTCIWVPKDICTNLVGPNMSWVYASGGSSWIIDSGCTNHMTGEKKMFTSYVKNKDSQDSIIFGDGNQGKDKSETQGTLKRFLRRAQNEFELKVKKIRSDNGSEFKNSQVEEFLEEEGIKHEFSAPYTPQQNGVVERKNRTLIDMARTMLGEFKTPECFWTEAVNTACHAINRVYLHRLLKKTSYELLTGNKPNVSYFRVFGSKCYILVKKGRNSKFAPKAVEGFLLGYDSNTKAYRVFNKSSGLVEVSSDVVFDETNGSPREQVVDCDDVDEEDVPTAAIRTMAIGEVRPQEQDERDQPSSSTMVQPPTKDDEQVPQVEALDQGGAQDDQVIEEEAQPAPPTQVRAMIQRDHPVDQILGDISKGVTTRSRLVNFCEHYSFVSSIEPFRVEEALLDPDWVLAMQEELNNFKRNEVWTLVPRPKQNVVGTKWVFRNKQDEHGVVTRNKARLVAKGYAQVAGLDFEETFAPVARLESIRILLAYAAHHSFRLFQMDVKSAFLNGPIKEEVYVEQPPGFEDERYPDHVCKLSKALYGLKQAPRAWYECLRDFLLANAFKVGKADPTLFTKTCDGDLFVCQIYVDDIIFGSTNQKSCEEFSRVMTQKFEMSMMGELNYFLGFQVKQLKDGTFISQTKYTQDLLKRFGMKDAKPAKTPMGTDGHTDLNKGGKSVDQKAYRSMIGSLLYLCASRPDIMLSVCMCARFQSDPKECHLVAVKRILRYLVATPCFGLWYPKGSTFDLVGYSDSDYAGCKVDRKSTSGTCQFLGRSLVSWNSKKQTSVALSTAEAEYVAAGQCCAQLLWMRQTLRDFGYNLSKVPLLCDNESAIRMAENPVEHSRTKHIDIRHHFLRDHQQKGDIEVFHVSTENQLADIFTKPLDEKTFCRLRSELNVLDSRNLD

SEQ ID NO: 10243 - protein, 1608 aa, Zea mays
  Clone ID: TF_ZM4576.C1.o3.fg.pep
MDPKGKGIVINDKEKESFVNEPKDDKPTDSGSGHRRKEGKKKKIRRIKEIVYYDDSDESSSSQKDNDDNDYDKQKTVNSNFSFDYSRIPHSSNAHLLPIPLGKPPHFDGEDYGFWSHKMRTHLFSLHPSIWEIVESGMKFDSSDSPSFINEQIHKNAQATTVLLASLCRDEYHKVSGLDNAKQIWDTLKISHEGNDVTLLTKMELVEGELGRFAMIRGEEPTQTYNRLKILINKIRSYGSTRWTDHDVVRLMLRSFTVLDPHLVNNIRENPRYIKMSPEEILGKFVSGRMMIKEARSKEALPSKVAKIEAAGLNDEEMALIIKRFKTALKGRKGQPSKTKTKGKRSCFKCGKLGHFIANCPDNDSDQEHRSKREKKKHYKKAKGEAHIGKEWDSDCSSSDSDNEGLAATAFNKSTLFPNERHTCLMAREKKMSTRDTTYVSSSDDESSDEEIDYSNLFKGLDRNKIDKINKLIDALNEKDRLLEKQEDLLYEEHDKFIEAQKSYALEVKRNEMLSFELSTCHETISTLKGVNNDLNAKLEVANKSNSCVEHVVICTRCKDFDIDACSEHLVSISKLNGELASLNAQLKTSKNDFDKLKFARDAYTIGRHPSIKDGLGFKREAKNLTSHKAPIPAKEKGKAPMASNVQKNHAFIYHDRRQSRNAYRNYNAYDDFDSHAMFASSSSYMHGRNMSRRNAIHHVPRKNIIHAPRKVVNEPSTIYHALNASFAICRKDRKVYASGGSSWIIDSGCTNHMTREKKMFTSYVKNKDSQDSIIFGDGNQGKDKSETQGTLKRFLRRAQNEFELKVKKIRSDNGSEFKNLQVEEFLEEEGIKHEFSAPYTPQQNGVVERKNRTLIDMARTMLGEFKTPECFWTEAVNTACHAINRVYLHRLLKKTSYELLTGNKPNVSYFRVFGSKCYILVKKGRNSKFAPKAVEGFLLGYDSNTKAYRVFNKSSGLVEVSSDVVFDETNGSPREQVVDLDDVDEEDVPTAAMRTMAIGDVRPQEHLEQDQPSSSTMVHPPTQDDEQVHQQEACDQGGAQDDHVMEEEAQPAPPTQVRAMIQRDHPVDQILGDISKGVTTRSRLVNFCEHYSFISSIEPFRVEEALLDPDWVLAMQEELNNFKRNEVWTLVPRPKQNVVGTKWVFRNKQDEHGVVTRNKARLVAKGYAQVAGLDFEETFAPVARLESIRILLAYAAHHSFRLFQMDVKSAFLNGPIKEEVYVEQPPGFEDERYPDHVCKLSKALYGLKQAPRAWYECLRDFLIANAFKVGKVDPTLFTKTCDGDLFVCQIYVDDIIFGSTNKKSCEEFSRVMTQKFEMSMMGELNYFLGFQVKQLKDGTFISQTKYTQDLLKRFGMKDAKPAKTPMGTDGHTDLNKGGKSVDQKAYRSMIGSLLYLCASRPDIMLSVCMCARFQSDPKECHLVAVKRILRYLVATPCFGLWYPKGSTFDLIGYSDSDYAGCKVDRKSTSGTCQFLGRSLVSWNSKKQTSVALSTAEAEYVAAGQCCAQLLWMRQTLRDFGYNLSKVPLLCDNESAIRMAENPVEHSRTKHIDIRHHFLRDHQQKGDIEVFHVSTENQLADIFTKPLDEKTFCRLRNELNVLDLRNLD

SEQ ID NO: 10244 - protein, 1506 aa, Zea mays
  unsure (1)..(1506): unsure at all Xaa locations
  Clone ID: TF_ZM4577.C6.o12.fg.pep
MDPKGKGIVINDKEKESFVNKPKDDKPIDSGLGHKHKDGKKKKTRRIKEIVYYDDSDESTSSHKDNDDNDYDKRKTVNSNFSFDYSRIPQSSNSHLLSIPLGKPPHFDGEDYGFWSHKMRSHLFSLHPSIWEIVENGMKFDSSNSPIFINEQIHRNAQATTVLLASLCRDEYHKVSGLDNAKQIWDTLRISHEGNDVTLLTKMELVEGELGRFAMIRGEEPTQTYNRLKTLINKIRSYGSTRWTDHDVVRLMLRSFTVLDPHLVNNIRENPRYTKMSPEEVLGKFVSGRMMIKEARYVDDTLNGPIHEPQSIALKATRSKEALPSKVAQVEAAGLNDEEMALIIKHFKTTLKGRKGQPSKTKTKGKRSCFKCGKLGHFIANCPDNDSDQEKGNKREKKKNYKKTKGEAHIGKEWDSDCSSSDSDNEGLAATAFNKSSLFPNEHHTCLMAKEKKVCTRDTTYASSNDDDSSDDDEIDYSSLFKGLDRIKIGKINELIDALNDKNRLLEKQEDLLYEEHDKFVSAQNSLALEVKRNDMLSCEISTCHETISSLKSINDDLNAKLEKSSKLTSCVEHVVICTRCKDFNVDACSEHLDCIFKINDEVASLNAQLKTSKSEFDKLKFARDAYTIGRHPSIKDGLGFKREAKNLTSHKAPISAKEKGKAPMASSVQKNHAFMYHDRRQSRNTYRSCNAYDAFDSHAMFASSSSYVHDRNVDVSVFRRCDGSLAFKGVLDGKLYLVDFAKEEAGLDACLIAKTCMGWLWHRRLAHVGMKNLHKLLKGEHVIGLTNVHFEKDRPCAACQAGKQEEDKSETQGTLKRFLRRAQNEFELKVKKIRSDNGSEFKNLQVEEFLEEEGIKHEFSAPYTPQQNGVVERKNRTLIDMARTMLREFKTPERFWLEAVNTACHAINMVYLHRLLKKTSYELLTGNKPNVSYFRVFGSKCYILVKKGRTSKFAPKAVEGFLLGYDSNTKAYRVFNKSSGLVEVSSDVVFDETNGSPREQVVDLDDVDEEDVPTAAMRTMAIGDVRPLEQKEQDQPSSSTMVHPPTQDDKQVPQVEAHDQGGAQDVQVEEEEAPQAPPTQVRATIQRDHPIDQILGDISKGVTTRSRLVNFCEHYSFVSSIEPFRVEEALLDPDWVLAMQEELNNFKRNEVWTLDEHGXVTRNKARLVAKGYAQVXRLYQMDVKSAFLNGPIKEEVYVEQPPGFEDERYPNHVCKLSKALYGLKQAPRAWYECLRDFLIANAFKVGKADPTLFTKTCDGDLFVCQIYVDDIIFGSTNQKSCEEFSRQLKDGTFISQTKYTQDLLKRFGMKDAKPAKTSMGTDGHTDLNKGVATPCFGIWYPKGSNFDLIGYSDSDYARCKVDRKSTSGMCQFLVRSLVSWNSKKQTSVALSTAEVEYVAAGQCCAQLLWMRQTLRDFGYNLSKVSLLCDNESPIRIAENPVEHSRTKHIDIRHHFLRDHQQKGDIEVFHVSTENQLADIFTKPLDEKTFCRLRSELNILDSRNLD

SEQ ID NO: 10245 - protein, 641 aa, Zea mays
  unsure (1)..(641): unsure at all Xaa locations
  Clone ID: TF_ZM4581.C2.o1.fg.pep
MDPKGKGIVINDKEKESFVNEPRDDKSNNSGSGHKRKDGKKKKTRRIKEIVYYDSDESSSSQKDDDNDYRKTVNSNFSFDYSRIPHSSNSHLLSIPLGKPPHFDGEDYGFWSHKMRSHLFSLHPSIWEIVENGMKFDSSDSPMFINEQIHKNAQATTVLLASLCREEYNKVSGLDNAKQIWDTLKISHEGNDITMLTKMELVEGELGRFAMIRGEEPTQTYNRLKTLVNKIRSYGSTRWTDHDVVRLMLRSFTVLDPHLVNNIRENPRYTKMSPEEILGKFVSGRMMIKEARYVDDALNGPIHEPQPIALKASRSKEALPSKVAQIEAAGLNDEEMALIIKRFKTVLKGRNGQPSKTKTKGKRSCFKCGKLGHFIANCPDNESDQEKGNKREKKKHYKKAKGEAHLGKEWDSDCSSSDSDNEGLAATAFNKSTLFPNERHTCLMAREKKVCTRNSTYASSSEDESSDEDEVDYSCLFKGLDRSKIDKINELIDALNEKNILLEKQEDLLYEEHDKFVEAQKSYALEVKRNEMLSFELSTCHETISTLKGVNNDLNAKLEVANKSNSCVEHVEICTRCKDFDINACSEHLVSISKLNDELASLNAQLKTSKNDFDKLKFARDAYTIGRHPSIKXGLGFKREA

SEQ ID NO: 10246 - protein, 1617 aa, Zea mays
  Clone ID: TF_ZM4588.C1.o9.fg.pep
MDPKGKGMVVNNNEKESIFNESKDDKPTDSGSGHKRKDRKKKKTRRIKEIVDYDSDESSSSQKDDDDYEKKKTVNSNFSFDYSRIPQSTNAHLVSIPLGKPPHFDGEDYGFWSHKMRSHLFSLHPSIWEIVESGMHFDSTDSPMFINEQIHKNAQATTVLLASLCRDEYHKVSGLDNAKQIWDTLKISHEGNDVTMLTKMELVEGELGRFATIRGEEPTQTYNRLKTLVNKIRSYGSTRWTDHDVVRLMLRYFTVLDPHLVNNIRENPRYTKMTPEEILGKFVSGRMMIKEARYVDDTLNGPINEPQPLALKATRSKDTLPSKVAQIEAAGLNDEEMALIIKRFKTALKGRKGQPSKTKTKGKRSCFKCGKLGHFIANCPDNDSDQDQGNKREKKKNYKKAKGEAHLGKEWDSDCSSSDSDNEGLAATAFNKSSLFPNERHTCLMAREKKVCTRNTTYASSSEDESSDEDEIDYSCLFKGLDRTKVDKINELIDALNDKNRLLEKQEDMLYEEHDKFVEAQKSHALEVKRNEMLSCELSSCHETISNLRSINDDLNAKLEIASKSTSCVENDVICNRCKDFDIDACSEHIASIAKLNDEIASLNAQLKTSKSKFDKLKFARDAYTIGRHPSIKDGLGFKREVKNLTSHKASISTKEKGKAPMASNAKKNHAFMYHDRKFSRNVHDDRSCNAYNAFDSHAMFASSSSYMHGRNVFRRNVVHHMPRRNVGSTPRKVNEPSTIYHACDASFAICRKDRKVYASGGSSWIIDSGCTNHMTGEKKMFTSYVKNKDTQDSIIFGDGNQGKLSPLDIIYYLRSDGSLAFKGVLDGKLYLVDFAKEEAGLDACLIAKTSMGWMWHRRLAHVGMKNLHKLLKGEHVIGLTNVQFEKDRPCAACQAGKQVGGAHHSKNVMTTSRPLELLHMDLFGPVAYLSIGGSKYGLVIVDDFSRFTWVFFLQDKSETQGTLKRFLRRAQNEFELKVKKIRSDNGSEFKNLQVEEFFEEEGIKHEFSTPYTPQQNGVVERKNRTLIDMARMMLEEFKTPERFWSEAVNTACHAINRVYLHRLLKKTSYELLTGNKPNVSYFRVFGSKCYILVKKGRNSKFAPKAVEGFLLGYDSNTKAYRVFNKSSGLVEVSSDVVFDETNGSPREQVVDLDDVDEEDVPTAAIRTMAIGEVRPQEQKEQDQPSSSTMVHPPTQDDEQIHQQEACDQGGAQDDHVMEEEAQPAPPTQVRAMIQRDHPVEQILGDISKGVTTRSRLVNFCEHYSFVSSIEPFRVEEALLDPDWVLAMQEELNNFKRNEVWTLVPRPKQNVVGTKLFQMDVKSAFLNGPIKEEVYVEQPPGFEDERYPDHVCKLSKALYGLKQAPRAWYECLRDFLIANAFKVGKADPTLFTKTCDGDLFVCQIYVDDIIFGSTNKKSCEEFSRVMTQKFEMSMMGELNYFLGFQVKQLKDGTFISQTKYTQVLLKRFGMKDAKPAKTPMGTDGHTDLNKGGKSVDQKAYRSMIGSLLYLCASRPDIVLSVCMCARFQSDPKECHLVAVKRILRYLVATPCFGLWYPNGSTFDLIGYSDSDYAGCKVDRKSTSGTCQFLGRSLVSWNSKKQTSVALFTAEAEYVAAG

SEQ ID NO: 10247 - protein, 1719 aa, Zea mays
  unsure (1)..(1719): unsure at all Xaa locations
  Clone ID: TF_ZM4592.C3.o1.fg.pep
MDPKGKGMVVDNNEKESIFNEPKNDKSTDSGSSHKRKDGKKKKTRRIKEIVYYDSDESSSSQRDDDNDYRKTVNSNFSFDYSRIPHSSNSHLLSIPLGKPPHLDGEDYGFWSHKMRSHLFSLHPSIWEIVENGMKFDSSDSPMFINEQIHKNAQATTVLLASLCRDEYNKVSGLDNAKQIWDTLKISHEGNDITMLTKMELVEGELGRFAMIRGEEPTQTYNRLKTLINKIRSYGSTRWTDHDVVRLLLRSFTILDPHLVNNIRENPRYTKMSPEEVLGKFVSGRMMIKEARYVDDALNGPINEPQPLALKATRSKEALPSKVAQIEAAGLNDEEMALIIKRFKTALKGRKGQPSKTEAKGKRSCFKCGKLGHFIANCPDNDSDQDQGNKREKKKHYKKAKGEAHIGKEWDSDCSSSDSDNEGLAATAFNKSTLFPNERHTCLMAREKKVCTRNSTYASSSEDESSDEDEVDYSCLFKGLDRTKVDKINELIDALNDKNMLLEKQEDFLYEEHDKFVEAQRSHALEVKRNEMLSCELSSCHETISKLRSINDDLNAKLEIASKSTSCVENVVTCTRCKDINIDAYSEHLACISKLNEEVASLNAQLETSKSDFDKLKFARDAYTIGRHPSIKDGLGFKREAKNLTSHKAPIPAKEKGKAPMASSVQKNHAFMYHDKRQTRNAYRSYNTYDDFDSHDMFASSSFYVHNRNVGRRNAVHNMPRRNVVNVPRRVNEPSTIYHALNASFAICRKDRKIVARKLGARCKGDKTCIWVPKDICTNLVGPNMSWVYASGGSSWIIDSGCTNHMTGEKKMFTSYVKNKDSQDSIIFGDGNQGKVKGLDVSVFRRSDGSLAFKGVLDGKLYLVDFAKEEAGLDACLIAKTSMGWLWHRRLAHVGMKNLHKLLKGEHVIGLTNVQFEKDRPCAACQAGKQVGGAHHSKNVMTTSRPLELLHMDLFGPVAYLSIGGSKYGLVIVDDFSRFTWVFFLQDKSETQGTLKRFLRRAQNEFELKVKKIRSDNGSEFKNLQVEEFLEEEGIKHEFSAPYTPQQNGVVERKNRTLIDMARTMLGEFKTPECFWSEAVNTACHAINRVYLHRLLKKTSYELLTGNKPNVSYFRVFGSKCYILVKKGRNSKFAPKAVEGFLLGYDSNTKAYRVFNKSSGLVEVSSDVXEEDVPTAAIXTMAIGEVRPQEQDERDQPSSSTMVHPPTQDDEQXVEEALLDPDWVLAMQEELNNFKRNEVWTLVPRPKQNVVGTKWVFRNKQDEHGVVTRNKARLVAKGYAQVAGLDFEETFAPVARLESIRILLAYAAHHSFRLFQMDMKSAFLNGPIKEEVYVEQPPGFEDERYPDHVCKLSKALYGLKQAPRAWYECLRDFLIANAFKVGKADPTLFTKTCDGDLFVCQIYVDDIIFGSTNKKSCEEFSRVMTQKFEMSMMGELNYFLGFQVKQLKDGTFISQTKYTQDLLKRFGMKDAKPAKTPMGTDGHTDLNKGGKSVDQKAYRSMIGSLLYLCASRPDIMLSVCMCARFQSDPKECHLVAVKRILRYLVATPCFGLWYPKGSTFDLIGYSDSDYAGCKVDRKSTSGTCQFLGRSLVSWNSKKQTSVALSTAEAEYVAAGQCCAQLLWMRQTLRDFGYNMSKVPLLCDNESAIRMAENPVEHSRTKHIDIRHHFLRDHQQKGDIEVFHVSTENQLADIFTKPLDEKTFCRLRSELNVLDSRNLD

SEQ ID NO: 10248 - protein, 587 aa, Zea mays
  Clone ID: TF_ZM4596.C2.o12.fg.pep
MDPKGKGMVINDKEKESFVNEPNDDKPTDSGSGHKRKDGRKKKTRRIKEIVYYDSDESSSSQKDNDDYDRRKTVNSNFSFDYSRIPHSSNAQLLPIPLGKPPHFDGEDYGFWSHKMRTHLFSLHPSIWEIVESGMKFDSSDSPVFINEQIHKNAQATTVLLASLCRDEYHKVSGLDNAKQIWDTLKISHEGNDVTLLTKMELVEGELGRFAMIRGEEPTQTYNRLKTLINKIRSYGSTRWTDHDVVRLMLRSFTVLDPHLVNNIRENPRYTKMSPEEVLGKFVSGRMMIKEARYVDDALNGPINEPQPLALKATRSKEALPSKVAQFEAAGLNDEEMALIIKRFKTVLKGRKGQPSKTKAKGKRSCFKCGKLGHFIANCPDNDSDQDQGNKREKKKNYKKAKGEAHLGKEWDSDCSSSDSDNEGLAATAFNKSSLFPNERHTCLMAREKKVSTHNTSTYASSSEDESSDDDEIDYSCLFKGLDRTKVDKINELIDALNDRNILLEKQEDLLYEEHDKFVEAQKSLALEIKRNEMLSSELSSCHETIAKLKGFNDDLNAKLEVACKSNSCVEIVETCNRCKDFDIDAC

SEQ ID NO: 10249 - protein, 444 aa, Zea mays
  unsure (1)..(444): unsure at all Xaa locations
  Clone ID: TF_ZM4611.C3.o9.fg.pep
MDPKGKGIVINDKEKESFVNEPKDDKTTDSGSGHKRKDGKKKKTRRIKEIVYYDDSDESTSSQKDDDNDYRKTATRSKEALPSKVAQVEAAGLNNEEMALIIKRFKTALKGRKGQPSKTKTKEKRSCFKCGKLGHFIANCPDNESDQEQGSKREKKKAYKKAKGEAHLGKEWDSDCSSSDSDNEGLAATAFNKSSLFPNEHHTCLMAREKKVYASGGSSWIIDSGCTNHMTGEKKMFTSYVKNKDSQDSIIFGDGNQGKDKSETQGTLKRFLRRAQNEFELKVKKIRSDNGSEFKNLQVEEFLEEEGIKHEFSAPYTPQQNGVVERKNRTLIDMARTMLGEFKTPERFWSEAVNTACHAINRVYLHRLLKKTSYELLTGNKPNXEEDVPTAAIRTMAIGEVRPQEQDERDQPSSSTTVLPPTQDDEQVHQQEADDQGEAQDDHV

SEQ ID NO: 10250 - protein, 524 aa, Zea mays
  Clone ID: TF_ZM4621.C2.o3.fg.pep
MDPKRKGMVVNNEKESIFNEPKDDKPTDSGSGHKRKDGKKKKTRRIKEIVYYDSDESSSSQKDDDDYEKKKTVNSNFSFDYSRIPQSTNAHLLSIPLGKPPHFDGEDYGFWSHKMRSHLFSLHPSIWEIVESGMHFDSTDSPMFINEQIHKNAQATTVLLASLCRDEYHKVSGLDNAKQIWDTLKISHEGNDVTMLTKMELVEGELGRFAMIRGEEPTQTYNRLKTLVNKIRSYGSTRWTDHDVVHLMLRSFTVLDPHLVNNIRENPRYTKMTPEEILGKFVSGRMMIKEARYVDDALNGPINEPQPLALKATRSKETLPSKVAQIEAARLNDEEMALIIKRFKTVLKGCKGQPSKTKTKGKRSCFKCGKLGHFIANCPDNDSDQDQGNKREKKKNYKKAKGEAHLGKEWDSDCSSSDSDNEGLAATAFNKSSLFPNERHTCLMAREKKVCTQNSTYASSSEDKTSDEDEIDYSCLFKGLDKTKVDKINELIDALNDKNRLLEKQEDLLYEEHDKFVEAQNIML

SEQ ID NO: 10251 - protein, 670 aa, Zea mays
  Clone ID: TF_ZM4626.C4.o4.fg.pep
MDPKGKGIVINDKEKESFVNEPRDDKSNDSGSGHKRKDGKKKKTRRIKEIVYYDSDESSSSQKDDDHDYKKTIWDTLKISHEGNDITMLTKMELVEGELGRFAMIRGEEPTQTYNRLKTLINKIRSYGSTRWTDHDVVRLMLRSFTVLDPHLVNNIRENPRYTMMTPEEVLGKFVSGRMMIKEARYVDDALNGPLHEPQPIALKATRSKESLPSKVAQIEAAGLNEEEMALIIKRFKTVLKGRNGQPSKTKTKGKRSCFKCGKLGHFIANCPDNDSDQEKGNKREKKKHYKKAKGEAHLGKEWDSDCSSSDSDNEGLAATAFNKSALFPNEHHTCLMAREKKVYASGGSSWIIDNGCTNHMTGEKKMFTSYVKNKDSQDSIIFGDGNQGKEKSETQGTLKRFLRRAQNEFELKVKKIRSDNGSEFKNLQVEEFLEEEGIKHEFSAPYTPQQNGVVERKNRTLIDMARTMLGEFKTPECFWTEAVNTACHAINRVYLHRLLKKTSYELLTGNKPNMKKMFRRPLYEPWRLVMCDHRNKKSKINLLPQLWCIPQPKMTNRLFQMDVKSAFLNGPIKEEVYVEQPPGFEDERYPDHSCEEFSRVMTQKFEMSMMGELNYFLGFQVKQLKDGTFISQTKYTQDLLKQFGMKDAKPAKTPMGTDGHTDLNKGDFL

SEQ ID NO: 10252 - protein, 1513 aa, Zea mays
  Clone ID: TF_ZM4635.C5.o3.fg.pep
MDPKGKGIVINDKEKESFVNEPKDDKPTDSGSGQRRKEGKKKKTRRIKEIVYYDSDESTSSQKDEDHNDYEKRKPVNSNFSFDYSRIPQSSHSHLLSIPLGKPPHFDGEDYGFWSHKMRSHLFSLHPSIWEIVENGMNFDSSDSPMFINEQIHKNAQATTVLLASLCREEYNKVSGLDNAKQIWDTLKISHEGNDITMLTKMELVEGELGRFAMIRGEEPTQTYNRLKTLINKIRSYGSTRWTDHDVVRLMLRSFTVLDPHLVNNIRENPRYTKMSPEEVLGKFVSGRMMIKEARYVDDALNGPINEPQPFALKATGNKEALPSKVAQIEAAGLNEEEMALIIKRFKTVLKGRNGQPSKTKTKGKRSCFKCGKLGHFIANCPDNDSDQEKGNKREKKKHYKKAKGEAHLGKEWDSDCSSSDSDNEGLAATAFNKSTLFPNERHTCLMAREKKVCTRNSTYASSSEDESSDEDEVDYSCLFKGLDRSKIDKINELIDALNEKNILLEKQEDLLYEEHDKFVEAQKSYALEVKRNEMLSFELSTCHETISTLKGVNNDLNAKLEVANKSNSCVEHVEICTRCKDFDINACSEHLVSISKLNDELASLNAQLKTSKNDFDKLKFARDAYTIGRHPSIKDGLGFKREAKNLTSHKASIPAKEKGKAPMATSAKRNHAFLYHDRKQTRNVYASGGSSWIIDSGCTNHMTGEKKMFTSYVKNKDSQDSIIFGDGNQGKVKGLDVSVFRRSDGSLAFKGVLDGKLYLVDFAKEEAGLDACLMAKTCMGWLWHRRLAHVGMKNLHKLLKGEHVIGLTNVHFEKDRPCAACQAGKQVGGAHHSKNVMTTSRPLELLHMDLFGPVAYLSIGGSKYGLVIVDDFSRFTWVFFLQDKSETQGTLKRFLRRAQNEFELKVKKIRSDNGSEFKNLQVEEFLEEEGIKHEFSAPYTPQQNGVVERKNRTLIDMARTMLGEFKTPECFWTEAVNTACHAINRVYLHRLLKKTSYELLTDEEDVPTAAIRTMAIGDVRPQEQEEQDQPSSSTMVNPPTQDDEHVHQQEACDQGGAQDDHVMEEEAQPAPPTQVRAMIQRDHPVDQILGDISKGVTTRSRLVNFCEHYSFVSSIEPFRVEEALLDPDWVLAMQEELNNFKRNEVWTLVPRPKQNVVGTKWVFRNKQDEHGVVTRNKARLVAKGYAQVAGLDFEETFAPVARLESIRILLAYAAHHSFRLFQMDVKSAFLNGPIKEEVYVEQPPGFEDERYPDHVCKLSKALYGLKQAPRAWYECLRDFLIANAFKVGKADPTLFTKTCDGDLFVCQIYVDDIIFGSTNQKSCEEFSRVMTQKFEMSMMGELNYFLGFQGSTFDLVGYSDSDYAGCKVDRKSTSGTCQFLGRSLVSWNSKKQTSVALSTAEAEYVAAGQCCAQLLWMRQTLRDFGYNLSKVPLLCDNESAIRMAENPVEHSRTKHIDIRHHFLRDHQQKGDIEVFHVSTENQLADIFTKPLDEKTFCRLRSELNVLDSRNLD

SEQ ID NO: 10253 - protein, 1548 aa, Zea mays
  Clone ID: TF_ZM4646.C9.o8.fg.pep
MDPKGKGIVINDKEKESFVNEPRDDKSNDSGSGHRRKDGKKKKTRHIKEIVYYDSDESTSSQKDDDHNEYERKKPVNSNFSFDYSRIPQSTNAHLLSIPIGKPPHFDGEDYGFWSHKMRSHLFSLHPSIWEIVESGMHFDSTDSPMFINEQIHKNAQATTVLLASLCRDEYHKVSGLDNAKQIWDTLKISHEGNDVTLLTKMELVEGELGRFAMIRGEEPTQTYNRLKTLINKIRSYGSTRWTDHDVVRLMLRSFTVLDPHLVNNIRENPRYTKMSPEEVLGKFVSGRMMIKEARYVDDALNGPINEPQPLALKATRSKEALPSKVAQIEAAGLNDEEMALIIKRFKTVLKGRKGQPSKTKAKGKRSCFKCGKLGHFIANCPDNDSDQDQGNKREKKKNYKKAKGEAHLGKEWDSDYSSSDSDNEGLAATAFNKSSLFPNERHTCLMAREKKVSTHNTSTYASSSEDESSDDDEIDYSCLFKGLDRTKVDKINELIDALNDRNILLEKQEDLLYEEHDKFVEAQKSLALEIKRNEMLSSELSSCHETIAKLKSFNDDLNARLEVASKSNSCVEIVETCNRCKDFDIDACSEHLVSISKLNDELASLNAQLKTSKSNFDKLKFARDAYTIGRHPSIKDGLGFKREAKNLTSHKAPIPAKEKGKAPMASSVQKNHAFMYHDKRQTRNTNRSYNAYDDFDSHDIFASSSFYVHDRNVGRKNTVHNMPRRNVVNVPRRINEPSTIYHALNTSFAICRKDRKIVARKLGAKCKGDKTCIWVPKEICTNLVGPNISWVYASGGSSWIVDSGCTNHMTGEKKMFTSYVKNKDSQDSIIFGDGNQGKDKSETQGTLKRFLRRAQNEFELKVKKIRSDNGSEFKNFQVEEFLEEEGIKHEFSAPYTPQQNGVVERKNRTLIDMARTMLGEFKTPERFWSKAVNTACHAINRVYLHRLLKKTSYELLTSNKPNVSYFRVFGSKCYILVKKGRNSKFAPKAVEGFLLGYDSNTKAYRVFNKSSGLVEVSSDIVFDETNGSPREQVVDCDDPFRVEEALLDPDWVLAMQEELNNFKRNEVWTLVPRPKQNVVGTKWVFRNKQDEHGVVTRNKARLVAKGYAQVAGLDFEETFAPVARLESIRILLAYAAHHSFRLYQMDVKSAFLNGPIKEEVYVEQPPGFEDERYPDHVCKLSKALYGLKQAPRAWYECLRDFLIANAFKVGKADPTLFTKTCDGDLFVCQIYVDDIIFGSTNQKSCEEFSRVMTQKFEMSMMGELNYFLGFQVKQLKDGTFISQTKYTQDLLKRFGMKDAKPAKTPMGTDGNTDLNKGGKSVDQKAYRSMIGSLLYLCASRPDIMLSVCMCARFQSDPKECHLVAVKRILRYLVATPCFGLWYPKGSTFDLVGYSDSDYAGCKVDRKSTSGTCQFLGRSLVSWNSKKQTSVALSTAEAEYVAAGQCCAQLLWMRQTLRDFGYNLSKVPLLCDNESAIRMAENPVEHSRTKHIDIRHHFLRDHQQKGDIEVFHVSTENQLADIFTKPLDEKTFCRLRSELNVLDSRNMD

SEQ ID NO: 10254 - protein, 1662 aa, Zea mays
  Clone ID: TF_ZM4683.C5.o10.fg.pep
MDPKGKGIVINDKEKESFVNEPKDDKHTDSGSGHRRKEGKKKKTRRIKEIVYYDDSDESSSSQKDNDDNDYDKQKTVNSNFSFDYSRIPHSSNAHLLPIPLGKPPHFDGEDYGFWSHKMRTHLFSLHPSIWEIVESGMKFDSSDSPSFINEQIHKNAQATTVLLASLCRDEYHKVSGLDNAKQIWDTLKISHEGNDVTLLTKMELVEGELGRFAMIRGEEPTQTYNRLKILINKIRSYGSTRWTDHDVVRLMLRSFTVLDPHLVNNIRENPRYIKMSPEEILGKFVSGRMMIKEARYVDDALNGPIHEPQPIALKATRSKEALPSKVAQIEAAGLNDEEMALIIKRFKTALKGRKGQPSKTKAKGKRSCFKCGKLGHFIANCPDNDSDQDQVNKREKKKHYKKAKGEAHLGKEWDSDCSSSDSDNEGLAATAFNKSTLFPNERHTCLMAREKKVCTRNSTYASSSEDESSDEDEVDYSCLFKGLDRTKVDKINELIDALNEKNMLLEKQEDLLYEEHDKFIEAQKSYALEVKRNEMLSFELSTCHETISTLKGVNNDLNAKLEVANKSNSCVEHVAICSRCKDFDINACSEHLVSISKLNDELASLNAQLKTSKSDFDKLKFARDAYTVGRHPSIKDGLGFKREAKNLTSHKAPIPAKEKGKAPMATSTKKNHAFLYHDRRQSRSAYRGYNAFDSHHMIASSSSYMHGRNMSRRNAIHHVPRKNVSHAPRKVVNEFSTVYHALNASFAICRKDRKVIARKLGAKCKGDKTCIWVPKKICANLVGPNMSWVYASGGSSWIIDSGCTNHMTGEKKMFTSYVKSKDSQDSIIFGDGNQGKDKSETQGTLKRFLRRAQNEFELKVKKIRSDNGSEFKNLQVEEFLEEEGIKHEFSAPYTPQQNGVVERKNRTLIDMARTMLGEFKTPERFWSEVVNTACHAINRVYLHRLLKKTSYELLTGNKPNVSYFRVFGSKCYILVKKGRNSKFAPKAVEGFLLGYDSNTKAYRVFNKSLGLVEVSSDVVFDETNGSPREQVVDLDEVDEEDVPTAAIRTMAIGDVRPQEQDEQDQPSSSTMVHSPTQDDEQVHQQEACDQGGAQDDHVMEEEAQPAPPTQVRAMIQRDHPVDQILGDISKGVTTRSRLVNFCEHYSFVSSIEPFRVEEALLDPDWVLAMQEELNNFKRNEVWTLVPRPKQNVVGTKWVFRNKQDEHGVVTRNKARLVAKGYAQVAGLDFEETFAPVARLESIRILLAYAAHHSFRLFQMDVKSAFLNGPIKEEVYVEQPPGFEDERYPDHVCKLSKALYGLKQAPRAWYECLRDFLIANAFKVGKADPTLFTKTCDGDLFVCQIYVDDIIFGSTNKKSCEEFSRVMTQKFEMSMMGELNYFLGFQVKQLKDGTFISQTKYTQDLLKRFGMKDAKPAKTPMGTDGHTDLNKGGKSVDQKAYRSMIGSLLYLCASRPDIMLSVCMCARFQSDPKECHLVAVKRILRYLVATPCLGLWYPKGSTFDLIGYSDSDYAGCKVDRKSTSGTCQFLGRSLVSWKSKKQTSVALSTAEAEYIAAGQCCAQLLWMRQTLRDFGYTLSKVPLLCDNESAIRMAENPVEHSRTKHIDIRHHFLRDHQQKGDIEVFHVSTENQLADIFTKPLDEKTFCRLRSELNVLDSRNLD

SEQ ID NO: 10255 - protein, 1492 aa, Zea mays
  Clone ID: TF_ZM4791.C3.o3.fg.pep
MDPKGKGIVINDKEKESFVNEPRDDKSNDSGSGHRRKDGKKKKTRRIKEIVYYDSDESTSSQKDDDHNEYERKKPVNSNFSFDYSRIPQSTNAHLLSIPLGKPPHFDGEDYGFWSHKMRSHLFSLHPSIWEIVESGMHFDSTDSPMFINEQIHKNAQATTVLLASLCRDEYHKVSGLDNAKQIWDTLKISHEGNDVTLLTKMELVEGELGRFAMIRGEEPTQTYNRLKTLINKIRSYGSTRWTDHDVVHLMLRSFTILDPHLVNNIRENPRYTKMSPEEVLGKFVSGRMMIKEARYVDDALNGPINEPQPLALKATRSKEALPSKVAQIEAAGLNDEEMALIIKRFKTVLKGRKGQPSKTKAKGKRSCFKCGKLGHFIANCPDNDSDQDQGNKREKKKNYKKAKGEAHLGKEWDSDCSSSDSDNEALAATAFNKSSLFLNERHTCLMAREKKVSTHNTSTYASSSEDESSDDDEIDYSCLFKGLDRTKVDKINELIDALNDRNILLEKQEDLLYEEHDKFVEAQKSLALEIKRNEMLSSELSSCHETIAKLKSLNDDLNARLEVASKSNSCVEIVETCNRCKDFDIDACSEHLVSISKLNDELASLNAQLKTSKSNFDKLKFARDAYTIGRHPSIKDGLGYKKEAKNLTSHKAPISAKEKGKAPMASSVQKNHAFMYHDRRQSRNAYRRCNAYDAFDSHDMFASSSSYVHNRNVGRRNVVHNMPKRNVVNVPRKVYASGGSSWIIDSGCTNHMTGEKKMFTSYVKNRDSQDSIIFGDGNQGKDKSETQGTLKRFLRRAQNEFELKVKKIRSDNGSEFKNLQVEEFLEEEGIKHEFSAPYTPQQNGVVERKNRTLIDMARTMLGEFKTPERFWSEAVNMACHAINRVYLHHLLKKTSYELLTGNKPNVSYFRVFGSKCYILVKKGRNSKFAPKAVEGFLLGYDSNTKAYRVFNKSSGLVEVSSDVVFDETNGSPREQAVDLDDVDEEDVPTAAIRTMVIGDIRPQEQKEQDQPSSSTLMHPPTQDDEQVHQREACDQGGAQDDHVMEEEAQPAPPTQVRAMIQRDHPVDQILGDISKGVTTRSRLVNFCEHYSFVSSIEPFRVEEALLDPDWVLAMQEELNNFKRNEVWTLVPRPKQNVVGTKWVFRNKQDEHGVVTRNKARLVAKGYAQVAGLDFEETFAPVARLESIRILLAYAAHHSFRLFQMDVKSAFLNGPIKEEVYVEQPPGFEDERYPDHVCKLSKALYGLKQAPRAWYECLRDFLIVNAFKVGKADPTLFTKTCDGDLFVCQIYVDDIIFGSTNQKSCEEFSRVMTQKFEMSMMGELNYFLGFQVKQLKDGTFISQTKYTQDLLKRFGMKDAKPAKTPMGTDGHTDLNKGGSLLYLCASRPDIMLSVCMCARFQSDPKECHLVAVKRILRYLVATPCFGLWYPKGSTFDLVGYSDSDYAGCKVDRKSTSGTCQFLGRSLVSWNSKKQTSVALSTAEAEYVAAGQC

SEQ ID NO: 10256 - protein, 663 aa, Zea mays
  Clone ID: TF_ZM4796.C7.o1.fg.pep
MDPKGKGIVINDKEKESFVNEPKDDKPTDSGLSHKRKDGKKKKTRRIKEIVYYDSDESSSSQKDDDDYEKKKTVNSNFSFDYSRIPQSTNAHLLSIPLGKPPHFDGEDYGFWSHKMHSHLFSLHPSIWEIVESGMHFDSTDSPMFINEQIHKNAQATTVLLASLCRDEYHKVSGLDNAKQIWDTLKVSHEGNDVTMLTKMELVEGELGRFAMIRGEEPTQTYNRLKTLINKIRSYGSTRWTDHDVVRLMLRSFTVLDPHLVNNIRENPRYTKMTPEEILGKFVSGRMMIKEARYVDDALNGPINEPQHLALKATRSKETLPSKVAQIEAARLNDEEMALIIKRFKTALKGRKGQPSKTKTKGKRSCFKCGKLGHFIANCPDNYSDQDQGNKREKKKNYKKAKGEAHLGKEWDSDCSSSDSDNEGLAATAFNKSSLFPNERHTCLMAREKKVCTRNSTYASSSEDESSDEDEIDYSCLFKGLDRTKVDKINELIDALNDKNRLLEKQEDLLYEEHDKFVEAQKSHALEVKRNEMLSCELSSCHETISNLRSINDDLNAKLEIASKSTSCVEIVATYNRCKDFDIDACSEHLASISKLNDELASLNAQLKTSKSEFDKLKFATDAYMIGRHPSIKDGLGFKREAKNLTSHKVPIPAKEKGKAPMA

SEQ ID NO: 10257 - protein, 1236 aa, Zea mays
  Clone ID: TF_ZM4824.C5.o1.fg.pep
MDPKGKGIVINDKEKESFVNEPKDDKPTDSGSGHRRKEGKKKKTRRIKEIVYYDSNESSSSQKDNDDNDYDKQKTVNSNFSFDYSRIPHSSNAHLLPIPLGKPPHFDGEDYGFWSHKMRTHLFSLHPSIWEVVESGMKFDSSDSPSFINEQIHKNAQATTVLLASLCRDEYHKVSGLDNAKQIWDTLKISHEGNDVTLLTKMELVEGELGRFAMIRGEEPTQTYNRLKILINKIRSYGSTRWTDHDVVRLMLRSFTVLDPHLVNNIRENPRYIKMSPEEILGKFVSGRMMIKEARYVDDALNGPIHEPQPIALKATRSKEALPSKVAQIEAAGLNDEEMALIIKRFKTALKGRKGQPSKTKTKGKRSCFKCGKLGHFIANCPDNDSDQEHGSKREKKKHYKKAKGEAHIGKEWDSDCSSSDSDNEGLAATAFNKSSLFPNERHTCLMAREKKVCNQNNVTYDSSSDDESSDDEIDYSSLFKGLDRTKVDKINELIDALNEKDRLLEKQEDLLYEEHDKFVEAQKSYALEVKRNEVLSSELSSCHETIATLKSVNDDLNAKLEVASKSNSCVEHVEICTRCKDFDVDACSDHLVSISKLTKELASLNAQLKTSKNEFDKLKFARDAYTIGRHPSIKDGLGFKREAKNLTSHKAPIPAKEKGKAPMASSVQKNHAFMYHDRRQTRNAYRSFNAYDDFDFHAMFASSSSYMHGRNMSRKNAIHHMPRKNVIHAPRKVVNEPSIIYCALNASFAICRKDRKIVARKLGAKCKGDKTCIWVPKDICTNLVGPNMSWVYASGGSSWIIDSGCTNHMTGEKKMFTSYVKNKDSQDSIIFGDGNQGKIKGLVESLGYNLLSDKSETQGTLKRFLRRAQNEFELKVKKIRSDNGSEFKNLQVEEFLEEEGIKHEFSAPYTPQQNGVVERKNRTLIDMARTMLGEFKTPECFWTEAVNTACHAINRVYLHRLLKKTSYELLTGNKPNVSYFRVFGSKCYILVKKGRNSKFAPKAVEGFLLGYDSNTKAYRVFNKSSGLVEVSSDVVFDETNGSPREQVVDCDDVDEEDVPTAAIRTMAIGEVRPQEQDERDQPSSSTMVHPPTQDDEQVHQQEACDQGGAQDDHVMEEESQPAPPTQVRAMIQRDHPVDQILGDISKGVTTRSRLFNFCEHYSFVSSIEPFRVEEALLDPDWVLAMQEELNNFKRNEVWTLVPRPKQNVVGTKWVFRNKQDEHGVVTRNKARLVAK

SEQ ID NO: 10258 - protein, 1546 aa, Zea mays
  Clone ID: TF_ZM4868.C4.o4.fg.pep
MDPKGKGMVINDKEKESFVNEPRDDMSNDSSSGHKRKDGRKKKTRRIKEIVYYDSDESSSSQKDDDDYDRRKTRIPHSSNAQLLPIPLGKPPHFDGEDYGFWSHKMRTHLFSLHPSIWEIVESGMKFDSSDSPMFINEQIHRNAQATTVLLASLCRDEYHKVSGLDNAKQIWDTLKISHEGNDVTLLTKMELVEGELGRFAMIRGEEPTQTYNRLKTLINKIRSYGSTRWTDHDVVRLMLRSFTVLDPHLVNNIRENPRYTKMSLEEVLGKFVSGRMMIKEARYVDDALNGPINEPQTLALKATRSKKALPSKVAQFEAAGLNDEEMVLIIKRFKTALKGRKGQPSKTKTKGKRSCFKCGKLGHFIANCPDNDSDQEHGSKREKKKHYRKAKGEAHIGKEWDSDCSSSDSDNEGLTATAFNKSSLFPNERHTCLMAREKKVCNQNNVTYDSSSDDESSDDEIDYSSLFKGLDRTKVDKINELIDALNEKDRLLEKQEDLLYEEHDKFVEAQKSYALEVKRNEVLSSELSSCHETIATLKSVNDDLNAKLEVASKSNSCVEHVEICTRCKDFDVDACSNHLVSISKLTEELASLNAQLRTSKNEFDKLKFARDAYTIGRHPSIKDGLGFKREAKNLTSHKAPIPAKEKGKAPMATSAKKNHAFLYYDRRQPRNAYRSCNAYNAFDSHAMFASSSSYVHDRNVGRRNVVHNMPRRDVVNTPRKVNEPSTIYHALNASFAICRKDRKVYASGGSSWIIDSGCTNHMTGEKKMFTSYVKNKDSQDSIIFGDGNQGKDKSETQGTLKRFLRRAQNEFELKVKKIRSDNGSEFKNLQVEEFLEEEGIKHEFSAPYTPQQNGVVERKNRTLIDMARTMLGEFKTPKCFWSEAVNTACHAINRVYLHRLLKKTSYELLTGNKPNVSYFRVFGSKCYILVKKGRNSKFAPKVVEGFLLGYDSNTKAYRVFNKSSGLVEVSSDVVFDETNGSPREQVVDCDDVDEEDVPTAAIRTMAIGVVRPQEQDERDQPSSSTMMHPPTQNDEQPFRVEEALLDPDWVLAMQEELNNFKRNEVWTLVPRPKQNVVGTKWVFRNKQDEHGVVTRNKARLVAKGYAQVAGLDFEETFAPVARLESIRILLAYAAHHSFRLFQMDVKSAFLNGPIKEEVYVEQPPGFEDERYPDHVCKLSKALYGLKQAPRAWYECLRDFLLANAFKVGKADPTLFTKTCDGDLFVCQIYVDDIIFGSTNQKSCEEFSRVMTQKFEMSMMGELNYFLGFQVKQLKDGTFISQTKYTQDLLKRFGMKDAKPAKTPMGTDGHTDLNKGGKSVDQKAYRSMIGSLLYLCASRPNIMLSVCMCARFQSDPKECHLVAVKRILRYLVATPCFGLWYPKGSTFDLVGYSDSDYAGCKVDRKSTSGTCQFLGRSLVSWNSKKQTFVALSTAEAEYVAAGQCCAQLLWMRQTLRDFGYNLSKVPLLCDNESAIRMAENPVEHSRTKHIDIQHHFLRDHQQKGDNELFHVSTENQLADIFTKPLDEKTFCRLRSELNVLDLRNLD

SEQ ID NO: 10259 - protein, 213 aa, Zea mays
  Clone ID: TF_ZM4875.C4.o12.fg.pep
MDPKGKGMVINDKEKESFVNEPKDDKPTDSGSGHKRKDGKKKKTRRIKEIVYYDDSDESSSSQKDNDDYDRRKTATRSKEALPSKVAQIEAAGLNDEEMALIIKRFKTALKDRKGQPSKTKTKGKRSCFKCGKLGHFIANCPDNDSDQEQGNKREKKKNYKKAKGEAHLGKEWDSDCSSSDSDNEGLAATAFNKSALFPNERHTCLMAREKKV

SEQ ID NO: 10260 - protein, 698 aa, Zea mays
  Clone ID: TF_ZM4885.C4.o3.fg.pep
MDTHRPPHFDGTNFPYYSARMACYLEAVDLGVWRVTRDGMKPLKNPEKPTTSEEKEIHLNARAKNCLYESLSMDIFNQVFTLKTANEIWLKLHELHDGTSNVREQKHCLVLNEYNSFAMKDDELVRDMYSRLNLIINELNSIGINKLGDADIVRKIISLLPQRRYGSIITILHNMEDLGNMTPTIVIGKIATFEMSRKMCRGEEPTSSRPYAFACDERKGKKKAPTPSSSSEEEEEEEIDDDEDNQPCTSSSEDEETIRRVGKVMGMIRKINLMGVPLQVEDLLFNIDRKKQRKRGCFTCGEKGHFRDNCPTMAEPKKERSKGKALTSVRTWDDSSSEDEPPRTRSHRSSSRSSHKCLMARGNKSIPYSSDESGSDDEGEGKPSVDELANAVEFFQDVCTKQKAQLKTLKNKLVSSQNDYKGLLEKFETFANLNSELSTKIELLESSAPSTATDDNLIKKNEKLKAKLASSQEAIENLLEKMEILSIHNNELTTKLENIGSTPATSLVEIPEIIKKDASTSCFDLIDDSNPCNQVVVENIVVETCSDEVAKENEQLKQEVARLGKALYDKKGKAKQIRPPQDNTTAGVNKPVEGETMICRLCHMEGHKSFQCKAMTGNKQRQKLKQKPSSKISNTYIKKVNKKDATPYLIKKKKNGKVIAIKANKQANKGKGAKRIWVPKEIISTMKSTKKVWIPKGK

SEQ ID NO: 10261 - protein, 779 aa, Zea mays
  Clone ID: TF_ZM4885.C4.o5.fg.pep
MDPKGKGMVINDKEKESFVNEPNDDKPTDSGSGHKRKDGRKKKARRIKEIVYYDSDESSSSQKDDDDYDRRKTVNSNFSFDYLRIPHSSNAQLLPIPLGKPPHFDGEDYGFWSHKMRTHLFSLHPSIWEIVESGMKFDSSDSPMFINEQIHRNAQATTVLLASLCRDEYHKVSGLDNAKQIWDTLKISHEGNDVTLLTKMELVEGELGRYTKMSPEEVLGKFVSGRMMIKEARYVDDALNGPINEPQPLALKATRSKEALPSKVAQFEAAGLNDEEMALIIKRFKTVLKGRKGQPSKTKAKGKRSCFKCGKLGHFIANCPDNDSDQDQGNKREKKKNYKKAKGEAHLGKEWDSDCSSSDSDNEGLAATTFNKSSLFPNERHTCLMAREKKVSTHNTSTYASSSEDESSDDDEIDYSCLFKGLDRTKVDKINELIDALNDRNILLEKQEDLLYEEHDKFVEAHKSLALEIKRNEMLSSELSSCHETIAKLKSFNDDLNAKLEVASKSNSCVEIVETCNRCKDIDIDACSEHLVSISKLNDELASLNAQLKTSKSNFDKLKFARDAYTIGRHPSIKDGLGYKREAKDLTSHKAPISAKEKGKAPMASSATKNHAFMYHDRRHTRNANRSYNVFDSYVYDSHDMFASSSFYVHDRNVGRRNVVHNMPRRNVVNVPRKVNEPSTIYHALNASFAICRKDRKVIARKFGAKCKGDKTCIWIPKEIVTNLVGPNKSWVYASGGSSWIIDSGCTNHMTGEKKMFTSYVKNKDSQDSIIFGDGNQGK

SEQ ID NO: 10262 - protein, 1609 aa, Zea mays
  Clone ID: TF_ZM4929.C1.o1.fg.pep
MDPKGKGIVINDKEKESFVNEPRDDKSNDSGSGHKRRDGKKKKTRRIKEIVYYDSDESSSSQKNDDHDKQRKPVNSNFSFDYSRIPHSSNSHLLSIPLGKPPHFDGEDYGFWSHKMRSHLFSLHPSIWEIVENGMKFDSSDSPMFINEQIHKNAQATTVLLASLCREEYNKVSGLDNAKQIWDTLKISHEGNDITMLTKMELVEGELGRFAMIRGEEPTQTYNRLKTLINKIRSYGSTRWTDHDVVRLMLRSFTVLDPHLVNNIRENPRYTMMTPEEVLGKFVSGRMMIKEARYVDDALNGPIHEPQPIALKASRSKEALPSKVAQIEAAGLNDEEMALIIKRFKTVLKGRNGQPSKTKTKGKRSCFKCGKLGHFIANCPDNESDQEKGNKREKKKHYKKAKGEAHLGKEWDSDCSSSDSDNEGLAATAFNKSTLFPNERHTCLMAREKKVCTRNSTYASSSEDESSDEDEVDYSCLFKGLDRSKIDKINELIDALNEKNILLEKQEDLLYEEHDKFVEAQKSYALEVKRNEMLSFELSTCHETISTLKGVNNDLNAKLEVANKSNSCVEHVEICTRCKDVDINACSEHLVSISKLSDEVASLNARLKTSKSDFEKLKFARDAYTVGRHPSIKDGLGFKREAKNLTSHKAPIPAKEKGKAPMATSAKRNHAFLYHDKRQTRNRSYDAFDSYVYDSHAIKDRKVIARKLGAKCKGDKTCIWVPKEIVTNLVGPNKSWVYASGGSSWIIDSGCTNHMTGEKKMFTSYVKNKDSQDSIVFGDGNQGKDKSETQGTLKRFLRRAQNEFELKVKKIRSDNGSEFKNLQVEEFLEDEGIKHEFSAPYTPQQNGVVERKNRTLIDMARTMLGEFKTPECFWTEAVNTACHAINRVYLHRLLKKTSYELLTGNKPNVSYFRVFGSKCYILVKKGRNSKFAPKAVEGFLLGYDSNTKAYRVFNKSSGLVEVSSDVVFDETNGSSREQVVDCDDVDEEDVPTAAIRTMAIGEVRPQEQDEQDQPSSSIMVHPPTQDDEQVHHKEACDQGGAQDNHVMEEEVQPAPPTQVRAMIQRDHPVDQILGDISKGVTTRSRLVNFCEHYSFVSSIEPFRVEEALLDPDWVLAMQEELNNFKRNEVWTLVPRPKQNVVGTKWVFRNKQDEHGVVTRNKARLVAKGYAQVAGLDFEETFAPVARLESIRILLAYAAHHSFRLYQMDVKSAFLNGPIKEEVYVEQPPGFEDERYPDHVCKLSKALYGLKQAPRAWYECLRDFLIANAFKVGKADPTLFTKTCDGDLFVCQIYVDDIIFGSTNQKSCEEFSRVMTQKFEMSMMGELNYFLGFQVKQLKEGTFISQTKYTQDLLKRFGMKDAKPAKTPMGTDGHTDLNKGGKSVDQKAYRSMIGSLLYLCASRPDIMLSVCMCARFQSDPKECHLVAVKRILRYLVATPCFGLWYPKGSTFDLVGYSDSDYAGCKVDRKSTSGTCQFLGRSLVSWNSKKQTSVALSTAEAEYVAAGQCCAQLLWMRQTLRDFGYNLSKVPLLCDNESAIRMAENPVEHSRTKHIDIRHHFLRDHQQKGDIEVFHVSTENQLADIFTKPLDEKTFCRLRSELNVLDSRNLD

SEQ ID NO: 10263 - protein, 865 aa, Zea mays
  unsure (1)..(865): unsure at all Xaa locations
  Clone ID: TF_ZM4951.C1.o9.fg.pep
MDPKGKGIVINEKEKESFVNEPKDDKPTDSGSGHRRKEGKKKKTRRIKEXVYYDDSDESTSSHKDNDDNDYDKXKRRDEYHKVSGLDNAKQIWDTLKISHEGNDVTLLTKMELVEGELGRFAMIRGEEPTQTYNRLKTLINKIRSYGSTRWTDHDVVRLMLRSFTVLDPHLVNNIRENPRYTKMSPEEVLGKFVSGRMMIKEARYVDDALNGPINEPQPLALKATRSKEALPSKVAQIEAAGLNDEEMALIIKRFKTALKGRKGRPSKTKTKGKRSCFKCGKLGHFIANCPDNDSDQDQGNKREKKKNYKKAKGEAHLGKEWDSDCSSSDSDNEGLAATAFNKSSLFPNERLTCLMAREKKVCSRNSTYASSSEDESSDEDEIDYSCLFKGLDRTKVDKINELIDALNDKNRLLEKQEDLLYEEHDKFLEAQKSHALEVKRNEMLSCELSSCHETISSLRSINDDLNAKLEMARKSTTCVENVAICNRCKDFDIDACSEHIASIAKLNDEMASLNAQLKASKSDFDKLKFARDAYSIGRHPSIKDELGFKREAKNLTSHKAPISTNEKGKAPMASSTKRNHAFMYNDRRQSHRSCNAFDSHAYDSYAMYASSSSYMHCRDMPRKNIHHVPRKNFVHAPRKVYASGGSSWIIDSGCTNHMTGEKKMFTSYVKNKDFQDSIIFGDGNQGKVKGLGKIAISNEHSISNVFLVESLGYNLLSVSQLCNMGYNCLFTNVDVSVFRRCDGSLAFKGVLDGKLYLVDFAKEEAGLDACLMAKTCMGWLWHRRLAHVGMKNLHKLLKGEHMIGLTNVHFEKDRPCAACQAGKQVGGAHHSKNVMTTSRPLELLHMDLFGPVAYLSIGGRLKVA

SEQ ID NO: 10264 - protein, 498 aa, Zea mays
  Clone ID: TF_ZM4956.C1.o12.fg.pep
MDPKGKGMVINDKEKETFVNELNDDKPTDSGSGHKRKDGRKKKTRRIKEIVYYDSDESSSSQKDDDDHDRRKTVNSNFSFDYSRIPHSSNAQLLPIPLGKPPHFDGEDYGFWSHKMRTHLFSLHPSIWEIVESGMKFDSSDSPVFINEQIHKNAQATTVLLASLCRDEYHKVSGLDNAKQIWDTLKISHEGNDVTLLTKMELVEGELGRFAMIRGEEPTQTYNRLKTLINKIRSYGSTRWTDHDVVCLMLRSFTVLDPHLVNNIRENPRYTKMSPEEVLGKFVSGRMMIKEARYVDDALNGPINEPQPLALKATRSKEALPSKVAQVEAAGLNDEEMALIIKRFKTVLKDRKGQPSKTKAKGKRSCFKCGKLGHFIANCPDNDSDQDQGNKREKKKNYKKAKGEAHLGKEWDSDCSSSDSDNEGLAATAFNKSFLFPNERHTCLMAREKKVSTPNTSTYASSSEDESSDDDEIDYSCLFKGLDRTKEYTVRKARGFVV

SEQ ID NO: 10265 - protein, 1609 aa, Zea mays
  Clone ID: TF_ZM4957.C1.o6.fg.pep
MDPKGKGIVINDKEKESFVNEPRDDKSNDSGSGHKRRDGKKKKTRRIKEIVYYDSDESSSSQKNDDHDKQRKPVNSNFSFDYSRIPHSSNSHLLSIPLGKPPHFDGEDYGFWSHKMRSHLFSLHPSIWEIVENGMKFDSSDSPMFINEQIHKNAQATTVLLASLCREEYNKVSGLDNAKQIWDTLKISHEGNDITMLTKMELVEGELGRFAMIRGEEPTQTYNRLKTLINKIRSYGSTRWTDHDVVRLMLRSFTVLDPHLVNNIRENPRYTMMTPEEVLGKFVSGRMMIKEARYVDDALNGPIHEPQPIALKASRSKEALPSKVAQIEAAGLNDEEMALIIKRFKTVLKGRNGQPSKTKTKGKRSCFKCGKLGHFIANCPDNESDQEKGNKREKKKHYKKAKGEAHLGKEWDSDCSSSDSDNEGLAATAFNKSTLFPNERHTCLMAREKKVCTRNSTYASSSEDESSDEDEVDYSCLFKGLDRSKIDKINELIDALNEKNILLEKQEDLLYEEHDKFVEAQKSYALEVKRNEMLSFELSTCHETISTLKGVNNDLNAKLEVANKSNSCVEHVEICTRCKDVDINACSEHLVSISKLSDEVASLNARLKTSKSDFEKLKFARDAYTVGRHPSIKDGLGFKREAKNLTSHKAPIPAKEKGKAPMATSAKRNHAFLYHDKRQTRNRSYDAFDSYVYDSHAIKDRKVIARKLGAKCKGDKTCIWVPKEIVTNLVGPNKSWVYASGGSSWIIDSGCTNHMTGEKKMFTSYVKNKDSQDSIVFGDGNQGKDKSETQGTLKRFLRRAQNEFELKVKKIRSDNGSEFKNLQVEEFLEEEGIKHEFSAPYTPQQNGVVERKNRTLIDMARTMLGEFKTPECFWTEAVNTACHAINRVYLHRLLKKTSYELLTGNKPNVSYFRVFGSKCYILVKKGRNSKFAPKAVEGFLLGYDSNTKAYRVFNKSSGLVEVSSDVVFDETNGSPREQVVDCDDVDEEDVPTAAIRTMAIREVRPQEQDDQDQPSSSIMVHPPTQDGEQVHQKEACDQGGAQDNHVMEEEALPAPPTQVRAMIQRDHPVDQILGDISKGVTTRSRLVNFCEHYSFVSSIEPFRVEEALLDPDWVLAMQEELNNFKRNEVWTLVPRPKQNVVGTKWVFRNKQDEHGVVTRNKARLVAKGYAQVAGLNFEETFAPVARLESIRILLAYAAHHSFRLYQMDVKSAFLNGPIKEEVYVEQPPGFEDERYPDHVCKLSKALYGLKQAPRAWYECLRDFLLANAFKVGKADPTLFTKTCDGDLFVCQIYVDDIIFGSTNQKSCEEFSRVMTQKFEMSMMGELNYFLGFQVKQLKDGTFISQTKYTQDLLKRFGMKDAKPAKTPMGTDGHTDLNKGGKSVDQKAYRSMIGSLLYLCASRPDIMLSVCMCARFQSDPKECHLVAVKRILRYLVATPCFGLWYPKGSTFDLVGYSDSDYAGCKVDRKSTSGTCQFLGRSLVSWNSKKQTSVALSTAEAEYVAAGQCCAQLLWMRQTLRDFGYNLSKVPLLCDNESAIRMAENPVEHSRTKHIDIRHHFLRDHQQKGDIEVFHVSTENQLADIFTKPLDEKTFCRLRSELNVLDSRNLD

SEQ ID NO: 10266 - protein, 498 aa, Zea mays
  Clone ID: TF_ZM4958.C1.o3.fg.pep
MDPKGKGMVINDKEKETFVNELNDDKPTDSGSGHKRKDGRKKKTRRIKEIVYYDSDESSSSQKDDDDHDRRKTIHKNAQATTVLLASLYRDEYHKVSGLDNAKQIWDTLKISHEGNDVTLLTKMELVEGELGRFAMIRGEEPTQTYNRLKTLINKIRSYGSTRWTDHDVVRLMLRSFTVLDPHLVNNIRENPRYTKMSPEEVLGKFVSGRMMIEEARYVDDALNGPINEPQPLALKATRSKEALPSKVAQIEAAGLNDEEMALIIKRFKTVLKDRKGQPSKTKAKGKRSCFKCGKLGHFIANCPDNDSDQDQGNKREKKKNYKKAKGEAHLGKEWDSDCSSSDSDNEGLAATAFNKSSLFPNERHTCLMAREKKDKSETQGTLKRFLRRAQNEFELKVKKIRSDNGSEFKNLQVEEFLEEEGIKHEFSAPYTPQQNGVMKKMFRRPLYEPWRLEKCGHRNKMNEINLLPQQQCIPQLKTMNRFIKRRRVIKGEHKMIT

SEQ ID NO: 10267 - protein, 1831 aa, Zea mays
  Clone ID: TF_ZM4960.C1.o7.fg.pep
MDPMGKGMVVNNNEKESIFNEPKDDKPTDSGSSHKRKDGKKKKTRRIKEIVYYDSDESSSSQKDDDDYEKKKTVNSNFSFDYSRIPQNTNAHLLSIPLGKPPHFDGEDYGFWSHKMRSHLFSLHPSIWEIVENGMHFDSSDNPMFINEQIHKNAQATTVLLASLCRDEYHKVSGLDNAKQIWDTLKISHEGNDVTMLTKMELVEGELGRFAMIRGEEPTQTYNRLKTLVNKIRSYGIYGSTRWTDHDVVCLMLRSFTVLDPHLVNNIRENPRYTKMTPEEILGKFVSGRMMIKEARYVDDALNGPINEPQPLALKATRSNETLPSKVAQIEAAGLNDEEMALIIKRFKTALKGRKGQPSKTKTKGKRSCFKCGKLGHFIANCPDNDSDQDQGNKREKKKNYKKAKGEAHLGKEWDSNCSSSDSDNEGLAATAFNKSSLFPNERHTCLMAREKKVCTRNTTYASSSEDESSDEDEIDYSCLFKGLDRTKVDKINELIDALNDKNRLLEKQEDLLYEEHDKFVEAQKSHALEVKRNEMLSCELSSCHETISNLRSINDDLNAKLEIASKSTSCVENDVICNRCKDFDIDACSEHIASIAKLNDEIASLNDQLKTSKSEFDKLKFARDAYTIGRHPSIKDGLGFKREVKNLTSHKASISTKEKGKAPMASNAKKNHAFMYHDRKFSGNVHDDRSCNAYNAFDSHAMFASSSSYMHGRNVFRRNVVHHMPRRNVVNIPRKVNEPSTIYHACDASFAICGKDRKVYASGGSSWIIDSGCTNHMTGEKKMFTSYVKNKDSQDSIIFGDGNQGKVKGLGKIAISNEHSISNVFLVESLGYNLLSVSQLCNMGYNCLFTNVDVSVFRRSDGSLSFKGVLDGKLYVVDFAKEEAGLDACLIAKTSMGWLWHRHLAHVGMKNLHKLLKGEHVIGLTNVTFEKDRPCAACQAGKQVGGAHHSKNVMTTSRPLELLHMDLFGPVAYLSIGGSKYGLVIVDDFSRFTWVFFLQDKSETQGTLKRFLRRAQNEFELKVKKIRSDNGSEFKNLQVEEFLEEEGIKHEFSAPYTPQQNGVVERKNRTLIDMARTMLGEFKTPEYFWSEAVNTACHAINRVYLHRLLKKTSYELLTGNKPNVSYFRVFGSKCYILVKKGRNSKFAPKAVEGFLLGYDSNTKAYRVFNKSSGLVEVSSDVVFDETNGSPREQVVDLDDVDEEDVPTAAIRTMAIGDVRPQEQKEQDQPSSSTMVHPLTQDDEQVHQQEACNEGGAQDDHMMEEETQPAPPTQVRAMIQRDHPVDQILGDISKGVTTRSRLVNFCEHYSFVSSIEPFRVEEALLDPDWVLAMQEELNNFKRNEVWTLVPCPKQNVVGTKWVFRNKQDEHGVVTRNKARLVAKGYAQVAGLDFEETFAPVARLESIRILLAYAAHHSFRLFQMDVKSAFLNGPIKEEVYVEQPPGFEDEWYPDHVCKLSKALYGLKQAPRAWYECLRDFLIANAFKVGKVDPTLFTKTCDGDLFVCQIYVDDIIFGSTNKKSCEEFSRVMTQKFEMSMMGELNYFLGFQVKQLKNGTFISQTKYTQDLLKWFGMKDAKPAKTPMGTDGHTDLNKGGKSVDQKAYRSMIGSLLYLCASRSDIMLSVCMCARFQSDPKECHLVAVKRILRYLVATPCFRLWYPKGSTFDLIGYSDSDYAGCKVDRKSTSGTCQFLGRSLVSWNSKKQTSVALSTAEAEYVAAGQCCTQLLWMRQTLRDFGYNLSKVPLLCDNESAIRMAENPVEHSRTKHIDIRHHFLRDHQQKGDIEVFHVSTENQLADIFTKPLDEKTFCRLRNFGEAMGFLGQDSSRFGI

SEQ ID NO: 10268 - protein, 1107 aa, Zea mays
  unsure (1)..(1107): unsure at all Xaa locations
  Clone ID: TF_ZM4986.C2.o2.fg.pep
MDPKGKGMVINDKEKESFVNEPNNDKPTDSGSGHKRKDGRKKKTRRIKEIVYYDSDESSSSQKDDDDYDRRKTIHKNAQATTVLLASLCRDEYHKVSGLDNAKQIWDTLKISHEGNDVTLLTKMELVEGELGRFAMIRGEEPTQTYNRLKTLINKIRSYGSTRWTDHDVVCLMLRSFTVLDPHLVNNIRENPRYTKMSPEEVLGKLVSGRMMIKEARYVDDALNGPINEPQPLALKATRSMEALPSRVAQFEAAGLNDEEMALIIKRFKTVLKGRKGQPSKTKAKGKRSCFKCGKLGHFIANCPDNESDQEKGNKREKKKHYKKAKGEAHIGKEWDSDCSSSDSDNEGLAATAFNKSSLFPXERHTCLMAREKKXILLEKQEDLLYEEHDKFVEAQKSLALEIKRNEMLSSELSSCHETIAKLKSFNDDLNAKLEVASKSNSCVEIVETCNRCKDFDIDTCSDHLVSISKLNDELASLNAQLKTSKNEFDKLKFARDAYTIGRHPSIKDGLGYKREAKNLTSHKAPISAKEKGKAPMASSVQKNHAFMYHDRRQSRNAYRSCNAYNVFDSHAMFASSSSYMHDKNVGRRNVIHNMPRKNVVNIPRKVYASGGSSWIIDSGCTNHMTGEKKMFTSYVKNKDSQDSIIFGDGNQGKVKGLVESLGYNLLSVSQLCNMGYNCLFTNVDVSVFRRCDGSLAFKGVLDGKLYLVDFAKGEAGLDACLIAKTSMGWLWHRRLAHVGMKNLHKLLKGEHVIGLTNVQFEKDRPCAACQAGKQVGGAHHSKNVMTTSRPLELLHMDLFGPVAYLSIGGSKYGLVIVDDFSRFTWVFFLQDKSETQGTLKRFLRRAQNEFELKVKKIRSDNGSEFKNLQVEEFLDEEGIKHEFSAPYTPQQNGVVERKNRTLIDMARTMLGEFKTPECFWSEAVNTACHAINRVYLHRLLKKTSYELLTGNKPNVSYFRVFGSKCYILVKKGRNSKFAPKAVEGFLLGYDSNTKAYRVFNKSSGLVEVSSDVVFDETNGSPREQVVDLDDVDEEDVPTAAMRTMAIGDVRPQEQVEQDQPSSSTMVHPPTQDDEQVHQKEVCDQGGAQDDHVMEEEAQPAPPTEST

SEQ ID NO: 10269 - protein, 707 aa, Zea mays
  Clone ID: TF_ZM4986.C3.o1.fg.pep
MDPKGKGIVINDKEKESFVNEPKDDKSNDSGSGHRRKDGKKKKTRRIKEIVYYDSDESTSSHKDDDYDKHKTVNSYFSFDYSRIPHSSNAHLLPIPLGKPPHFDGEDYGFWSHKMRTHLFSLHPRIWEIVESGMKFDSSDSPSFINEQIHKNAQATTVLLASLCRDEYHKVSGLDNAKQIWDTLKISHEGNDVTLLTKMELVEGELGRFAMIRGEEPTQTYNRLKILINKIRSYGSTRWTDHDVVRLMLRSFTVLDPHLMNNIRGNPRYTKMTPEEVLGKFVSGRMMIKEARYVDDALNGPINEPQPLALKATKSKEALPSRVAQIEAAELNDEEMALIIKRFKTALKGRKGQPSKTKAKGKRSCFKCGKLGHFIANCPDNDSDQDQGNKREKKKNYKKAKGEAHLGKEWDSDCSSSDSDNEGLAATAFNKSSLFPNERHTCLMAREKVITRNDITYDSSSDDESSDDEIDYSSLFKGLDKNKIDKINELIDALNEKDRLLEKQEDLLYDEHDKFIEAQKSYALEVKRNEVLSSELSSCHENIATLKSVNDDLNAKLEVASKSTSCVEIVETCTRCKDLNVDACSKHLVSISKLNDEVASLNAQLKASKSEFDKLKFARDAYTIGRHPSIKDGLGFKREAKNLTSHKAPIPAKEKGKAPIATSAKKNHAFLYHDRRQTRNAYRSYNAYDDFSHAMFASSSSYVHDRN

SEQ ID NO: 10270 - protein, 1573 aa, Zea mays
  unsure (1)..(1573): unsure at all Xaa locations
  Clone ID: TF_ZM4988.C1.o3.fg.pep
MDPKGKGMVINDKEKETFVNELNDDKPTDSGSSHKRKDGRKKKTRRIKEIVYYDSDESSSSQKDDDDHDRRKTVNSNFSFDYSRIPHSSNTQLLPIPLGKPPHFDGEDYGFWSHKMRTHLFSLHPSIWEIVESGMKFDSSDSPVFINEQIHKNAQATTVLLASLCRDEYHKVSGLDNAKQIWDTLKISHEGNDVTLLTKMELVEGELGRFAMIRGEEPTQTYNRLKTLINKIRSYGSTQWTDHDVVRLMLRSFTVLDPHLVNNIRENPRYTKMSPEEVLGKFVSGRMMIKEARYVDDALNGPINEPQPLALKATRSKEALPSKVAQIEAAGLNDEEMALIIKRFKTVLKGRKGQPSKTKAKGKRSCFKCGKLGHFIANCPDNDSDQDQGNKREKKKNYKKAKGEAHLGKEWDSDCSSSDSDNEGLATTAFNKSSLFPNEHHTCLMAREKKVSTPNTSTYASSSEDESSDDDEIDYSCLFKGLDRTKVDKINELIDALNDRNILLEKQEDLLYEEHDKFVEAQKSLALEIKRNEMLSSELSSCHETIAKLKIFNDDLNAKLEVVSKSNSCVEIVETCNRCKDFDIDACSDHLVSISKLNEELASLNAQLKTSKNEFDKLKFARDAYTIGRHPSIKDGLGYKREAKNLTSHKAPISAKEKGKAPMASSVQKNHAFMYHDRRQSRNAYRSCNAYNVFDSHAMFASSSSYVHDRNVGRRNAIHNLPRRNVVNVPRKVYASGGSSWIIDSGCTNHMTGEKKMFTSYVKNKDSQDSIIFGDGNQGKDKSETQGTLKRFLGRAQNEFELKVKKIRSDNGSEFKNFQVEEFLEEEGIKHEFSAPYTPQQNGVVERKNRTLIDMARTMLGEFKTPERFWSEAVNTACHAINRVYLHRLLKKTSYELLTGNKPNVSYFRVFGSKCYILVKKGRNSKFAPKAVEGFLLGYDSNTKAYRVFNKSSGLVEVSSDVVFDETNGSPREQVVDCDDVDEEDVPTAAIRTMAIGEVRPQEQDERDQPSSSTMVHPPTEDDEQVPQVEALDQGGAQDDQVMEEEAQLAPLTQVRAMIQRDHPVDQILGDISKGVTTRSRLVNFCEHYSFVSSIEPFRVEEALLDPDWVLAMQEELNNFKRNEVWTLVPRPKQNVXWVFRNKQDEHGVMTRNKARLVAKGYAQVXRLYQMDVKSAFLNGPIKEEVYVEQPPGFEDERYPDHVCKLSKALYGLKQAPRAWYECLRDFLIVNAFKVGKADPTLFTKTCDGDLFVCQIYVDDIIFGSTNQKSCEEFSRVMMQKFEMSMMGELNYFLGFQVKQLKDGTFISQTKYTLDLLKRFGMKDAKPAKTPVGTDGHTDLNKGGKSVDQKAYRSMIGSLLYLCASRPDIMLSVCMCARFQSDPKECHLVAVKRILRYLVATPCFGLWYPKGSTFDLVGYSDSDYAGCKVDRKSTSGTCQFLGRSLVSWNSKKQTSVALSTVEAEYVAAGQCCAQLLWMRQTLRDFGYNLSKVPLLCDNESAIRMAENPVEHSRTKHIDIRHHFLRDHQQKGDIEVFHVSTENQLADIFTKPLDEKTFCRLRSELNVLDSRNLD

SEQ ID NO: 10271 - protein, 434 aa, Zea mays
  Clone ID: TF_ZM4989.C9.o3.fg.pep
MDPKGKGMVVNNNEKESIFNEPKDDKPTDSVSSHKHKDGKKKKTRRIKEIVYYDSDESSSSQKDDDYEKKKTVNSNFSFDYSRIPQSTNAHLLSIPLGKPPHFDGEDYGFWSHKMRSHLFSLHPSIWEIVESGVHFDSTDSPMFINEQIHKNAQATTVLLASLCRDEYHKVSGLDNAKQIWDTLKISHEGNDVTMLTKMELVEGELGRFAMIRGEEPTQTYNRLKTLVNKIRSYGSTRWTDHDVVRLMLRSFTVLDPHLVNNIRESPSGRMMIKEARYVDDALNGPINEPQPLALKATRSKETLPSKVAQIEAVGLNDEEMALIIKRFKTALKGRKGQPSKTKTKGKRSCFKCGKLGHFIANCPDNDSDQDQGNKREKKKNYKKAKGEAHLGKEWDSDCSSSDSDNEGLAATAFNKSSLFPNERHTCLMAREKK

SEQ ID NO: 10272 - protein, 1742 aa, Zea mays
  Clone ID: TF_ZM4990.C4.o2.fg.pep
MDPKGKGIVINDKERESFVNEPRDDKSNDSSSGHRRKDGKKKKTRRIKEIVYYDSDESTSSQKDEDNDYKQKTVNSNFSFDYSRIPQSSNSHLLSIPLGKPPHFDGEDYGFWSHKMRSHLFSLHPSIWEIVESGMKFDSSDSPVIINEQIHRNAQATTVLLASLCREEYNKVSGLDNAKQIWDTLKISHEGNDVTMLTKMELVEGELGRFAMIRGEEPTQTYNRLKTLVNKIRSYGSTRWTDHDVVRLMLRSFTILDPHLVNNIRENPRYTKMSPEEILGKFVSGRMMIKEARYVDDALNGPIHEPQPVALKATRSKEALPSKVAQVEAAGLNNEEMALIIKRFKTALKGRKGQPSKTKAKGKRSCFKCGKLGHFIANCPDNDSDQDQGNKREKKKHYKKAKGEAHLGKEWDSDCSSSNSDNEGLAATAFNKSTLFPNERHTCLMASEKKVCTRNSTYASSSEDESSDEDEVDYSCLFKGLDRTKVDKINELIDALNEKNMLLEKQEDLLYEEHDKFIEAQKSYALEVKRNELLSFELSTCHETISTLKGVNNDLNAKLEVANKSNSCVEHVAICSRCKDFDINACSEHLVSISKLNDELASLNAQLKTSKSDFDKLKFARDAYTVGRHPSIKDGLGFKREAKNLTSHKAPIPAKEKGKAPMATSTKKNHAFLYHDRRQSRSAYRGYNAYDDFDSHHMIASSSSYMHGRNMSRRNAIHHVPRKNVSHASRKVVNEPSTIYCALNASFAIRRKDKKIVARKLGAKCKGDKTCIWVPKDICTNLVGPNMSWVYASGGSSWIIDSGCTNHMTGEKKMFTSYVKNKDSQDSIIFGDGNQGKVKGLDVSVFRRSDGSLAFKGVLDGKLYLVDFAKEEAGLDACLIAKTSMGWLWHRRLAHVGMKNLHKLLKGEHVIGLTNVQFEKDRPCAACQAGKQVGGSHHTKNVMTTSRPLEMLHMDLFGPVAYLSIGGSKYGLVIVDDFSRFTWVFFLQDKSETQGTLKRFLRRAQNEFELKVKKIRSDNGSEFKNLQVEEFLEEEGIKHEFSAPYTPQQNGVVERKNRTLIDMARTMLGEFKTPECFWTEAVNTACHAINRVYLHRLLKKTSYELLTGNKPNVSYFRVFGSKCYILVKKGRNSKFAPKAVEGFLLGYDSNTKAYRVFNKSSGLVEVSSDVVFDETNGSPREQVVDLDDVDEEDVPTAAMRTMAIGDVRPQEHLERDQPSSSTMVHPPTQDDEQPFRVEEALLDPDWVLAMQEELNNFKRNEVWTLVPRPKQNVVGTKWVFRNKQDEHGVVTRNKARLVAKGYAQVAGLDFEETFAPVARLESIRILLAYAAHHSFRLYQMDVKSAFLNGPIKEEVYVEQPPGFEDERYPDHVCKLSKALYGLKQAPRAWYECLRDFLIANAFKVGKADPTLFTKTCDGDLFVCQIYVDDIIFGSTNKKSCEEFSRVMTQKFEMSMMGELNYFLGFQVKQLKDGTFISQTKYTQDLLKRFGMKDAKPAKTPMGTDGHTDLNKGGKSVDQKAYRSMIGSLLYLCASRPDIMLSVCMCARFQSDPKECHLVAVKRILRYLVATPCLGLWYPKGSTFDLIGYSDSDYAGCKVDRKSTSGTCQFLGRSLVSWNSKKQTSVALSTAEAEYVAAGQCCAQLLWMRQTLRDFSYNLSKVPLLCDNESAIRMAENPVEHSRTKHIDIRHHFLRDHQQKGDIEVFHVSTENQLADIFTKPLDEKTFCRLRSELNVLDSRNLD

SEQ ID NO: 10273 - protein, 1502 aa, Zea mays
  Clone ID: TF_ZM5007.C1.o5.fg.pep
MDPKGKGIVINDKEKESLVNEPKDDKPTDSGSGHKRKDGKKKKTRRIKEIVYYDSDESSSSQKDDDDYEKKKTVNSNFSFDYSRIPQSTNAHLLSIPLGKPPHFDGEDYGFWSHKMRSHLFSLHPSIWEIVENGMHFDSSDSPMFINEQIHKNAQATTVLLASLCRDEYHKVSGLGNAKQIWDTLKISHEGNDVTMLTKMELVEGELGRFAMIRGEEPTQTYNRLKTLVNKIRSYGSTRWTDHDVVRLMLRSFTVLDPHLVNNIRENPRYTKMTPEEILGKFVSGRMMIKEARYVDDALNGPINEPQPLALKATRSKEALPIKVAQIEAAGLNDEEMALIIKRFKTALKGRKGQPSKIKTKGKRSCFKCGKLGHFIANCPDNDSDQDQGIKREKKKNYKKAKGEAHLGKEWDSDCSSSDFDNEGLAATAFNKSSLFPNERHTCLMAREKKVCTQNSTYASSSEDESSDEDEIDYSCLFKGLDRTKVDKINELIDALNDKNRLLEKQEDLLYEEHDKFVEAQKSHALEVKRNEMLSCELSSCHETISSLRSINDDLNAKLETASKSTSCVKIVETCNRCKDIDIDACSEHIASIAKLNDEVASLNAQLKTSKSEFDKLKFARDAYTIGRHPSIKDGLGFKREVKNLTSHKASISIKEKGKAPMVSNAKKNHAFMYHDRKFSRNVHDDRSCNAYNAFDFHAMFASSSSYMHASGGSSWIIDSGCTNHMTGEKKMFTSYVKNKDSQDSIIFGDGNQGKDKSETQGTLKRFLRRAQNEFELKRKNRTLIDMARTMLGEFKTPECFWSEAVNTACHAINRVYLHRLLKKTSYELLTGNKPNVSYFRVFGSKCYILVKKGRNSKFAPKVVEGFLLGYDSNTKAYRVFNKSSGLVEASSDVVFDETNGSPREQVVDLDDVDEEDVPTAAIRTMEIGEVRPREQNERDQPSSSTMVHPPTQDDEQVHQQEACDQGGAQDDHVMEEEAQPAPPTQVRAMIQRNHPVDQILGDISKGVTTRSRLVNFCEHYSFVSSIEPFRVEEALLDPDWVLAMQEELNNFKRNEVWTLVPRPKQNVVGTKWVFRNKQDEHGVVTRNKARLVAKGYAQVAGLDFEETFAPVARLESIRILLAYAAHHSFRLYQMDVESAFLNGPIKEEVYVEQPPGFEDERYPDHVCKLSKALYGLKQAPRAWYECLRDFLIANAFKVGKADPTLFTKTCNGDLFVCQIYVDDIIFGSTNKKSCEEFSRVMTQKFEMSMMGELNYFLGFQVKQLKDGTFISQTKYTQDLLKRFGMKDAKPAKTPMGTDGHTDLNKGGKSVDQKAYRSMIGSLLYLCASRPDIMLSVCMCARFQSDPKECHLVAVKRILRYLVATPYFGLWYPKGSTFDLIGYLDSDYAGCKAEYVAAGQCCAQLLWMRQTLRDFGYNLSKVPLLCDNESAIRMAENPVEHSRTKHIDIRHHFLRDHQQKGDIEVFHVSSENQLADIFTKPLDEKTFCRLRSELNVAPKILF

SEQ ID NO: 10274 - protein, 671 aa, Zea mays
  Clone ID: TF_ZM5054.C3.o1.fg.pep
MDPKGKGIVINDKEKESFVNEPRDDKSNDSGSGHKRKDGKKKKTRRIKEIVYYDSDESSSSQKDDDHDKQKTVNSNFSFDYSRIPYSSNAHLLPIPLGKPPHFDGENYGFWSHKMRTHLFSLHPSIWEIVESGMKFDSSDSPSFINEQIHKNAQATTVLLASLCRDEYNKVSGLDNAKQIWDTLKISHEGNDVTLLTKTELVEGELGRFAMIRGEEPTQTYNRLKTLINKIRSYGSTRWTDHDVVRLMLRSFTVLDPHLVNNIRENPRYTKMSPEEVLGKFVSGRMMIKEARYVDDALNGPINEPQPFALKATRNKEALPSKVAQIEAAGLNDEEMALIIKRFKTVLKGRNGQPSKTKTKGKRSCFKCGKLGHFIANCPDNESDQEKGNKREKKKHYKKAKGEAHIGKEWDSDCSSSDSDNEGLAATAFNKSALFPNERHTCLMAKEKKVSTRNSTYASSSGDDSSDDDEIDYSSLFKGLDRITIGKINELIDALNEKDKLLEKQEDLLYEEHDKFLEAQKSHALEVKRNEMLTCELSSCHETISKLKSINDELNAKIEIASKSTTCVENVVICNRCKDFDIDACSEHIASIAKLNNEVASLNAQLKTSKSEFDKLKFARDAYTIGRHPSIKDGLGFKREAKNLTTHKTPISTKEKGKAPMANSVKKNHAF

SEQ ID NO: 10275 - protein, 369 aa, Zea mays
  Clone ID: TF_ZM5059.C8.o5.fg.pep
MDPKGKGIVINDKEKESFVNEPKDDKPTDSGSGNRRKEGKKKKTRRIKEIVYYDDNDESTSSQKDDDHNDYERGKPEARYVDDALNGPINEPQPLALKATRSKEALPSKVAQFEAAGLNDEEMALIIKRFKTALKGHKGQPSKTKTKGKRSCFKCGKLGHFIANCPDNDSDQEKGNKREKKKNYKKAKGEAHIGKEWDSDCSSSDSDNEGLAATAFNKSSLFPNEHHTCLMAKEKKGRRRCSPPTSKMRIPMIQLYSVMGTKARISLKPKGPSNASSGELKMKVKKIRSDNRSEFKNLQVEEFLEEEGIKHEFSAPYTPQQNGVVERKNRTLIDMARTMLGEFKTPECFWSEAVNTACHAINRVVGDHN

SEQ ID NO: 10276 - protein, 611 aa, Zea mays
  Clone ID: TF_ZM5066.C9.o1.fg.pep
MDPKGKGMVVDNNEKESIFNEPKNDKSTDLGSSHKRKDGKKKKKTRRIKEIVYYDSDESSSSQKDDDNDYRKTVNSNFSFDYSRIPHSSNSHLLSIPLGKPPHFDGEDYGFWSHKMRRHLFSLHPSIWEIVENGMKFDSSDSPMFINEQIHKNAQATTVLLASLCRDEYNKVSGLDNAKQIWDTLKISHEGNDVTLLTKTELVEAELGRFAMIRGEEPTQTYNRLKTLINKIRSYGSTRWTDHDVVRLMLRSFTILDPHLVNNIRENPRYTKMSPEEVLGKFVSGRMMIKEARYVDDALNGPINEPQPLALKATRSKEALPSKVAQIEAAGLNDEEMALIIKRFKTSLKGRKGQSSKTKAKGKRSCFKCGKLGHFIANCPDNDSDQDEGNKREKKKHYKKAKGEAHIGKEWDSDCSSSDSDHEGLAATAFNKSSLFPNERHTCLMAREKKVSTRDSTYASSSDNESSDDDDIDYSCLFKGLDRSKIDKINELIDALNEKDKLLEKQEDLLYEEHDKFVEAQRSHALEVKRNEMLSCELSSCHETISKLRSINDDMNAKLEIANKSNSCVEHVMSCTRCKDFDIDACSEHLVSISKLKDELASLNAQLKTSK

SEQ ID NO: 10277 - protein, 1497 aa, Zea mays
  Clone ID: TF_ZmC119_1202.pep
MNPPNPPPGGVDPLVAAQMAVMQQMADTMADMRAQMQQERQEMRQEREDIRQELRQERDEIRQERRAQQQQLQQQMQQQQQQQQVPLPPPPPPVPPRDKHREFMSHKPPTFASSPDPLDADDWLKSIEKMLNIAQCTDREKVLYASGRLTGPAADWWDSYTAAHDAADTITWAEFSTQFRNYHIPAGMIKIKKKEFLSLKQGNMSVSEYRDKFIQLSRYAPEEVAEDERKQEHFIEGLNGPLQYALVAHTFPSFQRLLDKALAIEHKRIQLGDLKRKAISQGQGSSSVRPRYSSPQGTPTRPGGPRPVQQSPLRTPPPRQATPTGTPTKFAGQSPGTQCFKCGKTGHYANVCPQRIATTPAQNKQQTPGKGYSIARVNQVSIDDTPDGGDLVIGMFYVNAIPATILFDSGATHSFMSARYANTNEIPLLNMRKPMIVITPKGPVEANQMTRRLTLTIMGREFGATAIILESSSIDLILGMSWLRKAKAVIACGRGTVELTTTKGERFQVNIAVTSSSMRAMFFMPEEFVGDNIRVVRDFPDVFPEELPGMPPEREVEFVIDLLPGTAPISKRPYRMSVEELKELKKQLTELQEAGYIRPSSSPWGAPVLFVQKKDGSQRMCVDYRSLNDVTVKNKYPLPRIEDLFDQMRGARVFSKIDLRSGYHQMKIRPSDIPKTAFSTRYGLYEFTVMSFGLTNAPAYFMNLMNKVFMEYLDRFVVVFIDDILIYSKNESDHEQHLRLVLQKLRDNQLYAKFSKCEFWIDRVPFLGHIISNGGIAVDPAKVKEIMEWRVPTTVTEIRSFLGLAGYYRRFIEGFSKIAKPMTSLLEKGREFKWDEKCQESFDQLKERLMSPPVLIMPDLQKGFDIYCDACGQGLGCVLMQDGHVIAYASRQLRKHELNYPTHDLELAAVVHALKIWRHYIMGTKCQVYTDHKSLKYIFTQKDLNLRQRRWLELIKDYDLEIHYHPGKANLVADALSRKEHVHSAFVAQLPDELAKDFERLNLGIVTHTEGVTIKLEPTLEQEIRKGQIGDAKIQEIKDLITEGRGPEFTEDEQGTIWFKNRICVPDIESLRETILKEAHDSVYSIHPGSTKMYQDLKQKYWWYGLKRDVAAHVAMCDVCQRVKAEHQRPAGLLHPLKIPEWKWEEIGMDFIVGLPRTPAGYDSIWVIVDRLTKVAHFIPVRTNYTGAKLAELYMTRIVCLHGVPKKIVSDRGSQFTSRFWKKLHESLDTKLNFSSAYHPQTDGQTERTNQVLEDMLRACALKHGGSWEKSLPYAEFSYNNSYQASLKMSPFEALYGRRCRTPLYWDQTGERQFFGPELIQEAEEQVRMIRENLRIAQSRQKSYADNRRRLLEFKEGDQVYLKVSPLRGMRRFKVKGKLSPRFIGPFLILKRVGEVAYQLELPDHLADVHDVFHVSQLKKCLRVPEEQLPTEDLNVQDDLTYAEYPIKILDTLTRVTRNKVIKMCKVQWSHHSEDEATWEREEELRIDFPHLFPRSP

SEQ ID NO: 10278 - protein, 1494 aa, Zea mays
  Clone ID: TF_ZmC119_1226.pep
MDPPNPPPGGVDPLVAAQMAVMQQMADTMADMRAQMQQERQEMRQEREDIRQELRQERDEIRQERRAQQQQQQQQQQQQVPLPPPPPPVPPRDKHREFMSHKPPTFASSPDPLDADDWLKSVEKMLNIAQCTDREKVLYASGRLTGPAADWWDSYTAAHDAADTITWAEFSTQFRNYHIPAGMIKIKKKEFLSLKQGGMSVSEYRDKFIQLSRYAPEEVAEDERKQEHFIEGLNGPLQYALVAHTFPSFQRLLDKALAIEHKRVQLGDLKRKAISQAQGSSIVRPRYSSPQGTPTRPGGPRPVPQSPLRTPPPRQATPTGTPTKFAGQSPGTQCFKCGKMGHYANVCPQRIATTPVQNKQQTPGTGKGYSIAKVNQVSVDATPDGGDLVLGMFYVNAIPATILFDSGATHSFMSARYANTNEIPLLNMRKPLIVITPKGPVEANQMTRRLTLTIMGREFGATAIILESSSIDLILGMSWLRKAKAVIACGRGTVELTTTKGERFQVNIAVTSSSMRAMFFMPEEFVGDNIRVVRDFPDVFPEELPGMPPDREVEFVIDLLPGTAPISKRPYRMSVEELKELKKQLTELQEAGYIRPSSSPWGAPVLFVQKKDGSQRMCVDYRSLNDVTVKNKYPLPRIEDLFDQMRGARVFSKIDLRSGYHQMRIRPSDIPKTAFSTRYGLYEFTVMSFGLTNAPAYFMNLMNKVFMEYLDRFVVVFIDDILIYSQSESDHEEHLRMVLQKLRDNQLYAKFSKCEFWIGEVPFLGHIISNGGIAVDPAKVKEIMEWRVPTTVTEIRSFLGLAGYYRRFIEGFSKIAKPMTSLLEKGKEFKWDEKCQDSFDLLKKRLMSPPVLVMPDLQKGFDIYCDACGQGLGCVLMQEGHVIAYASRQLRKHELNYPTHDLELAAVVHALKIWRHYIMGTKCQVYTDHKSLKYIFTQKDLNLRQRRWLELIKDYDLEIHYHPGKANLVADALSRKEHVHSAIVAQLPDEIVEDFRRLNLGIVAHTEGVTIDVEPTLEQEIRKGQIGDAKIKEIKDLITEGRVPEFTEDEQGTVWFKDRMCVPDIKSLRETILKEAHDSDYSIHPGSTKMYQDLKRKYWWYGLKRDVAAHVAMCDVCQRVKAEHQRPAGLLHPLKIPEWKWEEIGMDFITGLPRTQKGYDAIWVIVDRLTKVAHFIPVKTTYKGSQLAELYMARIVCLHGVPKKIVSDRGSQFTSRFWRSFHENMSTKLNFSTAYHPQTDGQTERTNQVLEDMLRACALQHGGSWDKSLPYAEFSYNNSYQASLKMSPFEALYGRKCRTPLYWDQTGERQFFGPELIQEAEEQVRIIRENLRVAQTRQKSYADNRRRPLEFEEGDYVYLKVSPLRGMRRFKVKGKLSPRYIGPFLIFRRVGEMAYQLELPDSLSDVHNVFHVSQLKKCLRVPEEQLPLEELSVQGDLTYTEYPIKILDTLTRVTRNKVIKMCKVQWSHHSEDEATWEREEELRIDFPHLFSSSS

SEQ ID NO: 10279 - protein, 934 aa, Zea mays
  Clone ID: TF_ZmC10872_3.pep
MSGELAKKEMETGNKPATSHGKASSGESRNKEKKREKKKEKKTSSHKSHRSGDKIKKMRKVVYYETDTSSPSTFGSDAPSITSKRHERKKFSKIPLHYPHTSRHTPLLSVPLGKPPTFDGEDYARWSDLMKFHLTSLHKSIWNVVEFGAQEPSVGDEDYDEDEVAQIEHFNSQATTILLASLSREEYNKVQGLKNAKEVWDVLKTAHEGDELTKITKRETIEGELGRFRLRQGEEPQDMYNRLKTLVNQVRNLGSKKWDDHEVVKVILRSLIFLNPTQVQLIRGNPRYTLMTPEEVIENFVSFEFMIKGSRKINELDGPSMSEAQPVAFKATEEKKEESTSSRTPIDASKLDNEEMVLVIKSFHQILKQRRGKDYKPRSKKVCYKCGKPGHFIAKCPISSDSDRGDDKKGRRKEKKRYYKKKGGDTHVCREWDSDESSSDSSSDEDAANIAVTKGLLFPNVGHKCLMAKDGKKKKVKSKSSTRYESSSDENASDEEDNLRTLFANLNMQQKEKLNELISAIHEKDDLLDSQEDFLIKENKKHVKVKNTYALEVEKCEKLSSELSTCHETIDNLRNENSNLLAKVDSIACNVSIPNLRNDNDDLLAKIEELNISFVSLRKENEKLIAKAKDFDVCNVTISDLRDKNDILRAKIVELNSCKPSTSIVEHTTICTTCRDVNIDAIHDHMALIKQQNDHIAKLDAKIAEHDLENEKFKFARSMLYRGRRPGIKDGIGFQQGGNVKLNAPPKKLSNFVKGKAPMPQDNEGYILYPVGYPEDKIRKIHSRKSHSGPNHAFMYKGETSSSRQPTRAKLPKKKIPNASNEHSFSFKTFDASYVLTNKSGKVYASGGSSWIIDSGCTNHMIGEKKMFSSYEKNQDPQRAITFGDGNQGLVKGLGKIAISPGHWMLPNTLPTKLMQHKKWNRERKYCKIWQHLP

SEQ ID NO: 10280 - protein, 1029 aa, Zea mays
  Clone ID: TF_ZmC119_1222.pep
MPPRTRLTARKSTGPIGVPRHQLAPRHESSSSGSNDPIGDLEARVSRLQAALQQRTDAWVADGDRINELRRDIRHLQDQLADRDLALDWAVQSRLLMCAKEARAQARIKELSSTVDDLQVYCNTLHEEVHVLYSQLHPSEPAPPAEAEAGPSHVAGRALGGELDLFEPPPSLRTRAQDASGTSGGRDVTPNPPPVPPTLAEAIATLVNATADNTRFLRVMAGQQQLQQQAGRGFQQGPRETTYLDFSETRPPLFIKAEDPLEADEWIRVIEQKFGLLRCSEVQKPLFAAQQLRGPASTWWGNFVAIQPDNHQITWNEFKAAFREHYIPEGVLHMKQEEFMKLKQGGDTVNQYLNKFNHLSQYAIDQVNTDLKKKNCFMRGLNDRMQRKMAACIDLTYGKAVSTALSVEAKYGNSGKTKGFGGERPNQGQAKKPRFVIRPSTQNRPFSRPPSFPFKQPIIIRPNNAPTTPKQPGAPGTRFPALPSSSTGCFNCGKSGHFIKDCPYPRQNQSNASQGSGNSAPGKGSTSGKNTKKTGRVYYMQVATTPEGEPVMMGTFPVASHPAIILFDSGASHTFISKKFVEQHHIAYHESKEGFKIHSPGGHIYTKEVAYGVPVTMAGRNFPANMIVLKGQDIDVILGMNWLTQHKAILNTEFRTVRLSYNQEEILLTLPATNPAKTSGRVYEAIVPEIKNIPVVCEFLDVFPEDLPGLPRERDVEFVIELKPELKIQLQDLLNKGFIRPSSSPWGCPAIFVKKKDQTLRMCVDYRPLNEVTIKNKYPLPRIDILFDQLTGARVFSKIDLRSGYHQIRIRPEDIPKTAFTTRYGLFEYLVMSFGLTNAPAHFTYLMNSVFMPELDKFVVVFIDDILIYSKNEEDHAQHLRIVLTRLREHQLYAKFSKCAFWLEEIQFLGHVLSAKGIAVDPIKVKDILEWKPPTTVHQVRSFLGLAGYYRRFIPDFSKLVKPITSLLKNHTKFNWSSRCNEAFEQLKVLLTSAPILAQPDIEKPFDVYCDASGSSLGYVLMQEGVDLL

SEQ ID NO: 10281 - protein, 1610 aa, Zea mays
  Clone ID: TF_ZmC119_1413.pep
MPPRTRLTARKSTGPIGVPRHQLAPQHESSSSGSNDPIGDLEARVSRLQAALQHRTDAWVADGDRINELRRDIRHLQDQLADRDLALDWAVQSRLLMCAKEARAQARVKELSSTVDNLQVYCNTLHEEVHILYSQLHPSEPAPPAEAQAGPSHVAGRALGGELDLFEPPPSLSNVKWKVFSGTLCLFQMFLPQMPTRTRGQDAAGTSGGRDVTPNPPPVPPTLAEAIAALVNATADNTRFLREMAGQQQLQQQAGRGFQQGPRETTYLDFSETRPPLFVKAEDPLEADEWIRVIEQKFGLLRCSEVQKPLFAAQQLRGPASTWWGNFVAIQPDNHQITWNEFKAAFREHYIPEGVLHMKQEEFMKLKQGGDTVNQYLNKFNHLSQYAIDQVNTDLKKRNCFMRGLNDRMQRKMAACIDLTYGKAVSTALSVEAKYANSGKTKGFSGDRPNQGQAKKPRFVIRPSNQNRPFSRPPSFPFKQPIIIRPNNAPTTPKQSGAPGTRFPALPSSSTGCFNCGKSGHFIKDCPYPRQNQTNNQQGSGNSAPGKGSTSGKNTRKTGRVYYTQVATTPEGEPVMMGTFPVASHPAIILFDSGASHTFISKTFVEQHHIACHESKEGFKIHSPGGHIYTKEVAYGVPVTMAGRNFPANMIVLKGQDIDVILGMNWLTQYKAILNTEFRTVRLSYNQEEILLTLPATNPAKASGRVYEAMVPEIKNIPVVCEFPDVFPEDLPGLPPERDVEFVIELKPGTAPISRRSYRMPPNELAELKIQLQDLLNKGFIRPSSSPWGCPAIFVKKKDQTLRMCVDYRPLNEVTIKNKYPLPRIDILFDQLTGARVFSKIDLRSGYHQIRIRPEDIPKTAFTTRYGLFEYLVMSFGLTNAPAHFTYLMNSVFMPELDKFVVVFIDDILIYSKNEEDHAQHLRIVLTRLREHQLYAKFSKCAFWLEEIQFLGHVLSAKGIAVDPSKVKDILEWKPPTTVHQVRSFLGLAGYYRRFISDFSKLVKPITSLLKNDTKFNWSSKCNEAFEQLKTLLTTAPVLAQPDITKPFDVYCDASGSGLGCVLMQEGRVIAYASRQLRRHEEHYPTHDLELAAVVHALKIWRHYLLGNICHIYTDHKSLKYIFTQSELNMRQRRWLELIKDYELEIHYHPGKANVVADALSRKTSCHCLMAKIFENTLCQEMEKLNLGIIQQGTLNQLRLESIILQRIIDAQKDNLGMKHIREKIRAGTAKCFKEDDQGVIWFKNRIVVPKNEELRQQILDEAHLSRYSIHPGSTKMYQDLKQHYWWTKMKIEIARYVAKCDTCRRVKAIHMKTAGPLQSLSIPTWKWEDISMDFIVGLPRTAKGYDSIWVIVDRLTKIAHFLPVKTDHPVVVYAQLYIACILSLHGVPKTIVSVRGPQFVSKFWSELQKFLGTKLLHSSAYHPQTSGQTERVNQILEDMLQACVLEFPQKWDECLPLAEFSYNNSYQESIKMAPFEALYGRRCRTPLNWSEPEERWFFRPNMVKETKEKVQRIIHNLKEAQARQKNYADKRRQPLVFQVNDHVYLKVSPMKGVNRFGVKGKLAPEYIGLFLILERYRLVAYRLQLPETLSTVHNVFHVSQLKKCLRVPD

SEQ ID NO: 10282 - protein, 430 aa, Zea mays
  Clone ID: TF_ZmC119_1839.pep
GQNKITRNGRGAVARVECTLRGKRLDGGVSVLSVRKRQIFVASVQRWYPKTSTKTRAAEGRPPIKNFLLSIWGGVFASHGSSSGSNDPIGDLEAQVDQLRAELRHRNDLWVADGERTNELRTEIHHLQDQLVDQDLALDWAVNSRSPAWAKEARARACVEELSSAVDNLQPAGHQITWDEFKLAFREHYIPEGVLHMKQEEFMKLKQGGDTVTQYLNKFNHLYQYAIDQVNTDIKKRNCFMRGLNDRMQRKMATCIDLTYGRAVSTALAVEAKYAGSGKSKGIGGDRPNQGPEKRQKLVIQPFNPNCSSLHPPSFPFKQPVFIRPTAAPTSTNQSGAPGTRFPALPSSSTGCFNCGKSGHFIKDCPYPRQNQSNNQQSSGSSKGNAATNTAAKNTRKTRRIYYTQVATTPEGEPVMMGTFLRAPRGGVNR

SEQ ID NO: 10283 - protein, 1658 aa, Zea mays
  Clone ID: TF_ZmC119_769.pep
MPPRTRLTARKSTGPIGVPRHQLAPRHESSSSGSNDPIGDLEARVSRLQAALQHRTDAWVADGDRINELRRDIRHLQDQLADRDLALDWAVQSRLLMCAKEARAQARVKELSSTVDNLQVYCNTLHEEVHILYSQLHPSEPAPPAEAEAGPSHVAGRALGGELDLFEPPPSLRTRAQDAAGTSGGRDVTPNPPPVPPTLAEAIAALVNATADNTRFLREMAGQQQLHQQAGRGFQQGPRETTYLDFSETRPPLFIKAEDPLEADEWIRVIEQKFGLLRCSEVQKPLFAAQQLRGPASTWWGNFVAIQPDNHQITWNEFKAAFHEHYIPEGVLHMKQEEFMKLKQGGDTVNQYLNKFNHLSQYAIDQVNTDLKKKNCFMRGLNDRMQRKMAACIDLTYGKAVSTALSVEAKYANSGKTKGFGGERPNQGQAKKPRFVIRPSNQNRPFSRPPSFPFKQPIIIRPNNTPTTPKQPGAPGTRFPALPSSSTGCFNCGKSGHFIKDCPYPRQNQSNASQGSGNSAPGKGSTSGKNTKKTGRVYYTQVATTPEGEPVMMGTFPVASHPAIILFDSGASHTFISKKFVEQHHIAYHESKEGFKIHSPGGHIFTKEVAYGVPVIMAGRNFPANMIVLKGQDIDVILGMNWLTQYKAILNTEFRTVRLSYNQEEILLTLPATNPAKTSGRVYEAIVPEIKNIPVVCEFPDVFPEDLPGLPPERDVEFVIELKPGTAPISRRSYRMPPNELAELKTQLQDLLNKGFIRPSSSPWGCPAIFVKKKDQTLRMCVDYRPLNEVTIKNKYPLPRIDILFDQLTGARVFSKIDLRSGYHQIRIRPEDIPKTAFTTRYGLFEYLVMSFGLTNAPAHFTYLMNSVFMPELDKFVVVFIDDILIYSKNEEDHAQHLRIVLTRLREHQLYAKFSKCAFWLEEIQFLGHVLSAKGIAVDPSKVKDILEWKPPTTVHQVRSFLGLAGYYRRFIPDFSKLVKPITSLLKNDTKFNWSSKCNEAFEQLKTLLTTAPVLAQPDITKPFDVYCDASGSGLGCVLMQEGRVIAYASRQLRRHEEHYPTHDLELAAVVHALKIWRHYLLGNICHIYTDHKSLKYIFTQSELNMRQRRWLELIKDYELEIHYHPGKANVVADALSRKVACHCLMAKTSENTLCQEMEKLNLGIIQQGTLNQLRLESIILQRIIDAQKDNLGMKHIREKIRAGTAKCFKEDDQGVIWFKNRIVVPKNEELRQQILDEAHLSRYSIHPGSTKMYQDLKQHYWWTKMKIEIARYVAKCDTCRRVKAIHMKTAGPLQSLSIPTWKWEDISMDFIVGLPRTAKGYDSIWVIVDRLTKIAHFLPVKTNSPVTVYAQLYIARILSLHGVPKTIVSDRGPQFVAKFWEALHNSLGTKLLHSSAYHPQTSGQTERVNQILEDMLRACVLDFSPKWDECLPLAEFSYNNSYQESIKMAPFEALYGRRCRTPLNWSEPGERYFFRPDMVKEVEEKVQRIIHNMKKAQARQKSYADKRRMPLYFLEGDYVYLKVSPMKGVSRFGVKGKLAPRYIGPFLILERYGPVAYRLQLPETLSAVHNVFHVSQLKKCLRVPDRTVEVTDVVLEPDLTYSEHPLRVLDQKDRVTRRKTLKFYKIQWNQHSEDEATWETQDFLDKNFPGFLASCKL

SEQ ID NO: 10284 - protein, 1696 aa, Zea mays
  Clone ID: TF_ZmC119_785.pep
MLRILLITFSSLEKMPPRTRLTARKSTGPIGVPRHQLAPRHESSSSGSNDPIGDLEARVSRLQAALQHRTDAWVADGDRINELRRDIRHLQDQLADRDLALDWAVQSRLLMCAKEARAQARVNELSSTVDNLQVYCNTLHEEVHILYSQLHPSEPAPPAEAEAGPSHVAGRALGGELDLFEPPPSLSNVKWKVFSGTLCLLQMILPQMPTRTRGQDAAGTSGGRDVTPNPPPVPPTLAEAIAALVNATADNTRFLREMAGQQQLQQQAGRGFQQGPRETTYLDFSETRPPLFIKAEDPLEADEWIRVIEQKFGLLRCSEVQKPLFAAQQLRGPASTWWGNFVAIQPDNHQITWNEFKAAFREHYIPEGVLHMKQEEFMKLKQGGDTVNQYLNKFNHLSQYAIDQVNTDLKKKNCFMRGLNDRMQRKMAACIDLTYGKAVSTALSVEAKYANSGKTKGFGGERPNQGQAKKPRFVIRPSTQNRPFSRPPSFPFKQPIIIRPNNAPTTPKQPGAPGTRFPALPSSSTGCFNCGKSGHFIKDCPYPRQNQSNASQGSGNSAPGKGSTSGKNTKKTGRVYYTQVATTPEGEPVMMGTFPVASHPAIILFDSGASHTFISKKFVEQHHIAYHESKEGFKIHSPGGHIYTKEVAYGVPVTMVGQNFPANMIVLKGQDIDVILGMNWLTQYKAILNTELRTVRLSYNQEEIFLTLPATNPAKASGRVYEAIVPEIKNIPVVCEFPDVFPEDLPGLPPEREVEFVIELKPGTAPISRRSYRMPPNELAELKIQLQDLLNKGFIRPSSSPWGCPAIFVKKKDQTLRMCVDYRPLNEVTIKNKYPLPRIDILFDQLTGERVFSKIDLRSGYHQIRIRPEDIPKTAFTTRYGLFEYLVMSFGLTNAPAHFTYLMNSVFMPELDKFVVVFIDDILIYSKNEEDHAQHLRIVLTRLREHQLYAKFSKCAFWLEEIQFLGHVLSAKGIAVDPSKVKDILEWKPPTTVHQVRSFLGLAGYYRRFIPDFSKLVKPITSLLKNDIKFNWSSKCNEAFEQLKTLLTTAPVLAQPDITKPFDVYCDASGSGLGCVLMQEGRVIAYASRQLRRHEEHYPTHDLELAAVVHALKIWRHYLLGNICHIYTDHKSLKYIFTQSELNMRQRRWLELIKDYELEIHYHPGKANVVADALSRKTSCHCLMAKIFENTLCQEMEKLNLGIIQQGTLNQLRLESIILQRIIDAQKDNLGMKHIREKIRAGTAKCFKEDDQGVIWFKNRIVVPKNEELRQQILDEAHLSRYSIHPGSTKMYQDLKQHYWWTKMKIEIARYVAKCDTCRRVKAIHMKTAGPLQSLSIPTWKWEDISMDFIVGLPRTAKGYDSIWVIVDRLTKIAHFLPVKTNSPVTVYAQLYIARILSLHGVPKTIVSDRGPQFVSKFWEELHKSLGTKLLHSSAYHPQTSGQTERVNQILEDMLRACVLDFSLKWDECLPLAEFSYNNSYQESIKMAPFEALYGRRCRTPLNWSEPGERYFFRPDMVKEVEEKVQRIIHNMKKAQARQKSYADKRRMPLYFLEGDYVYLKVSPMKGVSRFGVKGKLAPRYIGPFLILERYGLVAYRLQLPETLSAVHNVFHVSQLKKCLRVPDRTVEVTDVVLEPDLTYSEHPIRVLDQKDRVTRRKTLKFYKIQWNQHSEDEATWETQDFLNKNFPGFLASCKL

SEQ ID NO: 10285 - protein, 553 aa, Zea mays
  Clone ID: TF_ZmC119_832.pep
MPPRTRLTARKSTGPIGVPRHQLAPRHESSSSGSNDPIGDLEARVSRLQAALQHRTDAWVADGDRINELRRDIRHLQDQLADRDLALDWAVQSRLLMCAKEARAQARVKELSSTVDNLQVYCNTLHEEVHILYSQLHPSELAPPAEAEAGPSHVAGRALGGELDLFEPPPSLRTRAQDAAGTSGGRDVTPNPPPVPPTLAEAIAALVNATADNTRFLREMAGQQQLQQQAGRGFQQGPCETTYLDFSETRPPLFIKAEDPLEADEWIRVIEQKFGLLRCSEVQKPLFAAQQLRGPASTWWGNFVAIQPDNHQITWNEFKAAFREHYIPEGVLHMKQEEFMKLKQGGDTVNQYLNKFNHLSQYAIDQVNTDLKKKNCFMRGLNDRMQRKMAACIDLTYGKAVSTALSVEAKYANSGKTKGFGGERPNQGQAKKPRFVIRPSNQNRPFSRPPSFPFKQPIIIRPNNAPTTPKQPGAPGTRFPALPSSSTGCFNCGKSGHFIKDCPYPRQNQSNASQGSGNSAPGKGSTSGKNTKKTGRVYYTQVATTPEGEPVMM

SEQ ID NO: 10286 - protein, 904 aa, Zea mays
  unsure (1)..(904): unsure at all Xaa locations
  Clone ID: TF_ZmC3310_2.pep
VPSIGDEDYDEDKVAQIEHFNSQATTILLASLSREEYNKVQGLKSAKEVWDVLKTAHEGDELTKITKRETIEGELGHFRLRQGEEPQDMYNRLKTLVNQVRNLGSKKWDDHEVVKVILRSLIFLNLTQVQLIRGNPRYTLMTHEEVIGNFVSFEFMIKGSRKINELDGPSTSEAQSVAFKATEEKKEESTPSRTPIDASKLDNEEMALVIKSFRQILKQRRGKDYKPRSKKVCYKCGKPGHFIAKCPISSDRGDDKKGRRKEKKKYYKKKGGNAHVCREWDSDESSSDSFDDEDAANIAITKGLLFPNVGHKCLMAKDGKKKKVKSKSSTRYESSSDNNASDEEDNLRTLFANLNMQQKEKLNELISAIHEKDDLLDSQEDFLIKENKKHVKVKNAYSLEVEKCEKLSRKCALGSFLSILVIECQHKCLNVNLCPWMNKVQIKSKGALTIPNLRNDNDNLIAKIEELNITLASLRNENEKLLAKAKELDVCNATISDLRSKNDMLHAKVEELNVYKPSTSIVSHVSICTRCRDVNIDAIHDHIAMIKQQKDHIAKLDAKIAEHELENEKFKFARSMLYSGRRPGIKDVIGFQQGGNVKLNAPKRLSNFVKGKAPMPQDNEGYILYPAGYPEDKIRRIHAKKTHPISHHAFIYKNEASSSRRSTHVKMPKKKSPIASNNHNISFKTFDASYVLTNKXGKVVAKYVGGKHKGSKTCVWVPKVLVSNAKGPKTIWVYASGGSSWIIDSGCTNHMTGEKKMFSSYEKNEDPQRAITFGDGNQSLEGLDKIAISPDHSISNVFLVDSLDYNLLSVSQLCQMGYNCLFTDVGVTVFRRSDDSIAFKGVLEGQLYLVDFDRAKLDTCLIAKTSPCWLWHRRLVHVGMKNLHKLLKGEHILGLTNVHFEKDR

SEQ ID NO: 10287 - protein, 549 aa, Zea mays
  unsure (1)..(549): unsure at all Xaa locations
  Clone ID: TF_ZmC7465_22.pep
MSGDHAKKEMETGEKPTTSHGSTSSEESRTKRKEKKDSSKRKEKKSSSSHHKEKKEKSSSHKPHRKGDKHKRMRKVVYYETDTSSTSTSDSDAPSVTSKRQERKKYRDENYDEDEVAQIEHFNSQATTILLASLSREEYNKVQGLKNAKEIWDLLKTAHEGDELTKITKRETIEGELGRFRLRKGEEPQHMYNRLKTLVNQVRNLGSVKWDDHEVVKVILRSLIFLNPTQVQLIRGNPRYTKMTPEEVIGNFVSFECMIEGSRKINELDDATTSEAQPVAFKATEEKKEESTPSRQPIDASKLDNEEMALVIKSFRQILKQRRGKDYKSRSKKVCYKCGKPGHFIAKCPISSDSDRGDDKKGRRKEKKRYYKKKGGDAHICREWDSDESSSDSSDDEDAANIAVTKGLLFPNVGHKCLMAKDGKRKKXESSTDSSSDEDAANIAVTKGLLFPNVGHKCLMAKDGKRKKVKSRSSTKYETSSDEDDASNEEDNLRVLFANLNMEQKEKLNELISAIHEKDDLLDSQEDFLIKENKKHVKVKNAYALESTC

SEQ ID NO: 10288 - protein, 342 aa, Zea mays
  Clone ID: TF_ZmC7465_26.pep
METGDKPTTSHGSTSSEESRTKRKEKKKSSSNKGKEKKSSSHHKEKKEKSSSHKPHRSGDKHKRMRKVVYYETDTSSTSTSGSDAPSVTSKRQERDEDYDTDEVAQIEHFNSQATTILLASLSKEEYNKVQGLKNAKEIWDLLKTAHEGDELTKITKRETIEGELGRFRLRQGEEPQDMYNRLKTLVNQERNLGSKKWDDHEVVKVILRALIFLNPTQVQLIRGNPRYPLMTPEEVIENFVSFECMIKGSKKINELDEPSTSEAQPVAFKATEEKKEESTPSRQPIDASKLDNEEMALIIKSFRQILKQRRGKDYKPRSKKVCYKCGKPGHFIAKCPISSDS

SEQ ID NO: 10289 - protein, 896 aa, Zea mays
  Clone ID: TF_ZmC951_305.pep
MSGDHTKREMETGDKPTTSQGSTSSEESRTKRKEKKKDSSKRKEKRSSSSRHKEKKEKSSSHKSHRKGDKHKRMRKVVYYETDTSSTSTSDSDAPSVTSKRQERKKFSKIPSHYSRTSRHTPLLSVPLGKPPTFDGEDYARWSDLMKFHLTSLHKSIWNVVEFGAQVPSIGDEDYDTDEVAQIEHINSQATTILLASLSKEEYNKVQGLKNAKEIWDLLKTAHEGDELTKITKRETIEGELGRFRLRQGEEPQGMYNRLKTLVNQVRNLGSKKWDDHEVVKVILRSLIFLNPTQVQLIRGNPRYTLMTPEEVIGNFVSFEYMIKGSKKINELDEPSTSEAQPVAFKATEEKKEESTPSRQPIDASKLDNEEMALIIKSFRQILKQRRGKDYKPRSKKVCYKCGKPGHFIAKCPISSDSDRGNDKKGKRREKKKYYKKKGGDAHVCREWDSDESSTESSSDEDAANIAVTKGLLFPNIGHKCLMAKDGKRKKVKSKSSTKYESSSDDNASDEENNLRTLFADLNMQQKEKLNELISAIHEKDDLLDSQEDFLIKENKKHVKVKNAYALEVEKCNKLSSKLSTCHDTIDNLRNENARLIAKVDSHVCDVSIPNLRNDNDDLLAKIKELNDSLDSLRVENENLIAKAKDFDVCNTTISDLRTKNDMLHAKVVELKSCKPSTSTVEHTSICTRCRDVDINAIHDHMTLIKQQNDHIALLDAKIAEHNLENEKFKFARSMLYNGRRPGIKDGIGFQRGDNVKLNAPPKNLSNFVKGKAPMPQDNEGYILYPAGYPESKIRRTHSRKSHSGPNHAFMYKGETSSSRQPTRAKLPKKKTPNASNDHSISFKTFDASYVLTDKSGKVVAKFVGGKHKGSKTCVWVPKVLVSNAKVWGIDIPWAH

SEQ ID NO: 10290 - protein, 1676 aa, Zea mays
  Clone ID: TF_ZmC951_312.pep
MSGDHAKKEMETGEKPTTSQGSTSSEESRTKRKEKKKISSNKGKEKKSSSHHKEKKEKSSSHKPHRSKDKQKRMRKVVYYETDTSSTSTSGSDAPSVTSKRQERKKFSKIPLHYPRISKHAPLLSVPLGKPPTFDGEDYARWSDLMRFHLTSLHKSIWDVVEFGAQVPSVGDKDYDEDEVAQIEHFNSQATTILLASLSREEYNKVQGLKSAKEVWDVLKTAHEGDELTKITKRETIEGELGRFRLRKGEEPQHMYNRLKTLVNQVRNLGSVKWDDHEMVKVILRSLIFLNPTQVQLIRGNPRYTKMTPEEVIGNFVSFECMIEGSRKINELDDPSTSEAQPVAFKATEEKKEEATPTRQPIDASKLDNEEMALVIKSFRQILKQRRGKDYKSRSKKVCYKCGKPGHFIAKCPISSDSDRGDDKKGRRKEKKRYYKKKGGDAHVCREWDSDESSSDSSDDEDAANIAVTKGLLFPNVGHKCLMAKDVKRKKVKSNSSTKYESSSDDNASDEEDNLRTLFANLNIEQKEKLNELISAIHEKDDLLDSQEDCLIKENKKHVKVKKAYALEVEKCEKLSCELSTCREMIDNLRNENASLNAKVDSHVCNVSIPNPRDNNDNLLARIEELNISLASLKVENEDLIAKAKELDVCNATISNLRDKNDILHAKIVELNSCKPSTSIVEHVSICTRCRDVDINAIYDHMALIKQQNDHIAKLDAKIAEHNLENEKFKFARSMLYNGRRPGIKDGIGFQRGDNVKISAPPKRLSNFVKGKAPMPQDNEGYILYPAGYPESKIRRIHSRKSHSGPNHAFMYKGETSSSRQPTHAKLPRKKTPIASNEHSISFKTFDASYVLTNKSGKVVAKYVGGKHKGSKTCVWVPKVLVSNAKGPKTIWVYASGGSSWILDSGCTNHMTGEKKMFSSYEKNQDPQRAITFGDGNQGLVKDYNLLSVSQLCQMGYNCLFTDIGVTVFRRSDDSIAFKGVLEGQLYLVDFDRAELDTCLIAKTNMGWLWHRRLAHVGMKNLHKLLKGEHILGLTNVHFEKDREKSQTQETLKGFLRRAQNEFGLRIKKIRSDNGTEFKNSQIEGFLEEEGIKHEFSSPYTPQQNGVVERKNRTLLDMARTMLDEYKTSDRFWAEAVNTACYAINRLYLHRILKKTSYELLTGKKPNISYFRVFGSKCFILVKRGRKSKFAPKTVEGFFLGYDSNTRAYRVFNKSTGLVEVSCDVVFDETNGSQVEQVDLDEIGEEEAPCIALRNMSIGDVCPKESEEPPNAQDQPSSSTQVSPPTQNEDEAQVDEVEDQANEPPQDNGNDQGGDANEEDKEEEEQRPPHPRVHQAIQRDHPVDTILGDIHKGVTTRSRVAHFCEHYSFVSSIEPHRVEEALQDSDWVVAMQEELNNFTRNEVWHLVPRPNQNVVGTKWVFRNKQDEHGVVTRNKARLVAKGYSQVEGLDFGETYAPVARLESIRILLAYATYHGFKLYQMDVKSAFLNGPIKEEVYVEQPPGFEDSEYPNHVYKLSKALYGLKQAPRAWYECLRDFLIANGFKVGKADPTLFTKTLENDLFVCQIYVDDIIFGSTNESTCEEFSRIMTQKFEMSMMGELKYFLGFQVKQLQEGTFISQTKYTQDILTKFGMKDAKPIKTPMGTNGHLDLDTGGEDSTSRALMVPFLAIHAKKGEK

SEQ ID NO: 10291 - protein, 1552 aa, Zea mays
  Clone ID: TF_ZmC951_325.pep
MSGDHAKKEMETGEKPTTSNEKALSGESRNKEKKKEKKKEKKTSSHKSHRSGDKIKKMRKVVYYETDTSSPSTSGSDAPSMTSKRHERKKFSKIPLHYPRTSKHTPLLSVSLGKPPTFDGEDYARWSDLMKFHLTSLHKSIWNVVEFGAQVPSIGDEDYDEDEVAQIEHFNSQATTILLTSLSREEYNKVQGLKSAKEVWDVLKTAHEGDELTKITKRETIEGELGRFRLRQGEEPQDMYNRLKTLVNQVRNLESKKWDDHEVVKVILRSLIFLNPTQVQLIRGNPRYTLMTPEEVIGNFVSFEFMIKGSRKINELDGPSTSEAQPVAFKATEEKKEEPTPSRTPIDASKLDNEEMALVIKSFRQILKQRRGKDYKPRSKKVCYKCGKPGHFIAKCPISSDRGDDKKGRRKEKKRYYKKKGGDAHVCREWDSDESSSDSSDDEDAANIAVTKGLLFPNVGHKCLMAKDGKKKKVKSKSSTRYESSSDENASDEEDNLRTLFVNLNIQQKEKLNELISAIHEKDDLLDSQEDFLIKENKKHVKIKNAYALEVEKCEKLSSELSTCHETIDNLRNENANLLAKVDSNVCDTSIPNLKNDNDDWLAKIEELNISLASLRIENEKLLAKAKDFDVCNATISDLRTKNDILHAKHTSICTRCRDVDVNVIHDHMTLIKQQNDHIAKLDARIAEHDLENEKFKFTRSMLYRGRRPGIKDGIGFQQGGNVKLNAPPKKLSNFVKGKTPMPQDNEGYILYPAGYPESKIRRIHSRKSHSGPNHAFIYKGETSSSRQPTHAKLPKKKTPSASNEHDISFKTLDASYVLTNKSGKVVAKYVGGKHKGSKTCVWVPKVLVSNAKGPKTIWVYASGGSSWIIDSRCTNHMTGEKKMFSSYEKNQDPQRAITFEDGNQGLVKGVTFFRRSDDSVAFKGVLEGQLYLVDFDRAELDTCLIAKTNMGWLWHRRLAHVGMKNLHKLLKGEHILGLTNVHFEKDRICSACQAGKQVGAHHPHKNIMTTDRPLELLHMDLFGPIAYISIDGSKYCLVIVDDYSRFTWVFFLQEKSHTQETLKGFLRRAQNEFGLRIKKIRSDNGTEFKNSQIEGFLEEEGIKHEFSSPYTPQQNGVVERKNRTLLDMARTMLDEYKTSDRFWAEAVNTACYAINRLYLHRILKKTSYELLTGKKPNISYFRVFGSKCFILVKRGRKSKFAPKTVEGFLLGYDSNTRAYRVFNKSSRQVEVSCDVVFDETNGSQVEQVDLDEIGIEEAPCIALRNMSIGDVCPKESEEPPNAQDQPSSSTQASPPTQNEDEAQVDKGEDQANEPPQDDDNDQGGDANDQDKEDEEPRPPHPRVHQAIQRDHPVDTILGDIHKGVTTRSRVAHFCEHYSFVSSIEPHRVEEALQDSDWVVAMQEELNNFTRNEVWHLVPRPNQNVVGTKWVFRNKQDEHGVVTRNKARLVAKGYSQVEGLDFSETYAPVARLESIQILLAYATYHGFKLYQMDVKSAFLNGPIKEEVYVEQPPGFEDSEYPNHVYKLSKALYELKQAPRAWYECDSRLEGGG

SEQ ID NO: 10292 - protein, 1622 aa, Zea mays
  unsure (1)..(1622): unsure at all Xaa locations
  Clone ID: TF_ZmC951_330.pep
MSGEHAKKEMETDDKPATSHGKASSEESRKKGKGKEKKASSHKSHRSGDKKKKMRKVVYYETDTSSPSTSGSDAPSVTSKRHERKKFSKIPLHYPRTSRHTPLLSVPLGKPPTFDGEDYARWSDLMKFHLTSLHKSIWNVVEFGAQVPSVGDEDYDEDEVAQIEHFNSQATTILLASLSREEYNKVQGLKSAKEVWDVLKTAHEGDELTKITKRETIEGELGRFRLRQGEEPQDMYNRLKTLVNQVRNLGSKKWDDHEVVKVILRSLIFLNPTQVQLIRGNPRYTLMTPEEVIRNFVSFEFMIKGSRKINELDGPSTSEAQPVAFKVTEEKKEESTPSRTHIDASKLDNEEMALVIKSFRQILKQRRGKDYKPRSKKVCYKCGKPGHFIAKCPISSDSDRGDDKKGRRKEKKRYYKKKGGDAHVCREWDSDESSSDSSDDEDGANIAVTKGLLFPNVGHKXCLMAKDGKKKKXKLNELISAIHEKDDLLDSQEDFLIKENKKHVKVTNDYALEVEKCEKLSSELSTCHETIDNLRNENSNLLAKVDYIACNVSIPNLRNDNDDLLAKIEELNISLASLRIENEKLLAKAKELDVCNISISDLRDKNNILRAKIVELNSCKPSTSTVEHTSICTRCRDVDINAIHDHMALIKQQNDHIAKLDAKIAEHELENKNFKFARSMLYSGRRPGIKDGIGFQKGDNVKLNAPPKKLSNFVKGKAPMPQDNEGYILYPVGYPESKIRRIHSRKSHSGPNHAFMYKGETSSSRQPTRAKLPKKKTPSASNDHDISFKTFDASYVLTNKSGKVYASGGSSWIIDSGCTNHMTGDKKMFSYEKNQDPQRAITFGDGNQGVTVFRRSDDSIAFKGVLEGQLYLVDFYRAELDTCLIAKTNMGWLWHRRLAHVGMKNLHKLLKGEHILRLTNVHFEKDRICSACQAGKQVGAHHPHKNIMTTDMPLELLHMDLFGPIAYISIGGSKYCLVIVDDYSRFTWVFFLQEKSHTQETLKGFLRRAQNEFGLRIKKIRSDNGTEFKNSQIEGFLEEEGIKHELSSPYTPQQNGAVERKNRTLLDMARTMLDEYKNSDRFWAEAVNTACYAINRLYLHRILKKTSYELLTGKKPNISYFRVFGSKCFILVKRGRKSKFAPKTVEGFLLGYDSNTKAYRVFNKSSGQVEVSCDVVFDETNGSQVEQVDLDEIGDEEAPCIALRSMSIGDVCPKESKEPPNAQDQPSSSTQACPPTQNEDEAQVDEGEDQTNEPPQDDGNDQGGDANDQDKEDDEPRPPHPRVHQAIQRDHPVDTILGDIHKGVTTRSRVAHFCEHYSFISSIEPHRVEEALQDSDWVVAMQEELNNFTRNEQDEHGVVTRNKARLVAKGYSQVEGLDFGETYAPVARLESIRILLAYATYHGFKLYQMDLKSAFLNGPIKEEVYVEQPPGFEDSEYPNHVYKLSKALYGLKQAPRAWYECLRDFLITNGFKVGKVDPTLFTKTLENDLFVCQIYVDDIIFGSTNESTCEEFSRIMTRKFEMSMMGELKYFLGFQVKQLQEGTFLSQTKYTQDILSKFGMKDAKPIKTPMGTNGHLDLDTEGNSVDQKGERIILRALMTPFLAIHAKGGESISPKQKDRTTI

SEQ ID NO: 10293 - protein, 1374 aa, Zea mays
  unsure (1)..(1374): unsure at all Xaa locations
  Clone ID: TF_ZmC951_332.pep
MSGDHAKKMVIGDDKSATSHGKAPSRESANKKKDGSPSRIRSHKSGEKKKKMKKVVYYETDSSLPSTSGSDTASVTSKRQERKKCSTIRRDEDYDEDEVAQIVHFNSQATTILLTSLSREEYNKTAHEGDAVTKITKRETIEGELGRFRLRQGEEPQEMYNRLKTLVNQVRNLGSKKWDDHEMVKATEEKKEGSTSSRLPIDASKLDNEEMALIIKSFRQILKQRRGKDYKSRSKKVCYKCGKPGHFIAKCPISSDSDRGDDKKGKRREKKRYYEKKGGDAHVCREWNSDENSSDSSSDEDAANIAVTKGLLFPXVGHKCLMAKDGKRKXDEDNSCDEEDNLRALFANLNMQQKEKLNELISSIHEKDELLDSQEDFLIKENKKHVKVKNAYALELEKCEKLSSELSTCHDIIANLRNENAKIIAKIDSNVCDVSIPNLRDDNVSLLAKIEELNVSLASLRNENEKLIAKAKNLDVCNITISNLRNENDILHANIVELKSCKPSTSTVEHVFICTRCRDINVDAIHDHLALIKKQNNHIAQLNAKLNEHDLENEKFKFARSMLYSGRCLGIKDGIGFQKGDNVKLNXPPKRLSNFVKGKAPMPQDNEGXYASGGSSWIIDSGCTNHMTGEKKMFSSYEKNQDPQQAITFGDGNQGVTVFRRSDDSVAFKGVLEGQLYLVDFDRAELDTCLIAKTNMGWLWHRRLAHVGMKNLHKLLKGEHILGLTNVHFEKDRVCSACQTGKQVGVHHPHKNIMTTDRPLELLHMDLFGPIAYISIGGSKYCLVIVDDYSRFTWVFFLQEKSHTQETLKGFLRRAQNEFDLRIKKIRSDNGTEFKNSQIEGFLEEEGIKHEFSSPYMPQQNGVVNRNNRTLLDMARTMLDEYKTSDRFWAEAVNTACYAINRLYLHRILKKTSYELLTGKKPNVSYFRVFGSKCFILVKRGRKSKFAPKTVEGFLLGYDSNTRAYRVFNKSTGLVEVSCDIVFDETNGSQVEQIDLDELDDEEAPCVALRNMSIGVVCPKESEEPPQAQDQPSSSMQASPPTQDEDEAQNDEGEDQEVEPPQEESNDQGGDAHDQDEEDEQVQRPPHPRVHQAIQRDHPVNTILGDIQKGVITRSRVAHFCEHYSFVSSIEPHKVEEALQDSDWVVAMQEELNNFTRNELYQMDVKSAFLNGPIKEEVYVEQPPGFEDSEYPNHVYKLSKALYGLKQAPRAWYECLRDFLITNGFKVGKADPTLFTKTLENGLFVCQIYVDDIIFGSTNESTCEEFSRIMTQKFEMSMMGELKYFLGFQVKQLQEGTFISQTKYIQDISNKFGTKDAKPIKTPMGTNGHLDLDTGGKSVDQKKEHIGDLPVLGKVSGVLGFKEAKFHSSFYCQS

SEQ ID NO: 10294 - protein, 1699 aa, Zea mays
  unsure (1)..(1699): unsure at all Xaa locations
  Clone ID: TF_ZmC951_334.pep
MSGELAKREMETGDKPATSHGSTSSEESRNKRKEKKNSSNKGKGKEKKSSSHKSDRRGDKHKRMRKVVYYETNSSSPSTSDSDAPSVTSKRQERKKYSKIPLRYPHVSKRTPLLSVPLGKPPVFDGGDYNMWSDKMRHHLTSLHTSIWNVVEFGVQVPSVGDEDHDSDEAAQIHHFNSQATTILLASLSREEYNKVQGLKSVKEIWDVLKTAHEGDEVTKITKRETIEGELGRFMLHQGEDPQAMYNRLKTLVNQVRNLGSEKWDDHEMVKVILRSLVFLNPTQVQLIRDDPRYKLMSPEEVIGKFVSFELMIKGSKKIIEQGTSFTPEAQPVAFKATEEKKEESTSSRQPIDASKLDNEEMALIIKSFRQILKQRRGKDYKPRSKKVCYKCGKPGHFIAKCPISSDSDRGDDKKGKRREKKRYYKKKGGDAHVCREWDSDESSTDSSSDEDTANIAVTKGLLFPNVGHKCLTAKDGKRKKVKSKSSTKYESSSDEEDSLRTLFANLNMEQKEKLNELISIIHEKDDLLDSQEDFLIKENKKHVKVKNAYALEVEKCEKLSSELSTCHETINNLRNENVKLIAKVDSHVCNASTSNPRDDNVDLLARIDELNVSLASLRIENEKLLAKAKDFNVCNITISNLRSENDILHAKVVELKSCKPSTSTVEYTAICTRCRDVDVNAIHDHMALIKQQNDHIAKLDAKIAEHNLENEKFKFARSMLYNGRRPGIKDGIGLQRGDNVKINAPPKRLSNFVKGKAPIPQDNEGYILYPSGYPESKIRRIHSTKSHSGPNHAFMYKGEKSSSRQPTHAKLPKRKTPSASNDHDISFKTFDASYVLTNKSGKVVAKFVGGKYKGSKTCVWVPKVLVSNAKGPKTVWVYASGGSSWIIDSGCTNHMTGEKEMFSSYEKNQDPQRAITFGDGNQCVVKGLGVTVFRRSDDSIAFKGVLEGQLYLVDFDRAELDTCLIAKTNMGWLWHHRLAHAGMKNLHKLLKGEHILGLTNVHFEKDREKSQTQETLKGFLRRAQNEFDLRIKKIRSDNGTEFKNSQIEGFLEEXGIKHEFSSPYTPQQNXFWAEAVNTACYAINRLYLHRILKKTSYELLTGRKSKFAPKTVEGFLLGYDSNTRTYRVFNKSSGQVEVSCDVVFDETNGSQVEQVDLDEIGDEEAPCTALRNMSIGDVCPNESEESPNAQDQPSSSTQASPPTQNEDEGGDANDQDKEDEEQRPPHPRVHQAIQRDHPVDTILGDIHKGVTTRSRVAHFCEHYSFVSSIEPHRVEEALQDSDWVVAMQEELNNFTRNEVWHLVPRPNQNVVGTKWVFRNKKDEHGVVTRNKARLVAKGYSQVEGLDFGETYAPVARLKSIRILLAYATYHGFKLYKMDVKSAFLNGPIKEEVYVEQPPGFEDSEYPNHVYKLSKALYGLKQAPRAWYECLRDFLITNGFKVRKADPTLFTKTLDNDLFVCQIYVDDIIFGSTNESTCEEFSRIMTQKFEMSMMGELKYFLGFQVKQHQEGTFLSQTKYTQDILSKFGMKDAKPIKTPMGTNGHLDLDEGGVKGSHLANKKTKYWVQQKSKGTTEGTSGMAHRTVRCATGQCPVHQRTPSRTRHLRENPEALRYNSPDCPVYTGQCPVLQGRAALELASFGNSQRLVRYNSPDMSGVHRTVRCDIETTDTSAPTATCSALNARQHAQKSDPPMLAHRTL

SEQ ID NO: 10295 - protein, 1785 aa, Zea mays
  Clone ID: TF_ZmC951_337.pep
MSGDHAKKEMETGEKPTTSYGSTSSEESRTKRREKKKSSSNKGKEKKSSSHHKEKKEKSSSHKPHRKGDKHKRMRKVVYYETDTSSTSTSDSDAPSVTSKRQERKKYSKIPLRYPRISKHTPLLSVPLGKPPTFDGEDYARWSDLMQFHLISLHKGIWDVVEFGVQVPSIGDENYDEDEVAQIEHFNSQAATILLASLSKEEYNKVQGLKNAKEIWDVLKTAHEGDELTKITKRETIEGELGRFRLHKGEEPQHMYNRLKTLVNQVRNLGSKKWDDHEVVNVILRSLIFLNPTQVQLIRGNPRYTKMTPEEVIGHFVSFECMIEGSRKINELGDPSEAQPVAFKATEEKKEESTPSRQPIDASKLDNEEMALVIKSFRQILKQRRGKDYKSRSKKVCYKCGKPGHFIAKCPISSDSDRGDDKKGRRKEKKRYYKKKGGDAHVCREWDSDESSSDSSDDEDAANIAVTKGLLFPNVGHKCLMAKDGKKKKVKSNSSTKYESSSDDNASDEEDNLRILFANLNMEQKEKLNELISAIHEKDDLLDSQEDCLIKENKKHVKVKKAYALEVEKCEKLSSELSTCREMIDNLRNENAILNAKVDSHVCNVSIPNLRDDNIDLLAKIDELNASLASLRLENENLIAKAKNFDVCNATISDLRTKNEMLHAKVVELKSCKPSTSNLEHVSICTKCRDIDVNAILDHMALIKQQNDHIAKLDAKIAEHNLENEKFKFARSILYNGRRPGIKDGIGFQRGDNVKLNAPPKNLSNFVKGKAPMPQDNEGYILYPAGYPESKIRKIHSRKSHSGPNHAFMYKGETSSSRQPTRAKLPRKKISNASNEHSIAFKTFDASYVLTNKSGKVVAKFVGNKHKGSKTCVWVPKVLVSNAKGPKTVWVYASGGSSWILDSGCTNHMTGEKRMFSSYEKNQDPQRAITFGDGNQGVTVFRRSDDSIAFKGVLEGQLYLVDFDRAELDTCLIAKTNMGWLWHRRLAHVGMKNLHKLLKGEHILGLTNVHFEKDRICSACQAGKQVGVHHPHKNIMMTDRPLELLHMDLFGPIAYISIGGSKYCLEKSQTQETLKGFLRQAQNEFALRIKKIRSDNGTEFKNSQIESFLEEEGIKHEFSSPYTPQQNGVVERKNRTLLDMARTMLDEYKTPDRFWAEAVNTACYAINRLYLHRILKKTSYELLTGKKPNISYFRVFGSKCFILIKRGRKSKFAPKTVEGFLLGYDSNTRAYRVFNKSTGLVEVSCDVVFDETNGSQVEQVDLDEIGEEQAPCIALRNMSIGDVCPKESEEPPSTQDQPSSSMQASPPTQNEDEAQNDEEQNQEDKPPQDDSNDQGGDTNDQEQEDEEEPRPPHPRVHQAIQRDHPVDTILGDIHKGVTTRSRVAHFCEHYSFVSSIEPHRVEEALQDSDWVVAMQEELNNFTRNEVWHLVPRPNQNVVGTKWVFRNKQDEHGVVTRNKARLVAKGYSQVEGLDFGETYAPVARLESIRILLAYATYHGFKLYQMDVKSAFLNGPIKEEVYVEQPPGFEDSEYPNHVYRLSKALYGLKQAPRAWYECLRDFLIANGFKVGKADPTLFTKTLENDLFVCQIYVDDIIFGSTNESTCEEFSRIMTQKFEMSMMGELKYFLGFQVKQLQEGTFISQTKYTQDILAKFGMKDAKPIKTPMGTNGHLDLDTGGKSVDQKSISNQVIGILKGNWSLRRRKRLPLRNSYFAITPSNSLFFGGEMSIKEKDFILEGESKSSKAKGPDLVFGIILTHFLMTKGEEITSRALMIPFLAIHAKKGEK

SEQ ID NO: 10296 - protein, 1712 aa, Zea mays
  Clone ID: TF_ZmC951_339.pep
MSGELAKKEMETGDKPATSHGKASSGESHNKEKKKEKKKEKKTSSHKSHQSGDKIKKMRKVVYYETDTSSPSTSGSDAPSITSKRHERKKFSKIPLHYPRTSRHTPLLSVPLGKPPTFDGEDYARWSDLMKFHLTSLHKSIWNVVEFGAQVPSVGDEDYDEDEVAQIEHFNSQATTILLASLSREEYNKVQGLKSAKEVWDVLKTAHEGDELTKITKRETIEGELGRFRLRQGEEPQDMYNRLKTLVNQVRNLGSKKWDDHEVVKVILRSLIFLNPTQVQLIRGNPRYTLMTPKEVIRNFVSFEFMIQGSRKINELDGPSTSEAQPIAFKATEEKKEESTPSRTPIDASKLDNEEMALVIKSFRQILKQRRGKDYKPRSKKVCYKCGKPGHFIAKCPISSDSDRGDDKKGRRKEKKMYYKKKGGDAHVCREWDSDESSSDSSDDEDAANIAITKGLLFPNVGHKRLMAKDGKKKKVKSKSSTRYESSSDENASDEEDNLRTLFANLNMQQKEKLNELISAIHEKDDLLDTQEDFLIKENKKHVKVKNAYALEVEKCEKLSSELSSCHETIDNLRNENTKLLAKVDSNACNVLIPNPRNDNDDLLAMIEELNISLASLRNENEKLIAKAKDFDVCNATISDLRDKNDILHSKIVELNSCKSSTSTVEHTTICTRCRDVNIDAIHDHMALIKQQNDHIAKLDAKIAEHNLENEKFKFARSMLYSGRRPGIKDDIGFQQGGNVKINAPPKKLSNFVKGKAPMPQDNEGHILYPAGYSESKIRRIHSRKSHSGPNHAFMYKGETSSSRQQTHAKLPKKKTPSASNEHNFSFKTFDASYILTNKSGKIVAKYVGGKQKGSKTCVWVPKVLISNAKGPKTIWVYASGGSSWIIDSGCTNHMTGEKKLFSSYEKNQDPQRAITFGDGNQDSLDYNLPSVSQLCQMGYNCLFTDEKSHTQETLKGFLRRAQNEFGLRIKKIRSDNGTEFKNSQIEGFLEEEGIKHEFSSPYMPQQNGVVERKNRTLLDMARTMLDEYKTSDRFWAEAVNTACYAINRLYLHRILKKTLYELLTGKKPNISYFRVFGSKCFILIKRGRKSKFAPKTVEGFLLGYDSNTRAYRVFNKSTGQVEVSCDVVFDETNGSQVEQVDLDEIGDEEAPCIALRNMSIGDVCPKESQEPPNAQDQPSSSTQASPPTQNEDDAQVDEGEDQANKPPQDDDNNQGGDVNEQDKEDEEQRPPHPRVHQAIQRDHPVDTILGDIHKGVTTRSRVAHFCEHYSFVSSIEPHRIEEALQDSDWVVAMQEELNNFTRNEVWHLVPRRNQNVVGTKWVFRNKQDEHGVVTRNKARLVAKGYSQVEGLDFDETYAPVARLESIHILLAYATYHGFKLYQMDVKSAFLNGPIKEEVYVEQPPGFEDSEYPNHVYKLSKALYGLKQAPRAWYECLRDFLITNGFKVGKADPTLFTKTVANDLFVCQIYVDDIIFGSTNKSTCEEFSRIMIQKFEMSMMGELRYFLGFQIKQLQDGTFISQTKYIQDILKKFGMKDAKPIKTPMGTNGHLDLDTGGYSDANWAGCKIDRKSTSRICQFLGRSLGSWASKKQNSVALSTAEAEYIAAGHYCVQLLWMRQTLRDYGYKLSKVPLLCDNESAIRMTENPVEHSRTKHIDIQYHFLRDHQQRGDIKIAYINTKDQLADIFTKPLDEKTFCKLRNELNILDSRNFD

SEQ ID NO: 10297 - protein, 1927 aa, Zea mays
  Clone ID: TF_ZmC951_344.pep
MSGDHAKKEMETGEKPTTSYGSTSSEESRTKRREKKKSSSNKGKEKKSSSHHKEKKEKSSSHKPHRKGDKHKRMRKVVYYETDTSSTSTSDSDAPSVTSKRQERKKYSKIPLRYPRISKHTPLLSVPLGKPPTFDGEDYARWSDLMRFHLISLHKSIWDVVEFGAQVPSVGDENYDEDEAAQIEHFNSQATTILLASLSKEEYNKVQGLKNAKEIWDVLKTAHEGDELTKITKRETIEGELGRFRLHKGEEPQHMYNRLKTLVNQVRNLGSKKWDDHEVVNVILRSLIFLNPTQVQLIRGNPRYTKMTPEEVIGHFVSFECMIEGSRKINELGDSSEAQPVAFKATEEKKEEATPSRQPIDASKLDNEEMALVIKSFRQILKQRRGKDYKSRSKKVCYKCGKPGHFIAKCPISSDSDRGDDKKGRRKEKKRYYKKKGGDAHVCREWDSDESSSDSSDDEDAANIAVTKGLLFPNVGHKCLMAKDGKKKKVKSKSSTKYESSSDDNASDEEDNLRSLFANLNIAQKEKLNELVSAIHEKDDLLDSQEDCLIKENKKHVKVKKAYALEVEKCEKLSSELSTCREMIDNLRNENTSLNAKVDSHVCNVSIPNPRDNNDDLLARIEELNISLASLRLENESLIAKAKDFDVCKVTIANLRDKNDILHAKIVELNSCKPSTSIVEHVSICTRCRNVDIDAIHDHMALIKQQNDHIAKLDAKIAEHNLENEKFKFARSMLYNGRRPGIKDGIGFQRGDNVKLNAPPKNLSNFVKGKAPMPQDNEGYILYPASYPESKIRRIHSRKSHSGPNHAFMYKGETSSSRQPTRAKLPKKKIPNASNEHSISFKTFDASYVLTNKSGKVVAKFVGGKHKGSKACVWVPKVLVSNAKGPKTVWVYASGGSSWILDSGCTNHMTGEKRMFSSYEKNKDPQRAITFGDGNQGLVKGVTVFRRSDDSIAFKGVLEGQLYLVDFNRAELDTCLIAKTNMGWLWHRRLAHVGMKNLHKLLKGEHILGLTNVHFEKDRICSACQAGKQVGVHHPHKNIMTTDRPLELLHMDLFGPIAYISIGGSKYCLVIVDDYSRFTWVFFLQEKSQTQETLKGFLRRAQNEFGLRIKKIRSDNGTEFKNSQIEGFLEEEGIKHEFSSPYTPQQNGVVERKNRTLLDMARTMLDEYKTPDRFWAESVNTACYAINRLYLHRILKKTSYELLTGKKPNISYFRVFGSKCFILIKRGRKSKFAPKTVEGFLLGYDSNTRAYRVFNKSTGLVEVSCDVVFDETNGSQVEQVDLDEIGEEQAPCIALRNMSIGDVCPKESEEPPSTQDQPSSSMQASPPTQNEDEAQNDEEQNQEDEPPQDDSNDQGGDTNDQEKEDEEEPRPPHPRVHQAIQRDHPVDTILGDIHKGVTTRSRVAHFCEHYSFVSSIEPHRVEEALQDSDWVVAMQEELNNFTRNEVWHLVPRPNQNVVGTKWVFRNKQDEHGVVTRNKARLVAKGYSQVEGLDFGETYAPVARLESIRILLAYATYHGFKLYQMDVKSAFLNGPIKEEVYVEQPPGFEDSEYPNHVYRLSKALYGLKQAPRAWYECLRDFLIANGFKVGKADPTLFTKTLDNDLFVCQIYVDDIIFGSTNESTCEEFSRIMTQKFEMSMMGELKYFLGFQVKQLQEGTFISQTKYTQDILAKFGMKDARPIKTPMGTNGHLDLDTGGKSVDQKVYRSMIGSLLYLCASRPDIMLSVCMCARFQSDPKESHLTAVKRILRYLAYTPKFGLWYPRGSTFDLIGYSDADWAGCKINRKSTSGTCQFLGRSLVSWASKKQNSVALSTAEAEYIAAGHCCAQLLWMRQTLRDYGYKLTKVPLLCDNESAIKMADNPVEHSRTKHIAIRYHFLRDHQQKGDIEISYINTKDQLADIFTKPLDEQSFTRLRHELNILDSRNFFC

SEQ ID NO: 10298 - protein, 1411 aa, Zea mays
  unsure (1)..(1411): unsure at all Xaa locations
  Clone ID: TF_ZmC951_345.pep
MSGDHAKKEMKTGDKPTTSHEKASSEESHNKGKGKEKKASSHKSHQSGDKKKKMRKVVYYETDTSSPSTSGSDAPSITSKSHERKKFSKIPLRYPRISKHTPLLSVPLGKPSTFDGEDYARWSDLMKFHLTSLHKSIWNVVEFGAQVPSVGDEDYDEDEVAQIEHFNSQATTILLASLSREEYNNVQGLKRAKEVWDVLKTAHEGDELTKITKRETIEGELGRFRLHKGEEPQDMYNRLKTLVNQVRNLGSKKWDDHEMVKVILRSLIFLNPTQVQLIRGNPRYILMTLAEVIGNFVSFEYMIKGSKKINELDDPSTSEAQTVAFKATEEKKEESTSSRQPIDASKLDNEEMALVIKSFRQILKQRRGKDYKPRSKKVCYKCGKPGHFIAKCPISSDSDRGDDKKGRRKEKKKYYKKKGGDAHVCREWDSDESSSDSSSDEDAANIAINKGLLFPNVGHKCLMAKDGKKKKVKSKSSTRYESSSDDNASDEEDNLRTLFANLNMQQKEKLNELISAIHEKDDLLDAQEDFLIKENKKHVKVKKCLRSRSRKCEKLSSELSTCHETIDNLRNENANLLAKVDSNVCDVSIPNLRNNNDNLLAKIEELNITLASLRNENKKLLAKAKELDVCNASIFDLRSKNDILHAKVVELKSCKPSTSTTEHVTICTRCRDVDINAIHDHMALIKQQNDHIAKLDAKIAEHELENEKFKFARSMLYRGRRPGIKDGIGFQQGGNVKLNAPPKKLSNFVKGKAPMPQDNEGYILYPVGYPESKIRRIHSRKSHYGPNHAFKYKGETSSSRQPTRAKLPKKKTPSASNEHSISFKTFDASYVLTNKSGKVYASGGSSWIIDSGCTNHMTGEKRMFSSYEKNEDPQRAITFGDEKSQTQETLKGLLRRAQNEFGLRIKKIRSENGMEFNNSQIEGFLEDEGMKHELSSPYTPQQNGVVERKNRNLLDMARTMLDEYKTPDRFWAEAINTACYSINRLYLHQILKKTSYELLTSKKPNVSYFKFFGSKCFILVKRCRKSKFASKTVEGFLLGYDSNTRAYRVFNKSTGLVEVSCDIVFDETNGYQVEQVDLDELDDEEVPCVALRNMSIGDVCPKESEEPTQAQDQPSSSNQASPTEDEDQAQDNEDEHQEDEPPQEEDKDQGGDEVDQDKKDDQEIQGQRSRHPRVHQAIQRDHPINSILGDIHKGXVENALRDSDLVLTMKEELXNFTRNEWVFCNEQDEHGVVTRNKARLVAKGYSQVEGLDFGETYAPVARLESIRILLAYATFHGFKLYQMDVKSVFLNGSIKEEVYVEQPPGFEDSEYPNHVYKLSKTLYGLKQAPRPWYECLRDFLITNGFKVEKADPTLFTKTIAKDLFVCQIYVDDIIFGSTNKSTCEEFSGIMIQKFEMSMMRELKYFLGFQVK

SEQ ID NO: 10299 - protein, 1713 aa, Zea mays
  Clone ID: TF_ZmC951_350.pep
MSGDHAKKEMETGEKPTTSYGSTSSEESRTKRREKKKSSSNKGKEKKSSSHHKEKKEKSSSHKPHRKGDKHKRMRKVVYYETDTSSTSTSDSDAPSVTSKRQERKKYSKIPLRYPRISKHTPLLSVPLGKPPTFDGEDYARWSDLMRFHLTSLHKSIWDVVEFGAQVPSVGDEDYDEDEVAQIEHFNSQATTILLASLSKEEYNKVQGLKNAKEIWDVLKTAHEGDELTKITKRETIEGELGRFRLLKGEEPQHMYNRLKTLVNQVRNLGSKKWDDHEVEVIGHFVSFECMIEGSRKINELGDSSEAQPVAFKATEEKKEEATPSRQPIDASKLDNEEMALVIKSFRQILKQRRGKDYKSRSKKVCYKCGKPGHFIAKCPISSDSDRGDDKKGRRKEKKKYYKKKGGDAHVCREWDSDKSSSDSSDDEDAANIAVTKGLLFPNVGHKCLMAKDGKKKKVKSNSSTKYESSSDDNASDEEDSLRSLFANLNIAQKEKLNELVSAIHEKDDLLDSQEDCLIKENKKHVKVKKAYALEVEKCEKLSSELSTCREMIDNLRNENASLNAKVDSHVCNVSIPNSRDNNDELLARIEELNISLASLRLENENLIAKAKDFDVCKVTIADLRDKNDILHAKIVELNSCKPSTSTIEHVTICTRCRDINVDAIHDHMILIKQQNDHIAKLDAKIAEHNLENEKFKFARSMLYNGRRPGIKDGIGYQRGDNVKLSAPPKRLSNFVKGKAPMPQDNEGYILYPAGYPEDKIRKIHSRKSHSGPNHAFMYKGETSRSRQPTHAKLPRKKTTNASNDHAISFKTFDASYVLTSKSGKVYASGGSSWILDSGCTNHMTGEKRMFSSYEKNQDPQRAITFGDGNQGVTVFRRSDDSIAFKGVLEGQLYLVDFDRAELDTCLIAKTNMGWLWHRRLAHVGMKNLHKLLKGEHILGLTNVHFEKDRICSACQAGKQVGVHHPRKNIMTTDRPLELLHMDLFGPIAYISIGGSKYCLEKSQTQETLKGFLRRAQNEFGLRIKKIRSDNGKEFKNSQIEGFLEEEGIKHEFSSPYTPQQNGVVERKNRTLLDMARTMLDEYKTPDRFWAEAVNTACYAINRLYLHRILKKTSYELLTGKKPNISYFRVFGSKCFILIKRGRKSKFAPKTVEGFLLGYDSNTRAYRVFNKSTGLVEVSCDVAFDETNGSQVEQMDLDEIGEEQAPCIALRNMSIGDVCPKESEEPPSTQDQPSSPMQASPPTQNEDEAQNDEEQNQEDEPPQDDSNDQGGDTNDQEKEDEEEPRPPHPRVHQAIQRDHPVDTILGDIYKGVTTRSRVAHFCEHYSFVSSIEPHRVEEALQDSDWVVAMQEELNNFTRNEVWHLVPRPNQNVVGTKWVFRNKQDEHGVVTRNKARLVAKGYSQVEGLDFGETYAPVARLESIRILLAYATYHGFKLYQMDVKSAFLNGPIKEEVYVEQPPGFEDSEYPNHVYRLSKALYGLKQAPRAWYECLRDFLIANGFKVGKADPTLFTKTLEKDLFVCQIYVDDIIFGSTNESTCEEFSRIMTQKFEMSMMGELKYFLGFQVKQLQEGTFISQAKYTQDILAKFGMKDAKPIKTPMGTNGHLDLDTGGKSVDQKIIPDRRSFLEKQAKRGPSGLLRRTVRDIGIPLGQNQCKNTSFHYRLSGGKAKTVRALARTVRPQARTVRSPLIYRGGPSAPGGRTVRAQQKRSNG

SEQ ID NO: 10300 - protein, 2485 aa, Zea mays
  Clone ID: TF_ZmC951_351.pep
MSGDHAKKEMETGEKPTTSHGSTSSEESRTKRKEKKKSSSNKGKEKKSSSHHKEKKERSSSHKPHRRGDKHKRMRKVVYYETDTSSTSTSGSDAPSVTSKRQERKKFSKIPLHYPRISKNAPLLSVPLGKPPTFDGEDYARWSDLMRFHLTSLHKSIWDVVEFGAQVPSVGDKDYDEDEVAQIEHFNSQATTILLASLSREEYNKVQGLKSAKEVWDVLKTAHEGDELTKITKRETIEGELGRFRLRKGEEPQHMYNRLKTLVNQVRNLGSTKWDDHEMVKVILRSLIFLNPTQVQLIRGNPRYTKMTPEEVIGNFVSFECMIEGSRKINELDDPSTSEAQPVAFKATEEKKEEATPSRQPIDASKLDNEEMALVIKSFRQILKQRRGKDYKSRSKKVCYKCGKPGHFIAKCPISSDSDRGDDKKGRRKEKKKYYKKKGGDAHVCREWDSDESSSDSSDDEDAANIAVTKGLLFPNVGHKCLMAKDGKRKKVKSNSSTKYESSSDDNDSDEEDNLRVLFANLNMEQKEKLNELISAIHEKDDLLDSQEDCLIKENKKHVKVKKAYALEVEKCEKLSSELSTCREMIDNLRNENASLNAKVDSHVCIVSTSNPKDNNDDLLARIEELNISLASLRVENKILIAKAKDYDVCKVTISDLRDKNDILHAKIVELNSCKPSTSIVEHVSICTRCRDVDVNAIHDHMALIKQQNDHIAKLDAKIAEHNLENEKFKFARSMLYNGRRPGIKDGIGFQRGDNVKINAPPKNLSNFVKGKAPMPQDNEGYILYPAGYPESKIRKIHSRKSHSGPNHAFMYKGETSSSRQPTRAKLPRKKTPNASNDHAISFKTFDASYMLTNKSGKVYASGGSSWILDSGCTNHMTGEKKMFSSYEKNQDPQRAITFGDGNQGVTVFRRSDDSIAFKGVLEGQLYLVDFDRAELDTCLTAKTNMGWLWHRRLAHVGMKNLHKLLKGEHILGLTNVHFEKDRICSACQAGKQVGAHHPHKNIMTTDRPLELLHMDLFGPIAYISIGGSKYCLVIVDDYSRFTWVFFLQDKSHTQETLKGFLRRAQNEFGLRIKKIRSDNGTEFKNSQIEVERKNRTLLDMARTMLDEYKTPDRFWAEAVNTACYAINRLYLHRILKKTSYELLTGKKPNISYFRVFGSKCFILVKRGRKSKFAPKTVEGLLLGYDSNTRAYRVFNKSTGLVEVSCDVVFDETNGSQVEQVDLDEIGEEQAPCIALRNMSIGDVCPKEFEEPPNTQDQPSSSTQASPPTHDEDEAQVDEGEDQKDEPPQDDGNDQGGDANDEDKEDEQPRPPHPRVHQAIQRDHPVDTILGDIHKGVTTRSRVAHFCEHYSFVSSIEPHRVEEALQDSDWVVAMQEELNNFTRNEVWHLVPRPNQNVVGTKWVFRNKQDEHGVVTRNKARLVAKGYSQVEGLDFGETYAPVARLESIRILLAYATYHGFKLYQMDVKSAFLNGPIKEEVYVEQPPGFEDSKYPNHVYKLSKALYGLKQAPRAWYECLRDFLIANGFKVGKADPTLFTKTLDNDLFEFSRIMTQKFEMSMMGELKYFLGFQVKQLQEGTFICQTKYTQDILTKFGMKDAKPIKTPMGTNGHLDLNTGGKSVDQKATFNSDRGDDKKGKRREKKKYYKKKGGDAHVCREWDSDESSTESSSDEDAANIAVTKGLLFPNVGHKCLMAKDGKRKKVKSKSSTKYESSSDDNASDEENNLRTLFANLNMEQKEKLNELISAIHEKDDLLDSQEDFLIKENKKHVEKCEKLSSELSTCHDTITNLRNENASLNAKVDSHVCNVSIPNLRNDNDDLLAKIEELNISLASLRVENENLIAKAKELDVCNVTISDLRDNNDILRAKIVELNSCKPSTSSVEHVSICTRCRDVDINAIHDHMTLIKQQNDHIAILDAKIAEHNLENEKFKFARSMLYNGRHPGIKDGIGYQRGDNVKLSAPPKRLSNFVKGKAPMPQDNEGYILYPAGYPESKIRKIHSRKSHSGPNHAFMYKGETSSSRQPTRAKLPKKKTPSASNEHDISFKTFDASYVLTNKSGKVYASGGSSWILDSGCTNHMTGEKKMFSSYEKNQDSQRAITFGDGNQGVTVFRRSDDSIAFKGVLEGQLYLEKSQTQETLKGFLRRAQNEFGLRIKKIRSDNGTEFKNSQIEGFLEEEGIKHEFSSPYTPQQNGVVERKNRTLLDMARTMLDEYKTPDRFWAEARGRKSKFAPKTVEGFLLGYDSNTRAYRVFNKSSGLVEVSCNVVFDETNGSQVEQVDLDEIGEEQAPCIALRNMSIGDVCPKEFEEPPNTQDQPSSSTQASPPTQNEDEAQVDEGEDQRDEPPQDNGNDQGGDASDQDKEDEQPRPPHPRVHQAIQRDHPVDTILGDIHKGVTTRSRVAHFCEHYSFVSSIEPHRIEEALQDSDWVMAMQEELNNFLRNEVWHLVPRPNQNVVGTKWVFRNKQDEHGVVTRNKARLVAKGYSQVE

SEQ ID NO: 10301 - protein, 1927 aa, Zea mays
  Clone ID: TF_ZmC951_359.pep
MSGDHAKKEMETGEKPTTSHGSTSSEESRTKRREKKKSSSNKGKEKKSSSHHKEKKEKSSSHKPHRSGDKQKRMRKVVYYETDTSSTSTFDSDAPSVTSKRQERKKFSKIPLHYSRISKHAPLLSVPLGKPPTFDGEDYARWSDLMRFHLTSLHKSIWDVVEFGAQVPSVGDKDYDEDEVAQIENFNSQATTILLASLSREEYNKVQGLKSAKEVWDVLKTAHEGDELTKITKRETIEGELGRFRLRKGEEPQHMYNRLKTLVNQVRNLGSTKWDDHEMVKVILRSLIFLNPTQVQLIRGNPRYTKMTAEEVIGNFVSFECMIEGSRKINELDDPSTSEAQPVAFKATEEKKEEATPSRQPIDASKLDNEEMALVIKSFRQILKQRRGKDYKSRSKKVCYKCGKPGHFIAKCPISSDSDRGDDKKGRRKEKKRYYKKKGGDAHVCREWDSDESSSDSSDDEDAAHIAVTKGLLFPNVGHKCLMAKDDKKKVKSKSSTKYESSSDDNASDEEDNLRTLFANLNMQQKEKLNELISAIHEKDDLLDTQEDFLIKENKKHVKVKNAYALEMEKCEKLSSELSTCHETIDNLRNENANLLAKVDSHVCDASIPNLRNDNDDLLAKIKEMNDSLASLRNENEKLLAKAKDFDVCNATISDLRSKNEILHAKVVELKSCKPSTSTVEHTSICTRCRDVNIDAIHDHMTLIKQQNDHIAKLDAKIAEHNLENEKFKFARSMLYNGRRPGIKDGIGFQRGDNVKLSAPPKRLSNFVKGKAPMPQDNEGYILYPAGYPEDKIRKIHSKKSHSGSNHAFMYKSETSSSRQPTRAKLPKKKIPNASNEHSISFKTFDASYVLTNKSGKVVAKYVGGKHKGSKTCVWVPKILVSNAKGPKTIWVYASGGSSWILDSGCTNHMTGEKKMFSSYEKNKDPQRAITFGDGNQGLVKGVTVFRRSDDSIAFKGVLEGQLYLVDFDRAELDTCLIAKTNMGWLWHRRLAHVGMKNLHKLLKGEHILGLTNVHFEKDRTCSACQAGKQVGAHHPHKNIMTTDRPLELLHMDLFGPIAYISIGGSKYCLVIVDDYSRFTWVFFLQEKSQTQETLKGFLRRAQNEFGLRIKKIRSDNGTEFKNSQIEGFLEEEGIKHEFSSPYTPQQNGVVERKNRTLLDMARTMLDEYKTSDRFWAEAVNTACYAINRLYLHRILKKTSYELLTGKKPNISYFRVFGSKCFILVKRGRKSKFAPKTVEGFLLGYDSNTRAYRIFNKSTGLVEVSCDVVFDETNGSQVEQVDLDEIGIEEVPCIALRNMSIGDVCPKESEEPPKAQDQPSSSMQASPPTQNEEEAQVDEEEDQSNEPPQDDGIDQGGDANDQDKEDEEQRPPHPRVHQAIQRDHPVDTILGDIHKGVTTRSRVAHFCEHYSFVSSIEPHRVEEALQDSDWVVAMQEELNNFTRNEVWHLVPRPNQNVVGTKWVFRNKQDEHGVVTRNKARLVAKGYSQVEGLDFGETYAPVARLESIRILLAYATYHGFKLYQMDVKSVFLNGPIKEEVYVEQPPGFEDSEYPNHVYKLSKALYGLKQAPRAWYECLRDFLIANGFKVGKADPTLFTKTLENDLFVCQIYVDDIIFGSTNESTCEEFSRIMTQKFEMSMMGELKYFLGFQVKQLQEGTFISQTKYTQDILNKFGMKDAKPIKTPMGTNGHLDLDTGGKSVDQKVYRSMIGSLLYLCASRPDIMLSVCMCARFQSDPKESHLTAVKRILRYLAYTPKFGLWYPRGSTFDLIGYSDADWAGCKINRKSTSGTCQFLGRSLVSWASKKQNSVALSTAEAEYIAAGHCCAQLLWMRQTLRDYGYKLTKVPLLCDNESAIKMADNPVEHSRTKHIAIQYHFLRDHQQKGDIEISYINTKDQLADIFTKPLDEQTFTKLRHELNILDSRNFFC

SEQ ID NO: 10302 - protein, 1892 aa, Zea mays
  Clone ID: TF_ZmC951_364.pep
MSGDHAKKEMETGEKPTTSHGSTSSEESRTKRREKKKSSSIKGKEKKSSSHHKEKKEKSSSHKPHRKGDKHKRMRKVVYYETDTSSTSTSDSDAPSVTSKRQERKKYSKIPLRYPRISKHTPLLSVPLGKPPTFDGEDYARWSDLMRFHLTSLHKSIWDVVEFGAQVPSVGDENYDEDESAKEIWDVLKTAHEGDELTKITKRETIEGELGRFRLRKGEEPQHMYNRLKTLVNQVRNLGSKKWDDHEVVNVILRSLIFLNPTQVQLIRGNPRYTKMTPEEVIGHFVSFECMIEGSRKINELGDPSEAQPVAFKATEEKKEESTPSRQPIDASKLDNEEMALVIKSFCQILKQRRGKDYKSRSKKVCYKCGKPGHFIAKCPISSDSDRGDDKKGRRKEKKRYYKKKGGDAHVCREWDSDESSSDSSDDEDAANIAVTKGLLFPNVGHKCLMAKDDKKKKVKSNSSTKYESSSDDNASDEEDNLRSLFANLNVAQKEKLNELVSAIHEKDDLLDSQEDCLIKENKKHVKVKKAYALEVEKCEKLSSELSTCREMIDNLRNENASLNAKVDSHVCNVSIPNPRDNNDDLLARIEELNISLASLRLENESLIAKAKDFDVCKVTIANLRDKNDILHAKIVELNSCKPSTSIVEHVSICTRCRNVDIDAIHDHMALIKQQNDHIAKLDAKIAEHNLENEKFKFARSMLYNGRRPGIKDGIGFQRGDNVKLNAPPKNLSNFVKGKAPMPQDNEGYILYPAGYPESKIRKIHSRKSHSGPNHAFMYKGETSSSRQPTRAKLPRKKISNASNEHSISFKTFDASYVLTNKTGKVVAKFVGGKHKGSKTCVWVPKVLVSNAKGPKTVWVYASGGSSWILDSGCTNHMTGEKRMFSSYEKNKDPQRAITFGDGNQGVTVFRRSDDSIAFKGVLEGQLYLVDFDRAELDTCLIAKTNMGWLWHRRLAHVGMKNLHKLLKGEHILGLTNVHFEKDRICSACQAGKQVGVHHPHKNIMTTDRPLELLHMDLFGPIAYISIDGSKYCLVIVDDYSRFTWVFFLQEKSQTQETLKGFLRRAQNEFALRIKKIRSDNGTEFKNSQIESFLEEEGIKHEFSSPYTPQQNGVVERKNRTLLDMARTMLDEYKTPDRFWAEAVNTACYAINRLYLHRILKKTSYELLTGKKPNISYFRVFGSKCFILVKRGRKSKFAPKTVEGFLLGYDSNTRAYRVFNKSTGLVEVSCDVVFDETNGSQVEQVDLDEIGEEQAPCIALRNMSIGDVCPRESEEPPNAQDQPSSSKQASPPTQNEDEAQVDEGQNQEDEPPQDDGNDPGGDAIDQEKEDEEEPRPPHPRVHQAIQRDHPVDTILGDIHKGVTTRSRVAHFCEHYSFVSSIEPHRVEEALQDSDWVVAMQEELNNFTRNEVWHLVPRPNQNVVGTKWVFRNKQDEHGVVTRNKARLVAKGYSQVEGLDFGETYAPVARLESIRILLAYATYHGFKLYQMDVKSAFLNGPIKEEVYVEQPPGFEDSEYPNHVYRLSKALYGLKQAPRAWYECLRDFLIANGFKVGKADPTLFTKTLENDLFVCQIYVDDIIFGSTNESTCEEFSRIMTQKFEMSMMGELKYFLGFQVKQLQEGTFICQTKYTQDILTKFGMKDAKPIKTPMGTNGHLDLDTGGKSVDQKVYRSMIGSLLYLCASRPDIMLSVCLCARFQSDPKESHLTAVKRILRYLAYTPKFGLWYPRGSTFDLIGYSDADWAGCKINRKSTSGTCQFLGRSLVSWASKKQNSVALSTAEAEYIAAGHCCAQLLWMRQTLRDYGYKLTKVPLLCDNESAIKMADNPVEHSRTKHIAIRYHFLRDHQQKGDIEISYINTKDQLADIFTKPLDEQSFTRLRHELNILDSRNFFC

SEQ ID NO: 10303 - protein, 1923 aa, Zea mays
  Clone ID: TF_ZmC951_366.pep
MSGDHAKKEMETGEKPTTSQGSTSSEESHTKRKEKKKDSSKRKEKKSSSSHHKEKKEKSSSHKPHRRGDKHKRMRKVVYYETDTSSTSTSDSDAPSVTSKRQERKKYSKIPLRYPGISKHTPLLSVPLGKPPTFDGEDYARWSDLMRFHLISLHKSIWDVVEFGAQVPSVGDENYDEDEVAQIEHFNSQATTILLASLSREEYNKVQGLKSAKEIWDVLKTAHEGDELTKITKRETIEGELGRFRLRKGEEPQHMYNRLKTLVNQVRNLGSKKWDDHEVVNVILRSLIFLNPTQVQLIRGNPRYTKMTPEEVIGHFVSFECMIEGSRKINELGDPSEAQPVAFKATEEKKEESTPSRQPIDASKLDNEEMALVIKSFRQILKQRRGKDYKSRSKKVCYKCGKPGHFIAKCPISSDSDRGDDKKGRRKEKKRYYKKKGGDAHVCREWDSDESSSDSSDDEDAANIAVTKGLLFPNVGHKCLMAKDGKKKKVKSNSSTKYESSSDDNASDEEDNLCSLFANLNIAQKEKLNELVSAIHEKDDLLDAQEDCLIKENKKHVKVKNAYALEVEKCQKLSSELSTCREMIDNLRNENAILNAKVDSHVCNISIPNLRDDNVDLLAKIDELNVSLASLRLENEDLIAKAKDFDICKVTISDLSDKNDILHAKIVELNSCKPSTSIVEHVSICTRCRDVDIHAIHDHMALIKQQNDHIAKLDAKIAEHNLENEKFKFARSMLYNGRRPGIKDGIGFQRGDNVKINAPPKNLSNFVKGKAPMPQDNEGYILYPAGYPESKIRRIHSRKSHSGPNHAFMYKGETSSSRQPTRAKLPRKKTPNASNDHAISFKTFDASYVLTNKSGKVVAKFVGGKHKGSKTCVWVPKVLVSNAKGPKTVWVYASGGSSWILDSGCTNHMTGEKRMFSSYEKNQDPQRAITFGDGNQGVTVFRRSDDSIAFKGVLEGQLYLVDFDRAELDTCLIAKTNIGWLWHRRLAHVGMKNLHKLLKGEHILGLTNVHFEKDRICSACQAGKQVGVHHPHKNIMTTDRPLELLHMDLFGPIAYISIGGSKYCLVIVDDYSRFTWVFFLQEKSQTQETLKGFLRRAQNEFGLRIKKIRSDNGTEFKNSQIEGFLEEEGIKHEFSSPYTPQQNGVVERKNRTLLDMARTMLDEYKTPDRFWAEAVNTACYAINRLYLHRILKKTSYELLTGKKPNISYFRVFGSKCFILVKRGRKSKFAPKTVEGFLLGYDSNTRAYRVFNKSTGLVEVSCDVVFDETNGSQVEQVNLDEIGDEEAPCIALRNMSIGDVCPKESEESPNTQDQPSSSTQASPPTQNEDETQVDEGQNQEDEPPQDDGNDQGGDANDQEKEDEEEPRPPHPRVHQAIQRDHPVDTILGDIHKGVTTRSRVAHFCEHYSFVSSIEPHRIEEALQDSDWVVAMQEELNNFTRNEVWHLVPRPNQNVVGTKWVFRNKQDEHGVVTRNKARLVAKGYSQVEGLDFGETYAPVARLESIRILLAYATYHGFKLYQMDVKSAFLNGPIKEEVYVEQPPGFEDSEYPNHVYRLSKALYGLKQAPRAWYECLRDFLISNGFKVGKADPTLFTKTLENDLFVCQIYVDDIIFGSTNESTCEEFSRIMTQKFEISMMGELKYFLGFQVKQLQEGTFICQTKYTQDILTKFGMKDAKPIKTPMGTNGHLDLDTGGKSVDQKVYRSMIGSLLYLCASRPDIMLSVCMCARFQSDPKESHLTAVKRILRYLAYTPKFGLWYPRGSTFDLIGYSDADWAGCKINRKSTSGTCQFLGRSLVSWASKKQNSVALSTAEAEYIAAGHCCAQLLWMRQTLRDYGYKLTKVPLLCDNESAIKMADNPVEHSRTKHIAIRYHFLRDHQQKGDIEISYINTKDQLADIFTKPLDEQSFTKLRHELNILDSRNFFC

SEQ ID NO: 10304 - protein, 936 aa, Zea mays
  Clone ID: TF_ZmC951_372.pep
MSGDHAKKEMVTGEKPTTSHGKASSEESRNKGKGKEKKPSSHKSHRSGDKKKKMRKVVYYETDTSSPSTSGSDAPSITSKRHERKKFSKIPLRYPRTPRHTPLLSVPLGKPPTFDGEDYARWSDLMRFHLTSLHKSIWDVVEFGVQVPSVGDEDYDEDEVAQIEHFNSQATTILLASLSREEYNKVQGLKSAKEVWDVLKTAHEGDELTKITKRETIEGELGRFRLRQGEEPQDMYNRLKTLVNQVRNLGSKKWDDHEMVKVILRSLVFLNPTQVQLIHGNPRYTLMTPEEVIGNFVSFEFMIKGSRKINELDGPSTSEAQPVAFKATEEKEESTSSRTPIDASKLDNEEMALQRRGKDYKPRSKKVCYKCGKPGHFIAKCPISSDSDRGNDKKGRRKEKNKYYKKKGGDAHVCREWDSDESSSDSSSDEDATNIAINKGLLFPNVGHKCLMAKDDKKKKVKSKSSTKYETSSDDNASDEEDNLCTLFANLNMQQKEKLNELISVIHEKDDLLDTQEDFLIKENKKHVKVKNAYALEVEKCEKLSSELSICNETIDNLRNENASLNAKVDSNVCNVLIPNLKDDNVDLLAKIEELNVTLASLRIENEKLIAKAKELDICNASISDLRSKNDILHAKVVELKTCKPSTSTVEHTTICTRCRDVNIDAIHDHMALIKQQNDHIAKLDAKIAEHDLENEKFKFARTMLYRGRRPGIKDGIGFQQGDNSRSDRRHSTAPLASLTEGQRRLRHSDCSATRQSESDRQSGLAKGTTANSAPPDPRARTRAKTRKTANSAPPDPRARTRAKTRKTANSAPPDPRARTRAKTRKTANSAPPDPRARTRAKTRKTANSAPPDPRARTRAKTRKTANSAPPDPRARTRAKTRKTANSAPPDPRARTRAKTRKTANSAPPDPRARTRAKTRKTTKLRSARPQGSDSG

SEQ ID NO: 10305 - protein, 1307 aa, Zea mays
  Clone ID: TF_ZmC951_395.pep
MSGDHAKKEMETGEKPTTSQGSTSSEESRTKRKEKKKISSNKGKEKKSSSHHKEKKEKSSSHKPHRSKDKQKRMRKVVYYETDTSSTSTSGSDAPSVTSKRQERKKFSKIPLHYPRISKHAPLLSVPLGKPPTFDGEDYARWSDLMRFHLTSLHKSIWDVVEFGAQVPSVGDKDYDEDEVAQIEHFNSQATTILLAFLSREEYNKVQGLKSAKEVWDVLKTAHEGDELTKITKRETIEGELGRFRLRKGEEPQHMYNRLKTLVNQVRNLGSVKWDDHEVVKVILRSLIFLNPTQVQLIRGNPRYTKMTPEEVIGNFVSFECMIEGSRKINELDDPSTSEAQPVAFKATEEKKEEATPTRQPIDASKLDNEEMALVIKSFRQILKQRRGKDYKSRSKKVCYKCGKPGHFIAKCPITSDSDRGDDKKGRRKEKKRYYKKKGGDAHVCREWDSGESSSDSSDDEDAANIAVTKGLLFPNVGHKCLMAKDGKRKKVKSNSSTKYESSSDDNASDEEDNLRSLFANLNIAQKEKLNELVSAIHEKDDLLDSQEDCLIKENKKHVKVKRAYALEIEKCEKLSSELSTCREMIDNLRNENASLNAKVDSHVCNISTSNPRDDNVDLHARIDELNASLASLRIENEKLLAKAKDFDVCKTTISDLRDKNDILHAKIVELNSCKPSTSIVEHVSICTRCRDVDVNAIHDHMALIKQQNDHIAKLDAKIAEHNLENEKFKFARSMLYNGRRPGIKEGIGFQKGDNVKINAPPKKLSNFVKGKAPMPQDNEGYILYPAGYPESKIRRIHSRKSHSGPNHAFMYKGETSSSRQPTHAKLPRKKTPSASNDHNISFKTFDASYVLTNKSGKVYASGGSSWILDSGCTNHMTGEKKMFSSYEKNQDPQRAITFGDGNQGLVKGVTVFRRSDDSIAFKGVLEGQLYLVDFDRAELDTCLIAKTNMGWLWHHRLAHVGMKNLHKLLKGEHILGLTNVHFEKDRICSACQAGKQVGTHHPHKNIMTTDRPLELLHMDLFGPIAYISIGGSKYCLVIVDDYSRFTWVFFLQEKSQTQETLKGFLRRAQNEFALRIKKIRSDNGTEFKNSQIEGFLEEEGIKHEFSSPYTPQQNGVVERKNRTLLDMARTMLDEYKTSDRFWAEAVNTACYAINRLYLHRILKKTSYELLTGKKPNISYFRVFGSKCFILVKRGRKSKFAPKTVEGFLLGYDSNTRAYRVFNKSSGQVEVSCDVVFDETNGSQVEQVDLDEIGDEEAPCIALRNMSIGDVCPKESEEPPNAQDQPSSSMQASPPTQNEDEAQIDEE

SEQ ID NO: 10306 - protein, 1071 aa, Zea mays
  Clone ID: TF_ZmC951_399.pep
MVTGDKPTTSHGKASSEESHNKGKGKEKKSSSHKSHRSGDKKKKMMKVVYYETDTSSPSTSGSNAPSVTSKRHERKKFSKIPLRYPRIPKHTPLLSVPLGKPPTFDGEDYARWSDLMRFHLTSLHKSIWDVVEFGVQVPSVGYEDYDEDEEAQIEHFNSQATTILLGSLSREEYNKVQGLKSAKEVWDVLKTAHEGDELTKITKRETIEGELGRFRLRQGEEPQDMYNRLKTLVNQVRNLGSKKWDDHEMVKVILRSLVFLNPTQVQLICGNPRYTLMTPEEVIGNFATEEKKEESTSSRTPIDASKLDNEEMTLIIKSFRQILKQRRGKDYKPRSKKVCYKCGKPGHFIAKCPISSDRGDDKKGRRKEKKKYYTKKGDDAHVCREWDSDESSTDSSSDEDAANIAVTKGLLFPNVSHKCLMAKDGKRKKVKSRSSTKYETSSDEDNASNEEDNLRILFANLNMQQKEKLNELISAIHEKDDLLDTQEDFLIKENKKHVKVKNAYALEVEKCEKLSSELSTCHETIDNLRNENASLIAKVDSNACNVSIPNLRDDNVDLLAKIEELNISLASFRIENEKLLAKAKELDVCNASISDLRSKNDILHAKVVELKSCKPSTSIVEHTSICTRCRDINVDAIHDHMALIKQQNDHIAQLNAKINEHDLENEKFKFARSMLYNGRRSGIKDDIGFQKGDNVKLNAPPKKLSNFVKGKAPMPQDNEGYILYPVGYLESKIRRIHSRKSHSGPNHAFMYKGETSSSRQSTHAKLPKKKTPSASNNHNISFKTFDASYVLTNKSGKVYASGGSSWVIDSGCTNHMTWEKEMFSSYEKNQDPQRAITFGDGNQGVTVFRRSDDSIAFKGVLEGQLYLVDFDRAELDTCLIAKTNMGWLWHLRLAHVGMKNLHKLLKGEHILGLTNVHFEKDRICSACQAGKQVGAHHPHKNIMTTDRPLELLHMDLFGAIAYISIGRSKYCLVIVDDYSRFTWVFFLQEKSYTQETLKGFLRQAQNEFDLRIKKIRSDNGTEFKSSQIEGFLEEEGIKHEFSSPYTPQQNGVVERKNRALIPIESLLEGG

SEQ ID NO: 10307 - protein, 1215 aa, Zea mays
  Clone ID: TF_ZmC951_408.pep
MRKVVYYETDTSSPSTSGSDASSITSKRHERKKFSKIPLRYPRIPKHTPLLSIPLGKPPMFDGEDYARWSDLMRFHLSSLHKSIWDVVEFGVQVPSVGDEDYDEDEVAQIQHFNSQASTILLASLSREEYNKVQGLKGAKEIWDTLKTAHEGDEVTKITKRETIEGELGRFRLRQGEEPQDMYNRLKTLVNQVRNLGSKKWDDHEMVKVILRSLVFLNPTHVQLIRGNPRYTLMTPEEVIGNFVSFELMIKGSKKINELDGPSTSEAQPVAFKTTEEKKEESTPSRTPIDASKLDNEEMALIIKSFRQILKQRRGKDYKPRSKKVCYKCGKPGHFIAKCPISSDSDRGDDKKGRRKEKKKYYKKKGGDAHVCREWDSDESSTDSSSDEDAANISVTKGLLFPNVGHKCLMAKDDKKKKVKSRSSTKYETSSDEDDASNEEDNLRILFANLNMQQKEKLNELISAIHEKDDLLDTQEDFLIKENKKHVKVKNAYALEVEKCEKLSSELSTCHETIDNLRNENANLLAKVDSNVCDVSIPNLRNDNDDLLAKIEELNISLASLRIENGKLLAKAKELDVCNITISDLRDKNDILCAKIVELNSCKPSTSTTEHVTICTRCRDVDVNAIHDHLSMIKQQNDHIAKLDAKIAEHELENKKFKFARSMLYNGRRPGIKDGIGFQRGGNVKLNAPPKKLSNFVKGKAPMPQDNEGYILYPAGYPESKIRRIHSRKSHSGPNHAFMYKGETSSSRQPTRAKLPKKKTPSASNDHDISFKTFDASYVLTNKSGKVYASGGSSWIIDSGYTIHMTGEKKMFSSYEKNQDPQRAITFGDGNQGVTVFRRSDDSITFKGVLEGQLYLEKSHTQETLKGFLRRAQNEFGLRIKKIRSDNGTEFKNSQIEGFLEEEGIKHEFSSPYTPQQNGVVERKNRTLLDMARTMLDEYKTSDRFWAEAVNTACYAINRLYLHRILKKTSYELLTGKKPNISYFIVFGSKCFILVKRGRKSKFAPKTVEGFLLGYNSNTRAYRVFNKSSGLVEVSCDVVFDETNGSQVEQVYLDEIGDEEAPCIALRNMSIGDVCPKESEEPPNAQDQPSSSTQASPPTQNENEAQVDEGEDQENEPPQDDDNDQGGDANDQDKEDEEPRPPHPRVHQAIQRDHLIDTILGDIHKGVTTRSRVAHFCEHYSFVSSIEPHRVEEALQDSDWVVAMQEELNNFTRNK

SEQ ID NO: 10308 - protein, 1662 aa, Zea mays
  Clone ID: TF_ZmC951_410.pep
KKEIVTGGDKSTSHGKAPSGESDNKMKGSPSHAKSHRSGDKKKKMKKVVYYETDSSSSSTSGSDTPYVTSKRHERKKFSKPPIFDGEDYYMLSDKMRHHLTSLHASIWNVVKIGVQVPSPGDKDYDSDKVAQIRHFNSQATAIILASLSREEYNKVQGLKSAKEIWDVLKTAHEGDEVTKITKRETIEGELGCFMLNQGEDLQAMYNRLKTLVNQVRNLGSTKWDDHEMFKVILRSLVFLNPTQVQLIRGDPRYKLMSPEEVIGKIVSFELMIKGSKKIIEQGTTSTSEVQPVAFKATEEEKKDSTPSSVPIDASKLDNEEMALIIKSFRQILKQRRGKDYKPRSKKVCYKCGKPGHFIAKCPISSDSDRGDDKRGKKKEKKRYYKKKGGDAHVCREWDSDESSTDSSDDEDAANITINKGLLFPNVGHKCLMAKDDKKKKVKSRSSTKYATSSDEDNSSDDEDNLLTLFANLNMQQKEKLNELISAIHEKDELLDSQEDFLIKENKKYVKRCMGSDQLRGKWVTRLVGKALHFMNSHLWCDKVKNAYAQEVEKCEKLTSELSICHDTISNLRIENANLIAKVEKSNICDDSIINLRNDNASLIAKIDKLNASLASLKIINEQLIAKAKDLNVCNDAITNLRDENAILHARIVELNDCKPSTSMIDHVSICTRYRDVNVDAIHDHLALIKQQNDHIATLTAKINEHDLENEKFKFARSMLYSGRRPDINDGIGFQQGDNVKLNAPPKRLSNFVKGKAPMPQDNEGYILYPAGYPEDKIRRIHAKKTHYVSHHAFIYKNEASSSRRSTHVKMPKMKSPIASNDHNISFKTFDASYVLTNKSGKVYASGGSSWIIDSGCTNHMTGEKRMFSSYEKNQDPQRAITFGDGNQGVTVFRRSDDSVAFKGVLEGQLYLVDFNRAELDTCLIAKTNMGWLWHRRLAHVGMKNLHKLLKGEHILELTNVHFEKDRICSACQAGKQVGVHHPHKNIMTTDRPLELLHMDLFGQIAYISIGGRKSQTQETLKGFLRRAQNEFGLRIKKIRSDNGMEFKNSQIEGFLEEEGINHEFSSPYTPQQNGVVERKNRTLLDMARTMLDEYKTSDRFWVEAVNTACYAINRLYLHRILKKTSYELLTGKKPNVSYFRVFGSKCFILVKRGRKSKFAPKAVEGFLLGYDSNTRAYRVFNKSTGLVEVSFDIVFDETNGSQVGQVDLDELDEEEALCVALTNMSIGDVCPKESEEPPQAQDRPSSSTQASPPTQDEDQAQDDENEDQEDEPSQKESNDQGGDDNDQDKEDEQDPRPPHPRPHRVEDALKDLDWVLAMQEDLNNFTRNELYQMDVKNAFLNGPIKEEVYVEQPPGFEDSEYPNHVYKLSKALYGLKQAPRAWYECLRDFLITNGFKVGKVDPTLFTKTIAKDLFVCQIYVNDNIFGSTNKSTCEEFSRIMVQKFEMSMMGELKYFLGFQVKQLQESTFISQTKYIQDILTKFGMKDAKPIKTPMGTNGHLDLDTGGYSDADWAVCKIDRKSTSGTCQFLGRSLVSWASKKQNSVALSTAEAEYIAAGHCCAQLLWMRQTLRDYGYKFSKVPLLCDNESAIRMADNPVEHSRTKHIAIQYHFLRDHQQRRDIEIAYINTKDQLADIFTKPLDEKTFTKLRNELNILDSRNFD

SEQ ID NO: 10309 - protein, 1575 aa, Zea mays
  Clone ID: TF_ZmC951_433.pep
MSGDHAKKEMVTGEKPATSHGKALSGESYNKGKGKEKESPSHNSRRSGDKKKKMRKVVYYETDTSSPSTSGSDTPSVTSKRHERKKFSKIPLRYPRIPKHTPLLSVPLGKPPTFDGEDYARWSDLMRFHLTSLHKSIWDVVEFGVQTAHEGDEVTKITKWETIEGELGRFRLRQGEEPQDMYNRLKTLVNQVRNLGSKKWDNHEMVKVIGNFVSFELLIKGSKKINELDGPSTSEAQPVAFRATEEKKEESTSSRQPIDASKLDNEEMALVIKSFRQILKQRRGKDYKSRSKKVCYKCGKPGHFIAKCPISSDSDRGDDKKGRRKEKKRYYKKKGGDAHVCREWDFDESTTDSSSDEDAANIAINKGLLFPNVGHKCLMAKDGKKKKVKSKSSTKYESSSDDNASDEEDNLRTLFANLNMQQKEKLNELISAIHEKDELLDTQEDFLIKENKKHVNVKNAYALEVEKCEKLTSELSTCHDLIANLRNENANLIAKVDSNDCDVSTPNLRNDNVDLLAKIEELNISLASLRIENEKLLAKAKELDVCNASISDLRSKNDILHAKVVELKSCKPSTSTVEHTSICARCKDINVDAIHDHLALIKKQNYHIAQLNAKISEHDLEDEKFKFARSMLYSGRRPGIKDGIGFQKGDNVKLNAPPKRLSNFVKGKAPMPQDNEGYILYPAGYPESKIRRIHSRKSHSGPNHAFIYKGETSSSRQSTHAKLPKKKTPKASNDSNISFKTFDASYVLTNKSGKVYASGGSSWIIDSGCTNHMSGEKEMFSSYKKNQDPQRAITFGDGNQDVGVTVFRRSDDSIAFKGVLEGQLYLVDFDRAELDTCLIAKTNMGWLWHRRLAHVGMKNLHKLLKGEHILGLTNVHFEKDRICSACQAGKQVGVHHPHKNIMTTDRPLELLHMDLFGPIAYISIGGKTLKGFLRRAQNEFGLRIKKIRSDNRTEFKNSQIEGFLEEEGIKHEFSSPYTPQQNGVVERKNRTLLDMARTMLDEYKTLDRFWAEAVNTACYAINRLYLHRILKKTSYELLTGKKPNISYFRVFGSKCFILVKRGRKSKFAPKTVEGFLLGYDSNTRAYRVFNKSTGQVEVSYDVVFDETNGSQVEQVDLDEIGIEEALCIALRNMSIGDVCPKESEEPPNAQDQPSFSTQASPPTQNEDEAQVDEIEDQANEPPQDDGNDQGGDANDQDKEDEEQRPPHPRVHQAIQRDHPVDTILGDIHKGVTTRSRVAHFCEHYSFVSSIEPHRVEEALQDSDWVVAMQEELNNFTRNEVWHLVPHPNQNVVGTKWVFRNKQDEHGVVTRNKARLVAKGYSQVEGLDFGETYAPVARLESIRILLAYATYHGFKLYQMDVKSAFLNGPIKEEVYVEQPSDFEDSEYPNHVYKVSKALYGLKQAPRAWYECLRDFLITNGFKVGKADPTLFTKTLENDLFVCQIYVDGIIFGSTNESTCEEFSRIMTQKFEMSMMGELKYFLGFQVKQLQEGTFLSQTKYTQDILSKFGMKDAKPIKTPMGTNGHLDLDEGGKSVDQKVISNQVIGVLKGNWSLRRRQRLPLRNSSFTVAPSHSPS

SEQ ID NO: 10310 - protein, 1689 aa, Zea mays
  unsure (1)..(1689): unsure at all Xaa locations
  Clone ID: TF_ZmC951_439.pep
MSGDHAKKEMVIGGNKPTSPAKATSHGKAPSKESGNKKKKGSPSRIRTHKSGEKKKMKKVVYYETDSSSPSTSGSDAASITSKRQERKKYSKIPLRYPRIPRHTPLLSVPLGKPPTFDGEDYSRWSDMMRYHLTSLHKSIWDVVEFGVQVPTVGDEDYDEDEVAQIEHFNSQATTILLTSLSREEYNKVQGLKSAKEIWDVLKIVHEGDEVTKITKRETIERELSRFMLHQGEEPQTMYNQLKTLMNQVRNLGSTKWDDHEMVKVILRSLVFLNPTQVQLIRGDPRYKLMSPEEVIGKFVSFELMIKGSKKIIEQGAPSTPEVQPVAFKATEEKKEECTSSRLPIDASKLDNEEMALIIKSFRQILKQRRGKDYKPRSKKVCYKCGKPGHFIAKCPISSDSDRGDDKKGKRREKKKYYKKKGGDAHVCWEWDSDESSIDSSDEDAANIAVNKGLLFPNVGHKCLMAKDGKKKKVKSKSSTKYTTSRDEDNSSDDEDNLLTLFANINMQQKEKLNELISAIHEKDELLDSQEDFLIKENKKHVKTKNAYALEVEKCEKLTSKLSTCHNVISNLRDENAKLIAKVEKLDICDDSIISLRNDNASLITKIDNLNASLSSLKIANEKLIAKAKDLNVCNVSISNLRDENAILHAKIVDLNTCKPSTSIVEHVTICTRCRDINVDTIQDHLALIKKQNDHIAQLSAKIDEHDLENENFKFARSMLYSGRRPGIKDGIGFQQGDNVKLNTPPKRLSNFVRXKAPMAQDNEGYILYPVGYPEHKIRRIHSRKSHSGSHHAFMYKSXYASGGSSWITDSGCTNHMTREKRMFSSYEKNHDLQRAITFGDGNQAHVGMKNLHKLLKGEHILGLTDVHFEKDREKSQTQETLKGFLRRAQNEFGLRIKKIRSDNGTEFKNSQIEGFLEEEGIKHEFSSSYTPQQNGVVERKNRTLLDMARTMLDEYKTSDRFWAEAVNTACYAINRLYLHRILKKTSYELLTGKKPNVSYFRVFGSKCFILVKRGRKSKFAPKVVEGFLLGYDSNTRAYRVFNKSTGLVEVSCDILFDETNGSQVEQVDLDELDDEEASCVALRNMSIGDVCPKESEEPPHAQDQPSSSMQASPPTQDEDQAQDDENGDQEEPPQEEDNDQGGDVDDQDKEDDEGPRPPQPSVHHAIQRDHPVNTILGDIHKGVTTRSRVAHFCEHYSFVSSIEPYRVEDALRDSDWVLAMQEELNNFTRNEVWHLVPHPNQNVVGTKWVFRNKQDEHGVVTRNKARLVAKGYSQVEGLDFGETYAPVARLESIHILLAYATYHGFKLYQMDVKSAFLNGPIKEEVYVEQPPGFEDSEYPNHVYKLSKALYGLKQAPRAWYECLRDFLITNGFKVGKADPTLFTKTIANDLFICQIYVDDIIFGSTNKSTCEEFSRIMIQKFEMSMMGELKYFLGFQVKQLQKGTFISQTKYIQDILTKFGMKDAKPIKPPMGTNGHLDLDTGDIMLSVCMCARFQADPKEVHLRAMKRILRYLVHTPKFGIWYPKGYTFDLIGYSDADWGGCKIDRKSTSGTCQFLGRSLVSWTSKKQNSGALSTAEAEYITAGHCCAQLLWMRQTLRDYGYKLTKVSLLCDNESAIRMADNPVEHSRTKHIAIRYHFLRDHQQRGDIEIAYVSTKEQLADIFTKPLDEKTFIKLRNELNILDSRKFD

SEQ ID NO: 10311 - protein, 1553 aa, Zea mays
  unsure (1)..(1553): unsure at all Xaa locations
  Clone ID: TF_ZmC951_446.pep
MSGDHAKKEMETDEKPTTSNENALSGESRNKEKRKEKKKEKKTSSHKSHRSGDKIKKMRKVVYYETDTSSPSTSGSDAPSITSKRHERKKFSKIPLHYPRTSRHTPLLFIPLGKPPVFDGEDYNMWSDKMRHHLTSLHTSIWNVVEFGVQVPSVGDEDYDSDEVAQIHHFNSQATTTLLASLSREEYNKVQGLKSAKEIWDVLKTAHEGDEVTKITKWETIEGELGRFMLHQGEDPQAMYNRLKTLVNQVRNLGSXKWDDHEMVKIXLMSPEEVIGKFVSFELIIKGSKKIIEQGTSYTPEAQPVAFKATEEKKEESTSSRQPIDASKLDNEEMALIIKSFRQILKQRRGKDYKPRSKKVCYKCGKPGHFIAKCPISSDSDRGDDKKGRRKEKKRYYKKKGGDAHVCREWDSNESSSDSSDDEDATNIAVTKGLLFPNVGHKCLMAKDGKRKKVKSKSSTKYESSSDDNASDEEDNLRTLFANLNMEQKEKLNELISAIHEKDDLLDSQEDFLIKENKKHVKVKNAYALEVEKCEKLSSELSTCHDTIANLRNENAKLITKVDSHVCNVSTFNPRDDNVDLLARIDELNVSLASLRIENEKLLAKAKDFDVCNITISNLRNENDILHAKVVELKSCKPSTSIVEHVSICTRCRDVDIDAIHDHMSLIKQQNDHIAKLDAKIAEHNLENEKFKFARSMLYNGTRPGIKDGIGFHRGDNVKLNAPPKRLSNFVKGKAPMPQDNEGYILYPAGYPESKIRRIHSRKSHSGPNHAFMYKGETSSXRQPTHAKLPKRKTPSASNDXYASGGSSWIIDSGCTNHMTGEKKMFSSYEKNKDPQRAITFGDGNQGVTVFRRSDDSIAFKGVLEGQLYLVDFDRAELDICLIAKTNMGWLWHRRLAHVGMKNLHKLLKGEHILGLTNVHFEKDREKSQTQETLKGFLRQAQNEFGLRIKKIRSDNGTEFKNSQIEGFLEEEGIKHEFSSPYTPQQNGVVERKNRTLLDMARTMLDEYKTSDRFWAEAVNTACYAINRVFGSKCFILVKRGRKSKFAPKTVEGFLLGYDSNTRAYRVFNKSSGLVEVSCDVVFDETNGSQVEQVDLDEIGDEEAPCIALRNMSIGDDEAQVDEVEDQANEPPQDDDNDQGGDANDQDKEDEEQRPPHPRVHQAIQQDHPVDTILGDIHKGVTTRSRVAHFCEHYSFVSSIEPHRVEEALQDSDWVVAMQEELNNFTRNEWVFRNKQDEHGVVTRNKARLVAKGYSQVEGLDFGETYAPVARLESIRILLAYATYHGFKLYQMDVKSAFLNGPIKEEVYVEQPPDFEDSEYPNHVYKLSKALXYWLKQAPRAWYECLRDFLITNGFKVGKADPTLFTKTIKNDLFVCQIYVDDIIFVSTNKSICEEFSRIMIQKFEMSMMGELKYFLGFQVKQLQEGTFISQTKYIQDILTKFGMKDAKLIKTPMGTNGHLDLDTRVIELKGKWSIRQRRRFHSTPLVFAGAKGSQQTNTKIKERVQNKEQSQTEGNPGLTHRIVRCATGQCPVHQGGFTRTCQPREFGEAAPL

SEQ ID NO: 10312 - protein, 1645 aa, Zea mays
  Clone ID: TF_ZmC951_448.pep
MSGEHAKKEMETGEKPATSHGKASSEESRNKKKGKDKKASSHKSHRSGDKKKKMRKVVYYETDTSSPSTSGSDAPSITSKRHERKKFSKIPLHYPRTSRHTPLLSVPLGKPPTFDCEDYARWSDLMKFHLTSLHKSIWNVVEFGAQVPSVGDEDYDEDEVAQIEHFNSQATTILLASLSREEYNKVQGLKSAKEVWDVLKTAHEGDELTKITKRETIEGELGRFRLRQGEEPQDMYNRLKTLVNQVRNLGSKKWDDHEVVKVILRSLIFLNPTQVQLIRGNPRYTLMTPEEVIENFVSFEFMIKGSRKINELDGPSTSEAQPVAFKATEEKEEESTLSRTPIDASKLDNEEMALVIKSFRQILKQRRGKDYKPRSKKVCYKCGKPGHFIAKCPISSDSDRGDDKKGRRKEKKRYYKKKGGDAHVCREWDSDESSSDSSDDEDAANIAITKGLLFPNVGHKFLMAKYGKKKKVKSKSSTRYESSSDDNASDEEDNLRTLFANLNMQQKEKLNELISAIHEKDDLLDSQEDFLIKENKKHVKVKNAYALEVEKCEKLSSELSTCHETIDNLRNENANLLAKVDSNICNVSISNLRNDNDDLLAKIEELNMSLASLRMENEKLLAKAKNFDVCNTTISDLRTKNDILHAKVVELKSCKPSTSTAEHTSICTRCRDVDVNAIHDHMALIKQQNDHIAKLDAKIAEHDLENENFKFARSMLYKGRHPGIEDGIGFQQGGNVKINAPPKKLSNFVKGKAPMPQDNEGYILYPAGYPENKIRRIHSRKSHSGPNHAFMYKGETSSSRQPTRAKLPKKKTPNASNDHSISFKTFDASYVLTNKSGKVVAKYVGGKHKGSKTCVWVPKVLVSNAKGPKTIWIYASGGSSWIIDSGCTNHMTGEKKMFSSYEKNQDPQRVITFGDGNQGVTVFRRSDDSIAFKGVLEGQLYLVDFDRAELDTCLIAKTNMGWLWHRRLAHVGMKNLHKLLKGEHILGLTNVHFEKDRICSACQAGKQVGAHHPHKNIMTTDRPLELLHMDLFGPIAYISIDGSKYCLVIVDDYSRFTWVFFLQEKSHTQETLKGFLRQAQNEFGLRIKKIRSDNGAKFKNSQIEGFLEEEGIKHEFSSPYMPQQNGVVERKNRTLLDMARTMLDEYKTSDRFWAEAVNTACYAINRVFGSKCFILIKRGRKSKFAPKTVEGFLLGYDSNTRAYRVFNKSSGLVEVSCDVVFDETNSSQVEQVDLDEIGGEEAPCIALRNMSIEDVCPKESEEPPNAQDQPSSSTQASPPTQNEDEAQVDAVENQANEPPQDDDNDQGGDANDQDKEDEEQRPPHPRVHQAIQRDHPVDTILGDIHKGVTTRSRVAHFFPRPNQNVVGTKWVFRNKQDEHGVVTRNKARLVAKGYSQVEGLDFGETYAPVARLESIRILLAYATYHGFKLYQMDVKSAFLNGPIKEEVYVEQPPGFEDSEYPNHVYKLSKALYGLKQAPRAWYGCLRDFLIDNGFKVGKADPTLFTKTLENDLFVCQIYVDDIIFGSTNESTCEEFSRIMTQKFEMSMMGELKYFLGFQVKQLQEGTFLSQTKYTQDILSKFGMKDAKPIKTPMGTNGLLDLDEGGKSVDQKGERVILRALMTPFLAIHAKGGENISPKQKDRTTT

SEQ ID NO: 10313 - protein, 1888 aa, Zea mays
  Clone ID: TF_ZmC951_449.pep
MSGDHAKKEMETGEKPTTSYGSTSSEESRTKRREKKKSSSNKGKEKKSSSHHKEKKEKSSSHKPHRKGDKHKRMRKVVYYETDTSSTSTSDSDAPSVTSKRQERKKYSKIPLRYPRISKHTPLLSVPLGKPPTFDGEDYARWSDLMRFHLISLHKSIWDVVEFGAQVPSVGDENYDEDEVAQIEHFNSQATTILLASLSKEEYNKVQGLKNAKEIWDVLKTAHEGDELTKITKRETIEGELGRFRLQKGEEPQHMYNRLKTLVNQVRNLGSKKWDDHEVVNVILRSLIFLNPTQVQLIRGNPRYTKMTPEEVIGHFVSFECMIEGSRKINELGDSSEAQPVAFKATEEKKEEATPSRQPIDASKLDNEEMALVIKSFRQILKQRRGKDYKSRSKKVCYKCGKPGHFIAKCPISSDSDRGDDKKGRRKEKKRYYKKKGGDAHVCREWDSDESSSDSSDDEDAANIAVTKGLLFPNVGHKCLMAKDGKKKVKSKSSTKYESSSDDNASDEEDNLRSLFANLNIAQKEKLNELVSAIHEKDDLLDSQEDCLIKENKKHVKVKKAYALEVEKCEKLSSELSTCREIIDNLRNENAILNAKVDSHVCDVSISTPRDNNDDLLARIEELNISLASLRVENEKLITKAKELDVCNVTISDLRTKNDMLHAKVVELKSCKPSTSIVEHVSICTRCRNVDIDAIHDHMILIKQQNDHIAKLDAKIAEHNLENEKFKFARSMLYNGRRPGIKDGIGFQRGDNVKLNAPPKNLSNFVKGKAPMPQDNEGYILYPAGYPENKIRKIHSRKSHSSPNHAFMYKGETSSSRQPTHAKLPKKKIPNASNDHAISFKTFDASYVLTNKSGKVYASGGSSWILDSGCTNHMTGEKKMFSSYEKNLDPQRAITFGDGNQGVTVFRRSDDSIAFKGLLEGQLYLVDFNRAELNTCLIAKTNMGWLWHRRLAHVGMKNLHKLLKGEHILGLTNVHFEKDRICSACQAGKQVGVHHPHKNIKTTDRPLELLHMDLFGPIAYISIGGSKYCLVIVDDYSRFTWVFFLQEKSQTQETLKGFLRRAQNEFGLRIKKIRSDNGTEFKNSQIEGFLEEEGIKHEFSSPYTPQQNGVVERKNRTLLDMARTMLDEYKTPDRFWAEAVNTACYAINRLYLHRILKKTSYELLTGKKPNISYFRVFGSKCFILIKRGRKSKFAPKTVEGFLLGYDSNTRAYRVFNKSTGLVEVSCDVVFDETNGSQVEQVDLDEIGEEQAPCIALRNMSIGDVCPKESEEPPSTQDQPSSSMQASPPTQNEDEAQNDEEQNQEDEPPQDDSNDQGGDTNDQEKEDEEEPRPPHPRVHQAIQRDHPVDTILGDIHKGVTTRSRVAHFCEHYSFVSSIEPHRVEEALQDSDWVVAMQEELNNFTRNEVWHLVPRPNQNVVGTKWVFRNKQDEHGVVTRNKARLVAKGYSQVEGLDFGETYAPVARLESIRILLAYATYHGFKLYQMDVKSAFLNGPIKEEVYVEQPPGFEDSEYPNHVYRLSKALYGLKQAPRAWYECLRDFLIANGFKVGKADPTLFTKTLENDLFVCQIYVDDIIFGSTNESTCEEFSRIMTQKFEMSMMGELKYFLGFQVKQLQEGTFISQTKYTQDILTKFGMKDAKPIKTPMGTNGHLDLDTGGKSVDQKVYRSMIGSLLYLCASRPDIMLSVCMCARFQSDPKESHLTVVKRILRYLAYTPKFGLWYPRGSTFDLIGYSDADWAGCKINRKSTSGTCQFLGRSLVSWASKKQNSVALSTAEAEYIAAGHCCAQLLWMRQTLRDYGYKLTKVPLLCDNESAIKMADNPVEHSRTKHIAIRYHFLRDHQQKGDIEISYINTKDQLADIFTKPLDEQSFTRLRHELNILDSRNFFC

SEQ ID NO: 10314 - protein, 1868 aa, Zea mays
  Clone ID: TF_ZmC951_450.pep
MSGDHAKKEMETGERPTTSHGSTSSEESRIKRKEKKKSSSNKGKEKKSSSHHKERREKSSSHKPRRSGDKHKRMRKVVYYETDTSSTSTSGSDAASVTSKRQERKKYSKIPLHYLRISKHTPLLSVPLGKPPTFDGEDYARWSDLMRFHLTSLHKSIWDVVEFGAQVPSVGDEGYDEDEVAQIEHFNSQATTILLASLSREEYNKVQGLKNAKEIWDLLKTAHEGDELTKITKRETIEGELGRFRLHKGEEPQHMYNRLKTLVNQVRNLGSVKWDDHEVVKVILRSLIFLNPTQVQLIRGNPRYTKMTPEEVIENFVSFECMIEGSRKINELDDATTSEAQPVAFKATEEKKEESTPSRQPIDASKLDNEEMALVIKSFRQILKQRKGKDYKSRSKKVCYKCGKPGHFIAKCPISSDSDRGDDKKGRRKEKKRYYKKKGGDAHICREWDSDESSSDSSDDEDAANIAVTKGLLFPNVGHKCLMAKDGKRKKVKSNSSTKYESSSDDNASDEEDNLRSLFANLNIAQKEKLNELVSAIHEKDDLLDSQEDCLIKENKKHVKVKKAYALEIEKCEKLSNELSTCREMIDNLRNENASLNTKVDSHVCNIPNPRNNNDDLLARIEELNISLASLKIENEKLLTKAKDLDICNATISDLRTKNDMLQAKVVELKSCKPSTSIVEHVSICTRCRDVNIDAIHDHMALIKQQNDHIAKLDAKIAEHNLENEKFKFARSMLYNGRRPGIKDGIGYQRGDNVKLNAPPKNLSNFVKGKAPMPQDNEGYILYPAGYPESKIRRIHSRKSHSGPNHAFMYKGETSSSRQPTRAKLPKKTPIASNEHNISFKTFDASYVLTNKSGKIVAKYVGGKHKGSKTCVWVPKVLVSNAKGPKTIWVYASGGSSWILDSGCTNHMTGEKKMFSSYEKNQDPQRAITFGDGNQGVTVFRRSDDSIAFKGVLEGQLYLVDFDRAELDTCLIAKTNMGWLWHRRLAHVGMKNLHKLLKGEHILGLTNVHFEKDRICSACQAGKQVGAHHPHKNIMTTDRPLELLHMDLFGPIAYISIGGSKYCLVIVDDYSRFTWVFFLQEKSQTQETLKGFLRRAQNEFGLRIKKIRSDNGTEFKNSQIEGFLEEEGIKHEFSSPYTPQQNGVVERKNRTLLDMARTMLDEYKTPDRFWAEAVNTACYAINRLYLHRILKKTSYELLTGKKPNISYFRVFGSKCFILVKRGRKSKFAPKTVEGFLLGYDSNTRAYRVFNKSTGLVEVSCDVVFDETNGSQVEQVDLDEIGNEEAPCIALRNMSIGDVCPKESEKPPSAQDQPSSSMQASPPTQNEDEAQDVEQEDHEDEPPQHDGNDQGRDTNDQEKEDEEELRLPHPRVHQAIQRDHPVDTILGDIHKGVTTRSRVAHFCEHYSFVSSIEPHRVEEALQDSDWVVAMQEELNNFTRNEVWHIVPRPNQNVVGTKWVFHNKQDEHGVATRNKARLVAKGYSQVEDLDFDETYAPIARLESIHILLSYATYHGFKLYQMDVKSAFLNGPINKEVYVEQPPGFKDNLFVCQIYVDDIIFGSTNKSTCEEFSRIMIQKFEMSMMGELKNFLGFQIKQLQEGTFISQTKYIQDILKKFGMKDGKPIKTPMGTNGHLDLDTGGKSVDQKVYRSMIGSLLYLCASRPDIMLSVCMCARFQADPKEVHLRVVKRIMRYLVYTPKFGLWYPKGSTFDLIGYFDADWTRCKIDRKSTSGTCQFLGRSLVSWASKKQNSIALSTAEAEYIAIGHCCAQLLWMRQTLRDYGYKLRKVPLQCDNESAIRMAYNPVEHSRTKHIYIQHHCLRDHQQNGDIEIAYVSTKEQLTDIFTKPLDEKTFSKLRNELNIHDSWNFD

SEQ ID NO: 10315 - protein, 1737 aa, Zea mays
  Clone ID: TF_ZmC951_451.pep
MSGEHANKEMETGDKPTTSHGKASSEESRKKGKGKEKKASSHKSHQSGDKKKKMRKVVYYETDTSSPSTSGFDAPSVTSKRHERKKFSKIPLHYPRTSRHTPLLSVPLGKSPTFDGEDYARWSDLMKFHLTSLHKSIWNVVEFGAQVPSVGDEDYDEDEVAQIEHFNSQATTILLASLSREEYNKVQGLKSAKEVWDVLKTAHEGDELTKITKRETIEGELGRFRLRKGEEPQDMYNRLKTLVNQVCNLESKKWDDHEMVKVILRSLIFLNPTQVQLIRGNPRYTLMTPEEVIGNFVSFEYMIKGSKKINELDDPSTSEAQPVAFKATEEKKEESTPSRQPIDASKLDNEEMTLVIKSFRQILKQRRGKDYKPRSKKVCYKCGKPGHFIAKCPISSDSDRGDDKKGRRKEKKKYYKKKGGDAHVCREWDSDESSSDSSDDEDAANIAINKGLLFPNVDHKCLMAKDDKKKKVKSKSSTRYESSSDDNASDEEDNLRTLFANINMQQKEKLNELISAIHEKDDLLDSQEDFLIKENKKHVKVKNAYALEVEKCEKLSSELSTCHETIDNLRNENANLLAKVDSNVCNVSIPNLRNDNDNLLAKIEELNITLASLRNENKNLLAKAKELDVCNITISDLRSKNDILHAKVVELKSCKPSTSTIEHTSICTRCRDVDINAIHDHMALIKQQNDHIAKLDAKIAEHELENEKFKFARSMLYSGRRPGIKDGIGFQKGDNVKLNAPPKKLSNFVKGKSLMAQDNEGYILYAAGYPESKIRRIHTRKSHSCPNHAFMYKGETSSSRQPTRAKLPKKKTPSASNDHDISFKTFDASYVLTNKSGKVVAKYVGGKHKGSKTCVWVPKVLVSNAKGPKTIWVYASEGSSWIIDSRCTNHMTGEKKMFSSYEKNQDPQRAITFGDGNQGVTVFRRSDDSVAFKGVLEGQLYLVDFDRAELDTCLIAKTNMGWLWHRRLAHVGMKNLHKLLKGEHILGLTNVHFEKDRICSACQAGKQVGAHHPHKNIMTTDRPLELLHMDLFGLIAYISIGGSKYCLVIVDDYSRFTWVFFLQEKSHTQETLKGFLRRAQNEFGLRIKKIRSDNGTEFKNSQHEGFLEEEGIKHEFSSPYTPQQNGVVERKNITLLDMARTMLDEYKTTDRFWAEAVNTACYAINRLYLHRILKKTSYELLTGKKPNISYFRVFGSKCFILVKRGRKSKFAPKTVEGFLLGYDSNTRAYRVFNKSSGQDEVSCDVVFDETNSSQVEQVDLDEIGDEEALCIALRNMSIGDVCPKESEEPPNAQDQPSSSTQASPPTQNEDEAQVDEGEDQANEPPQDDGNDQGGDANDQDKEDEEPRLPHPRVHQAIQRDHPVDTILGDIHKGVTTRSHVAHFCKHYSFVSSIEPHRVEEALQDSDWVVAMQEELNNFTRNEVWHLVPRPNQNVLGTKWVFRNKQDEHGVVTRNKARLVAKGYSQVEGLDFGETYAPVARLESIRILLAYATYHGFKLYQMDVKSAFLNGPIKEEVYVEQPPGFEDSEYPNHVYKLSKTLYGLKQAPRAWYECLRDFLIDNGFKVGKVDPTLFTKTLENDLFVCQIYVDDIIFGSTNESTCEEFSRIMTQKIEMSMMGELKYFLGFQVKQLQEGTFLSQTKYTQDILNKFGMKDAKPIKTPMGTNGHLDLDTEGAKGSHLANKKTKKWVQQKEQWITEGTPGLAHRTVWCATGQCPVHQGTPSQTLHLREIPGALAL

SEQ ID NO: 10316 - protein, 1627 aa, Zea mays
  Clone ID: TF_ZM3542.C1.o1.fg.pep
MPPRTRLTARKSTGPIGVPRHQLAPRHESSSSGSNDSIGDLEARVSRLQAALQHRTDAWVADEDRINELRRDIRHLQDQLADRDLALDWAVQSRLLACAKEARAQAQIKELSSTVDNLNVKWKVSLAHYVYFKCYLPQMSTRTRGQDAAGTSGGRDVTPNPPPVPPTLAEAIAALVNATADNTRFLREKAGQQQFQQQAGRGYQQGPRETTYLDFSETHPPLFIKAEDPLEADEWIRVIEQKFGLLRCSETQKPLFAAQQLRGPASTWWGNFVATQPVNHQVTWEEFKAAFREHYIPEGVLHMKQEEFMKLKQGGDTVNQYLNKFNHLSQYAIDQVNTDLKKKNCFMRGLNDRLQRKMAACIDLTYGKAVSTALSVEAKYASSGKNKGFGGERPNQGQAKKQQFVIRPSSQNHTFSRPPLFPFKQPIIIRPNNTPTTPNQPGAPGTRFPALPSSSTGCFNCGKSGHFIKDCPYPKQNQSNAPQGSGRSAQPKGNIVGKNTKKTGRVYYTQVATTPEGEPVMMGTFPVASHPAIILFDSGASHTFISKKFVEQHHIACHESKEGFKIHSPGGHIFTREVAYEVPVTMAGRNFPANMIVLKGQDIDVILGMNWLTQHKAILNTELRTVRLSYNQEEILLSLPVTNPAKASGRIYEAIVPEIKNIPVVCEFPDVFPEDLPGLPPERDVECVIELKPGTTPISRRSYRMPPNELAELKIQLQDLLNKGFIRPSSSPWGCPAIFVKKKDKTLRMCVDYRPLNEVTIKNKYPLPRIDILFDQLTGARVFSKIDLRSGYHQIRIRPKDIPKTAFTTRYGLFEYLIMSFGLTNAPAHFTYLMNSVFMPELDKFMVVFIDDILIYSKNEEDHAQHLRIVLTHLREHQLYAKFSKCAFWLEEIQFLGHVLSAKGIAVDPSKVKDILEWKPPTTVHQVRSFLGLAGYYRRFIPDFSKLVKPITSLLKNDIKFNWSSKCNEAFEQLKALLTTAPVLAQPDITKPFDVYCDASGSGLGCVLMQEGRIIAYASRQLRRHEEHYPTHDLELAAVVHALKIWRHYLLGNICHIYTDHKSLKYIFTQSELNMRQRRWLELIKDYELEIHYHPGKANVVADALSRKTSCHCLMVKTSENTLCQEMEKLNLGIIQQGTLNQLKLESIILQRIIDAQKDNLGMKHIREKIRAGVAKCFKEDDQGVIWFKNRIVVPKNEELRQQILDEAHLSRYSIHPGSTKMYQDLKQHYWWTKMKIEIARYVAKCDTCRRVKAIHMKTAGPLQSLPIPTRKWEDISMDFIVGLPRTAKGYDSIWVIVDRLTKIAHFLPVRAKYTVATYAALYIGRIISLHGIPKTIVSDRGPQFVSKFWEELHKSLGTKLLHSSAYHPQTSGQTERVNQILEDMLRACVLDFSQKWDECLPLAEFSYNNSYQESIKMAPFEALYGRRCRTPLNWSEPGERYFFRPDMVKEVEEKVHKIIHNMKKAQTRQKSYADRRRQPLCFLVGDYVYLKVSPMKGVSRFGVKGKLAPRYIGPFLVIEQCGPVAYRLQLPETLSAVHNVFHVSQLKKCLRVPDRTIEVTDVVLEPDLTYSKHPIRVLDQKDRVTRRKTLKFYKIQWNQHSEDEATWETQDFLNKNFPGFLASCNL

SEQ ID NO: 10317 - protein, 512 aa, Zea mays
  Clone ID: TF_ZM3655.C3.o1.fg.pep
MSGDHAKKEMETGEKPTTSQGSTSSEESRTKRREKKKSSSIKGKEKKSSSHHKEKKEKSYSHKPHRKGDKHKRMRKVVYYETDTSSTSTSDSDAPSVTSKRQERKKYIQLIRGNPRYTKMTPEEVIGHFVSFECMIEGSRKINELGERSEAQPVAFKATEEKKEESTPSRQPIDASKLDNEEMALVIKSFRQILKQRRGKDYKSRSKKVCYKCGKPGHFIAKCPISSDSDRGDDKKGRRKEKKRYYKKKGGDAHVCREWDSDESSSDSSDDEDAANIAVTKGLLFPNVGHKCLMAKDGKKKKEKSQTQETLKGFLRRAQNEFALRIKKIRSDNGTEFKNSQIESFLEEEGIKHEFSSPYTPQQNGVVERKNRTLLDMARTMLDEYKTPDRFWAEAVNTACYAINRLYLHRILKKTSYELLTGNPKSLQMHKINRPPPCKHLHQLKMRMRLKLMKGKIKKMSHLKMMTMIKGEMQMIKRRRMRKNQDRHTQESTKQSNEITPSTPSSATFIRG

SEQ ID NO: 10318 - protein, 1519 aa, Zea mays
  Clone ID: TF_ZM3971.C1.o1.fg.pep
MALVIKSFRQILKQRRGKDYKSRSKKVCYKCGKPGHFIAKCPISSDSDRGDDKKGRRKEKKRYYKKKGGDAHVCREWDSDESSSDSSDDEDAANIAVTKGLLFPNIGHKCLMAKDGKRKKVKSRSSTKYETSSDENASDEEDNLRILFANLNMEQKEKLNELISAIHEKDDLLDSQEDCLIKENKKHVKVKNAYALEIEKCEKLSSELSTCREMIDNLRNENANLNTKVDSHVCNVSIPNPKDNNDDLLSRIEELNISLASLRVENENLIAKAKELDVCNATISNLRDKNDILHAKIVELNSCKPSTSIVEHVSICTRCRDVDVNAIHDHMALIKQQNDHIAKLDAKIAEHNLENEKFKFARSMLYSGRRPGIKDGIGFQRGDNVKLSAPPKRLSNFVKGKAPMPQDNEGYILYPAGYPESKIRRTHSRKSHSGPNHAFMYKGETSSSRQPTRAKLPRKKTPSASNDHDISFNTFDASYVLTNKSGKVYASGGSSWILDSGCTNHMTGEKKMFSSYEKNQDPQRAITFGDGNQGVTVFRRSDDSIAFKGVLEGQLYLVDFDRAELDTCLIAKTNMGWLWHRRLAHVGMKNLHKLLKGEHILGLTNVHFEKDRICSACQAGKQVGSHHPHKNIMTTDRPLELLHMDLFGPIAYISIGGSKYCLVIVDDYSRFTWVFFLQEKSQTQETLKGFLRRAQNEFGLRIKKIRSDNGTEFKNSQIESFLEEEGIKHEFSSPYTPQQNGVVERKNRTLLDMARTMLDEYKTSDRFWAEAVNTACYTINRLYLHQILKKTSYELLTGKKPNISYFRIFGSKCFILVKRGRKTKFAPKTVEGFLLGYDSNTRAYRVFNKSTGLVEVSCDVVFDETNGSQVEQVDLDEIGDEEAPCIALRNMSIGDVCPKESKESPRAQDQTFSSMQASPPTQNEEEAQVDEEEDQSSEPPQDDGIDQGGDVNDQDKEDEEQRPPHPRVHQAIQRDHPVDTILGDIHKGVTTRSRIAHFCEHYSFVSSIEPHRVEEALQDSDWLVAMQEELNNFTRNEVWHLVPRPNQNVVGTKWVFRNKQDEHGVVTRNKARLVAKGYSQVEGLDFGETYAPVARLESIRILLAYATYHGFKLYQMDVKSAFLNGPIKEEVYVEQPLGFEDSEYPNHVYKLSKALYGLKQAPRAWYECLRDFLIANGFKVGKADPTLFTKTLENDLFVCQIYVDDIIFGSTNESTCEEFSRIMTQKFEMSMMGELKYFLGFQVKQLQEGTFISQTKYTQDILTKFGMKDAKPIKTPMGTNGHLDLDTGGKSVDQKEYRSMIGSLLYLCASRPDIMLSVCMCARFQANPKEAHLTAVKRILRYLAYTPKFGLWYPRGSTFDLIGYSDADWAGCKINRKSTSGTCQFLGRSLVSWASKKQNSVALSTAEAEYIAAGHCCAQLLWMRQTLRDYGYKLTKVPLLCDNESAIKMADNPVEHSRTKHIAIRYHFLRDHQQKGDIEISYINTKDQLADIFTKPLDEQSFTKLRHELNILDSRNFFC

SEQ ID NO: 10319 - protein, 1923 aa, Zea mays
  Clone ID: TF_ZM3976.C13.o1.fg.pep
MSGDHAKKEMETGEKPTTSHGSTSSEESRTKRKEKKKDSSKRKEKKSSSSHHQEKKEKSSSHKPHRKGDKHKRMRKVVYYETDTSSTSTSDSDAPSVTSKRQERKKYSKIPLHYPRISKHTPLLSVPLGKPPTFDGEDYARWSDLMRFHLISLHKSIWDVVEFGAQVPSVGDENYDEDEVAQIEHFNSQATTILLASLSREEYNKVQGLKSAKEIWDVLKTAHEGDELTKITKRETIEGELGRFRLRKGEEPQHMYNRLKTLVNQVRNLGSKKWDDHEVVNVILRSLIFLNPTQVQLIRGNPRYTKMTPEEVIGHFVSFECMIEGSRKINELGDPSEAQPVAFKATEEKKEESTPSRQPIDASKLDNEEMALVIKSFRQILKQRRGKDYKSRSKKVCYKCGKPGHFIAKCPISSDSDRGDDKKGRRKERKRYYKKKGGDAHVCREWDSDESSSDSSDDEDAANIAVTKGLLFPNVGHKCLMAKDGKRKKVKSNSSTKYESSSDDNASDEEDNLRSLFANLNIAQKEKLNELVSAIHEKDDLLDSQEDCLIKENKKHVKVKKAYALEVEKCEKLSSELSTCREMIDNLRNENASLNAKVDSHVCNVSIPNPRDNNDDLLARIEELNISLASLRLENESLIAKAKDFDVCKVTIANLRDKNDILHAKIVELNSCKPSTSIVEHVSICTRCRNVDIDAIHDHMALIKQQNDHIAKLDAKIAEHNLENEKFKFARSMLYNGRRPGIKDGIGFQRGDNVKLNAPPKNLSNFVKGKAPMPQDNEGYILYPAGYPESKIRKIHSRKSHSGPNHAFMYKGETSSSRQPTRAKLPRKKISNASNEHSISFKTFDASYVLTNKSGKVVAKFVGGKHKGSKTCVWVPKVLVSNAKGPKTVWVYASGGSSWILDSGCTNHMTGEKRMFSSYEKNKDPQRAITFGDGNQGVTVFRRSDDSIAFKGVLEGQLYLVDFDRAELDTCLIAKTNMGWLWHRRLAHVGMKNLHKLLKGEHILGLTNVHFEKDRICSACQAGKQVGVHHPHKNIMTTDRPLELLHMDLFGPIAYISIGGSKYCLVIVDDYSRFTWVFFLQEKSQTQETLKGFLRRAQNEFALRIKKIRSDNGTEFKNSQIESFLEEEGIKHEFSSPYTPQQNGVVERKNRTLLDMARTMLDEYKTPDRFWAEAVNTACYAINRLYLHRILKKTSYELLTGKKPNISYFRVFGSKCFILVKRGRKSKFAPKTVEGFLLGYDSNTRAYRVFNKSTGLVEVSCDVVFDETNGSQVEQVDLDEIGEEQAPCIALRNMSIGDVCPRESEEPPNAQDQPSSSMQASPPTQNEDEAQVDEGQNQEDEPPQDDGNNPGGDAIDQEKEDEEEPRPPHPRVHQAIQRDHPVDTILGDIHKGVTTRSRVAHFCEHYSFVSSIEPHRIEEALQDSDWVVAMQEELNNFTRNEVWHLVPRPNQNVVGTKWVFRNKQDEHGVVTRNKARLVAKGYSQVEGLDFGETYAPVARLESIRILLAYATYHGFKLYQMDVKSAFLNGPIKEEVYVEQPPGFEDSEYPNHVYRLSKALYGLKQAPRAWYECLRDFLIANGFKVGKADPTLFTKTLEKDLFVCQIYVDDIIFGSTNESTCEEFSRIMTQKFEMSMMGELKYFLGFQVKQLQEGTFISQTKYTQDILTKFGMKDAKPIKTPMGTNGHLDLDTGGKSVDQKVYRSMIGSLLYLCASRPDIMLSVCMCARFQSDPKESHLTAVKRILRYLAYTPKFGLWYPRGSTFDLIGYSDADWAGCKINRKSTSGTCQFLGRSLVSWASKKQNSVALSTAEAEYIAAGHCCAQLLWMRQTLRDYGYKLTKVPLLCDNESAIKMADNPVEHSRTKHIAIRYHFLRDHQQKGDIEISYINTKDQLADIFTKPLDEQSFTRLRHELNILDSRNFFC

SEQ ID NO: 10320 - protein, 1442 aa, Zea mays
  Clone ID: TF_ZM4318.C3.o1.fg.pep
MVNQRQGPNNRNQRGQQAPPPPPPPNPNMEQFIAAQMQILQGLTAVVQQLQQNQQNQQPQQQQYAPPARDKHRDFMSHHPPTFSHAVEPLDADDWLKVIGKKLDITQCNDREKVLYASGRLEGAASDWWDAFTAAHPNADTITWQEFQENFRAHHIPSGIMKLKKKEFLSLTQGNMSVSEYRDRFTQLSRYAPEEVDTDEKRQERFLEGLIGPLNYQLQSHTFPNFQTLLNKAIGLESKRKELSDHKRKFQGQSSRNTRPNNAQGSQFCSGNQGGNNYQVQRSGQQGQRNNQSQNQQRSNPQTNQRSGGNSQNRQGGTNNTQARNNAPVQPNGCFKCGELGHYANNCPRRNQQTPQKGNNQRNDQNTPARGSAQNKTPQNQSRGRVNHVTAESVPEDADIVYGIDFTVDPVVLGSNGIDVILGCNWLKSCDGVIQCANGTIMLTSPQGERIQVNIDKSTDEKGKTVINHLEEKPLENIKVVCEYPDVFPEELPGMPPDRDIEFSIELVPGIAPISKRPYRMDVKDLVELKKQIEELLEKGFIRPSSSPWGAPVLFVNKKDGSRRMCVDYRSLNEVTIKNKYPLPRIEDLFDQMKGAKIFSKVDLRSGYHQLKIRAEDVPKTAFTTRYGLYEFLVMSFGLTNAPAYFMNLMNKVFMEYLDQFVVVFIDDILIYSPNEEAHEDHLRLVLQKLRDNQLYAKFSKCDFWLKEVAFLGHIVTNGGIKVDPGKIREILDWKQPKDASKIRSFLGLAGYYRRFIEGFSKLVKPLTSLLEKGKEFKWDEACQNCFEELKKRLTTAPILVMPDIHKGFDVYCDASHLGLGCVLMQEGKVIAYASRQLRKHEKNYPTHDLELAAVVHALKIWRHYMIGNKCKIFTDHKSLKYIFTQKELNLRQRRWLELIKDYDLEIQYHPGKANVVADALSRKGQVNNITTHLMSQELCWEMERLNLGFLNNVEATVMEVESTLEEEIRKGQESDEKIKEIKTLISMGKAPDFTEDEQGTIWFKKRICVPEIEHLRQLILREAHDSAYSIHPGSTKMYQDLKEKYWWYGLKRDVATHVALCDVCQRVKAEHQRPAGLLQPLKVPEWKWEEISMDFIVGLPRTRDGYDSIWVIVDRLTKVAHFIPVKTTHSGAQLAELYMSRIVCLHGVPKKIVSDRGTQFTSLFWKRLHESMDTKLNFSSAYHPQTDGQTERTNQVLEDMLRACALKHGRSWDKSLPYAEFSYNNSYQASLKMAPFEALYGRKCRTPLYWNQTGESQVFGPEILQEAEKQVQIIRENLKTAQSRQKSYADNRRRELMFEVGDFVYLKVSPMRGMKRFKVKGKLSPRYIGPFKILERKGEVAYQLELPDRLSDVHDVFHVSQLKKCLRVPKEQLPMEELIVNEDLTYSEYPVRILETSRRITRSKVINMCKVQWSHHSEDEATWEREDELIAEFPQLFSESS

SEQ ID NO: 10321 - protein, 1665 aa, Zea mays
  Clone ID: TF_ZM4330.C4.o1.fg.pep
MSGDHAKKEMETGEKPTTSNGSTSSEESRTKRREKKKNSSNKGKEKKSSSHHKEKKEKSSSHKPHRSGDKQKRMRKVVYYETDTSSTSTSGSDTPSVTSKRQERKKFSKIPLHYPRISKHASLLSVPLGKPPTFDGEDYARWSDLMRFHLTSLHKSIWDVVEFGAQVPSVGDKDYDEDEVAQIEHFNSQATTILLASLSREEYNKVQGLKSAKEVWDVLKTAHEGDELTKITKRETIEGELGRFRLRKGEEPQHMYNRLKTLENQVRNLGSKKWDDHEVVNVILRSLIFLNPTQVQLIRGNPRYTKMTPEEVIGHFVSFECMIEGSRKINELGDPSEAQPVAFKATEEKKEVSTPSRQPIDASKLDNEEMALVIKSFRQILKQRRGKDYKSRSKKVCYKCGKPGHFIAKCPISSDSDRGDDKKGRRKEKKRYYKKKGGDAHVCREWDSDESSSDSSDNEDAANIAVTKGLLFPNVGHKCLMAKDGKRKKVRSNSSTKYESSSDDNASDEEDSLRSLFANLNIAQKEKLNELVSAIHEKDDLLDSQEDLLIKENKKHVKVKKSYALEIEKCEKLSSELSTCREMIDNLKNENASLNAKVDSHVCNVSIPNPRDNNDDLLARIEELNISLASLKVENESLIAKAKDFDVCKVTISDLRDKNDILHAKIVKLNSCKLSTSIVEHVTICTRCRDIDINAIHDHMTLIKQQNDHIAKLDAKIAEHNLENEKFKFARSMLYNGRHPGIKDGIGFQRGDNVKISAPPKRLSNFVKGKAPMPQDNEGYILYPAGYPESKIRKIHSRKSHSGPNHAFMYKGETSSSRQPTHAKLPRKKTPNASNDHAISFKTFDASYVLTNKSGKVVAKFVGGKHKGSKTCVWVPKVLVSNAKGPKTVWVYASGGSSWILDSGCTNHMTGEKRMFSSYEKNQDPQRAITFGDGNQGVTVFRRSDDSIAFKGVLEGQLYLVDFDRAELDTCLIAKTNLGWLWHRRLAHVGMKNLHKLLKGEHIIGLTNVHFEKDREKSQTQETLKGFLRRAQNEFGLRIKKIRSDNGTEFKNSQIEGFLEEEGIKHEFSSPYTPQQNGVVERKNRTLLDMARTMLDEYKTSDRFWAEAVNTACYAINRLYLHRILKKTSYELLIGKKPNISYFRVFGSKCFILVKRGRKSKFAPKTVEGFLLGYDSNTRAYRVFNKSTGLVEVSCDVVFDETNGSQVEQVDLDEIGDEEAPCIALRNMSIGDVCPKESEESPNTQDQPSSSTLATPPTQNENEAQVDEVEDQANEPPQDDGNDQGGDANDQDKEDEEQRPPHPRVHQAIQRDHPVDTILGDIHKGVTTRSRVAHFCEHYSFVSSIEPHRVEEALQDSDWVVAMQEELNNFTRNEVWHLVPRPNQNVVGTKWVFRNKQDEHGVVTRNKARLVAKGYSQVEGLDFGETYAPVARLESIRILLAYATYHGFKLYQMDVKSAFLNGPIKEEVYVEQPPGFEDSEYPNHIYKLSKALYGLKQAPRAWYECLRDFLIANGFKVGKADPTLFTKTLENDLFVCQIYVDDIIFGSTNESTCEEFSRIMTQKFEMSMMGELKYFLGFQVKQLQEGTFISQTKYTQGILNKFGMKDAKPIKTPMGTNGHLDLDTGGEETTSRALMIPFLAIHAKKGEKGAQSKRTAPPPISKTQC

SEQ ID NO: 10322 - protein, 960 aa, Zea mays
  Clone ID: TF_ZM4333.C1.o1.fg.pep
MSGDHAKKEMETGEKPTTSNGSTSSEESRTKRREKKKNSSNKGKEKKSSSHHKEKKEKSSSHKPHRSGDKQKRMRKVVYYETDTSSTSTSGSDTPSVTSKRQERKKFSKIPLHYPRISKHASLLSVPLGKPPTFDGEDYARWSDLMRFHLTSLHKSIWDVVEFGAQVPSVGDKDYDEDEVAQIEHFNSQATTILLASLSREEYNKVQGLKSAKEVWDVLKTAHEGDELTKITKRETIEGELGRFRLRKGEEPQHMYNRLKTLENQVRNLGSKKWDDHEVVNVILRSLIFLNPTQVQLIRGNPRYTKMTPEEVIGHFVSFECMIEGSRKINELGDPSEAQPVAFKATEEKKEVSTPSRQPIDASKLDNEEMALVIKSFRQILKQRRGKDYKSRSKKVCYKCGKPGHFIAKCPISSDSDRGDDKKGRRKEKKRYYKKKGGDAHVCREWDSDESSSDSSDNEDAANIAVTKGLLFPNVGHKCLMAKDGKRKKVRSNSSTKYESSSDDNASDEEDSLRSLFANLNIAQKEKLNELVSAIHEKDDLLDSQEDLLIKENKKHVKVKKSYALEIEKCEKLSSELSTCREMIDNLKNENASLNAKVDSHVCNVSIPNPRDNNDDLLARIEELNISLASLKVENESLIAKAKDFDVCKVTISDLRDKNDILHAKIVKLNSCKLSTSIVEHVTICTRCRDIDINAIHDHMTLIKQQNDHIAKLDAKIAEHNLENEKFKFARSMLYNGRHPGIKDGIGFQRGDNVKISAPPKRLSNFVKGKAPMPQDNEGYILYPAGYPESKIRKIHSRKSHSGPNHAFMYKGETSSSRQPTHAKLPRKKTPNASNDHAISFKTFDASYVLTNKSGKVVAKFVGGKHKGSKTCVWVPKVLVSNAKGPKTVWVYASGGSSWILDSGCTNHMTGEKRMFSSYEKNQDPQRAITFGDGNQGVTVFRRSDDSIAFKGVLEGQLYL

SEQ ID NO: 10323 - protein, 252 aa, Zea mays
  Clone ID: TF_ZM4336.C2.o2.fg.pep
MSGDHAKKDMVTGEKPATSHGKAPSGESHNKKKEELPPHKSHRSGDKKKKMKKVVYYETDSSSPSTSGSDAPSVTSKRHACKKFSSKKIIEQDTSSTREAQPVAFKALEEKKEESTSSRLPIDASKLDNEEMTLIIKIFRQILKQRKGKDYKPRSKKVCYKCGKPGHFIAKCPISSDSDRGDDKRGKKKEKKRYYKKKGGDAHVCREWDSDESSTNSSSDEDTANIAINKGLLFSNVGHKCLMAKDGKKKKK

SEQ ID NO: 10324 - protein, 1070 aa, Zea mays
  Clone ID: TF_ZM4353.C2.o6.fg.pep
MKAAAVEVMTPIGDLEARVSRLQTALQHRTDAWVADGDRINELRRDIRHLQDQLADRDLALDWVVQSRLLMCAKEARAQARIKELSSTVDNLQMPTRTRGQDAAGTSGGRDVTPNPPPVPPTLAEAIAALVNATADNTRFLREMAGQQQFQQQAGRGYPQGPRETTYLDFSETRPPLFVKAEDPLEADEWIRVIEQKFGLLRCSETQKSLFAAQQLRGPASTWWGNFVAIQPVNHQVTWDEFKAAFREHYIPEGVLHMKQEEFMKLQQGGDTVNQYLNKFNHLSQYAIDQVNTDLKKKNCFMRGLNDRLQRKMATCIDLTYGKAVSTALSVEAKYTNSGKNKGFGGERPSQGQAKKQRFVIRPSNQNRTFSRPPSFPFKQPIIIRPNNNPTTPNQPGARGTRFPALPSSSTGCFNCGKSGHFIKDCPYPRQNQSNASQGSGKSAQSKGNAMGKNTKKTGRVYYTQVATTPEGEPVMMGTFPVASHPAIILFDSGASHTFISKKFVEKHHIAYHESKEGFKIHSPGGHIYTREVAYGVPVTMAERNFPTNMIVLKGQDIDVILGMNWLTQHKAILNTELRTVRLSYNQEKILLTLLATNPAKTSGRVYEAIVPEIKNIPVVCEFPDVFPEDLPGLPPERDVEFVIELKPGTAPISRRSYRMPPNELAELKIQYQDLLNKGFIRPSSSPWGCPAIFVKKKDQTLRMCVDYRPLNEVTIKNKYPLPRIDILFDQLTGARVFSKIDLRSGYHQICIRPEDIPKTAFTTRYGLFEYLVMSFGLTNAPAHFTYLMNSVFMPELDKFVVVFIDDILIYSKNEEDHAQHLRIVLTRLREHQLYAKFSKCAFWLEEIQFLGHVLSAKGIAVDPSKVKDILEWKPPTTVHQVRSFLGLAGYYRRFIPDFSKLVKPITSLLKNDIKFNWSSKCNEAFEQLKTLLTTAPVLAQPDITKPFDVYCDASGSGLSCVLMQEGRVIAYASRQLRRHEEHYPTHDLELAAVVHALKIWRHYLLGNICHIYTDHKSLKYIFTQSELNMRQRRWLELIKDYELEIHYHPGKANVVADALSRKTSCHCLM

SEQ ID NO: 10325 - protein, 1825 aa, Zea mays
  Clone ID: TF_ZM4401.C1.o4.fg.pep
MSGDHAKKEMETGEKPTTSHGSTSSEESRTKRKEKKKDSSKRKGKKSSSSHHKEKKEKSSSHKPHRKGDKHKRMRKVVYYETDTSSTSTSDSDVPSVTSKRQERKKYSKIPLHYPRISKHTPLLSVPLGKPPTFDGEDYARWSDLMRFHLISLHKSIWDVVEFGAQVPSVGDENYDEDEVAQIEHFNSQATTILLASLSREEYNKVQGLKSAKEIWDVLKTAHEGDELTKITKRETIEGELGRFRLRKGEEPQHMYNRLKTLVNQVRNLGSKKWDDHEVVNVILRSLIFLNPTQVQLIRGNPRYTKMTPEEVIGHFVSFECMIEGSRKINELGDPSEAQPVAFKATEEKKEESTPSRQPIDASKLDNEEMALVIKSFRQILKQRRGKDYKSRSKKVCYKCGKPGHFIAKCPISSDSDRGDDKKGRRKEKKRYYKKKGGDAHVCREWDSDESSSDSSDDEDAANIAVTKGLLFPNVGHKCLMAKDGKKKKVKSNSSTKYESSSDDNASDEEDNLRSLFANLNIAQKEKLNELVSAIHEKDDLLDAQEDCLIKENKKHVNVKNAYALEVEKCQKLSSELSTCREMIDNLRNENAILNAKVDSHVCNVSIPNLRDDNVDLLAKIDELNVSLASLRLENEDLIAKAKDFDVCKVTISDLRDKNDILHAKIVELNSCKPSTSIVEHVSICTRCRNIDINAIHDHMALIKQQNDHIAKLDAKIAEHNLENEKFKFARSMLYNGRRPGIKDGIGFQRGDNVKISAPPKRLSNFVKGKAPMPQDNEGYILYPAGYPENKIRKIHSRKSHSGPNHAFIYKGETSSSRQPTRAKLPRKKTPNASNDHAISFKTFDASYMLTNKSGKVVAKFVGGKHKGSKTCVWVPKVLVSNAKGPKTVWVYASGGSSWILDSECTNHLTGEKRMFSSYEKNQDPQRAITFGDGNQGVTVFRRSDDSIAFKGVLEGQLYLVDFDRAELDTCLIAKTNMGWLWHRRLAHVGMKNLHKLLKGEHILGLTNVHFEKDRVCSACQAGKQVGAHHPHKNIMTTDRPLELLHMDLFGPIAYISIGGKKSQTQETLKGFLRRAQNEFGLRIKKIRSDNGTEFKNSQIEGFLEEEGIKHEFSSPYTPQQNGVVERKNRTLLDMARTMLDEYKTSDRFWAEAVNTACYSINRLYLHRILKKTSYELLTGKKPNISYFRVFGSKCFILVKRGRKSKFAPKTVEGFLLGYDSNTRAYRVFNKSSGLVEVSCDVVFDETNGSQVEQVDLDEIGEEQAPCIALRNMSIGDVCPKESEEPPIAQDQPSSSMQASPPTENEDEAQVDEVEDQANEPPQDDSNDQGGDTNEEDKEDEEQRPPHPRVHQAIQRDHPVNTILGDIHKGVTTRSRVAHFCEHYSFVSSIEPHRVEEALQDSDWVVAMQEELNNFTRNEVWHLVPRPNQNVVGTKWVFRNKQDEHGVVTRNKARLVAKGYSQVEGLDFGETYAPVARLESIRILLAYATYHGFKLYQMDVKSAFLNGPIKEEVYVEQPPGFEDSEYPNHVYKLSKALYGLKQAPRAWYECLRDFLIANGFKVGKADPTLFTKTLNNDLFVCQIYVDDIIFGSTNESTCEEFSRIMTQKFEMSMMGELKYFLGFQVKQLQEGTFISQTKYTQDILTKFGMKDAKPIKTPMGTNGHLDLDTGGKSVDQKIIPDRRSFLEKQAKRGPSGLLRRTVRDMGIPLGQNQCKNSSFHYRLSGGKAKTVRALARTVRPQARTVRSPLIYRGGPSGPGSRTVRAQQNGPTARKWLVAINTTPTTSIHFIQAFQPSTFNTRASNPFQDTFKASISPSFTIEKRDH

SEQ ID NO: 10326 - protein, 603 aa, Zea mays
  Clone ID: TF_ZM4404.C2.o1.fg.pep
MSGEFAKKEMETGDKPTTSHGKASSEESRNKEKKREKKKEKKTSSHKSHRSGDKIKKMRKVVYYETDTSSPSTSGSDAPSITSKRHERKKFSKIPLRYLRITKHTPLLSVPLGKPPTFDGEDYARWSDLMRFHLTSLHKSIWDVVEFGAQHFNSQATTILLASLSREEYNKVEGLKGAKEVWDVLKTAHEGDELTKITKRETIEGELGRFRLRQGEEPQDMYNRLKTLVNQVRNLGSKKWDDHEVVKVILRSLIFLNPTQVQLIRGNPRYTLMTSEEVIGNFVSFEFMIKGSRKINELDGPSTSEAQPVAFKATKDKKEEYTPSRTPIDASKLDNEEMALVIKSFRQILKQRRGKDYKPRSKKVCYKCGKPGHFIAKCPISSDSDKGDDKKGRRKEKKRYYKKKGGDTHVCREWDSDESSSDSSDDEDAANIAVTKGLFFPNVGHKCVMAKDGKKKKVKSKSSTRYESSSDENASDEEDNLRTLFANLNMQQKEKLNELISAIHEKDDLLDSQEDFLIKKNKKHVKVKNAYALEVEKCEKLSSELSTCHETIDNLRNENVSLNAKVVSHVCDVLIPNPRNNDDDLLARIKELNTSLASLRSEK

SEQ ID NO: 10327 - protein, 1927 aa, Zea mays
  Clone ID: TF_ZM4404.C5.o1.fg.pep
MSGDHAKKEMETGEKPTTSQGSTSSEESRTKRREKKNISSNKGKEKKSSSHHKEKKEKSSSHKPHRSKDKQKRMRKVVYYETDTSSTSTSGSDTPSVTSKRQERKKFSKIPLHYPRISKHAPLLSVPLGKPPTFDGEDYARWSDFMRFHLTSLHKSIWDIVEFGAQVPSVGDKDYDEDEVAQIEHFNSQATTILLASLSREEYNKVQGLKSAKEVWDVLKTAHEGDELTKITKRETIEGELGRFRLRKGEEPQHMYNRLKTLVNQVRNLGSIKWDDHEMVKVILRSLIFLNPTQVQLIRGNPRYTKMTPEEVIGHFVSFECMIEGSRKINELDDPSTSEAQPVAFKATEDKKEEATPSRQPIDASKLDNEEMALVIKSFRQILKQRRGKDYKSRSKKVCYKCGKPGHFIAKCPISSDSDRGDDKKGRRKEKKRYYKKKGGDAHVCREWDSDESSSNSSSDEDAANIAVTKGLLFPNVGHKCLMAKDGKRKKVKSNSSTKYESSSDDNASDEEDNLRTLFANLNMEQKEKLNELISAIHEKDDLLDSQEDCLIKENKKHVKVKKAYALEIEKCEKLSSELSTCREMIDNLRHENASLNAKVDSHVCNVSIPNPRDNNNDLLARIEELNISLASLRNENENLLAKAKDFDVCKVTISDLRDKNNILHAKIVELNSCKPSTSIVEHISICTRCRDIDVNAIHDHMSLIKQQNDHIAKLDAKIAEHNLEDEKFKFARSMLYNGRRPSIKDGIGFQRGDNVKLNAPPKRLSNFVKGKAPMPQDNEGYILYPAGYPESKIRRIHSRKSHSGPNHAFMYKGETSSSRQPTRAKLPKKTPNTSNDHNISFKTFDASYVLTNKSGKIVAKYVGGKHKGSKTCVWVPKVLVSNAKGPKTIWVYASGGSSWILDSGCTNHMTGEKKMFSSYEKNQDPQRAITFGDGNQGLVKGVTVFRRSDDSIAFKGVLEGQLYLVDFDRAELDTCLIAKTNMGWLWHRRLAHVGMKNLHKLLKGEHILGLTNVHFEKDRICSACQAGKQVGAHHPHKNIMTTDRPLELLHMDLFGPIAYISIGGSKYCLVVVDDYSRFTWVFFLQEKSQTQETLKGFLRRAQNEFGLRIKKIRSDNGTEFKNSQIEGFLEEEGIKHEFSSPYTPQQNGVVERKNRTLLDMARTMLDEYKTSDRFWAEAVNTACYAMNRLYLHRILKKTSYELLIGKKPNISYFRVFGSKCFILVKRGRKSKFAPKTVEGFLLGYDSNTRAYRVFNKSTGLVEVSCDVVFDETNGSQVEQVDLDEIGEEEAPCIALRNMSIGDVCPKESEEPPNAQDQPSSSTQASPPTQDEDEAQVDEVEDQANEPPQDNGNNQGGDANEEDKAEEEQRPPHPRVHQAIQRDHPVDTILGDIHKGVTTRSRVAHFCEHYSFVSSIEPHRVEEALQDSDWVVAMQEELNNFTRNEVWHLVPRPNQNVVGTKWVFRNKQDEHGVVTRNKARLVAKGYSQVEGLDFGETYAPVARLESIRILLAYATYHGFKLYQMDVKSAFLNGPIKEEVYVEQPPGFEDSEYPNHVYKLSKALYGLKQAPRAWYECLRDFLIANGFKVGKADPTLFTKTLENDLFVCQIYVDDIIFGSTNESTCEEFSRIMTQKFEMSMMGELKYFLGFQVKQLQEGTFISQTKYTQDILTKFGMKDAKPIKTPMGTNGHLDLDTGGKSVDQKVYRSMIGSLLYLCASRPDIMLSVCMCARFQADPKEAHLTAVKRILRYLAYTPKFGLWYPRGSTFDLIGYSDADWAGCKINRKSTSGTCQFLGRSLVSWASKKQNSVALSTAEAEYIAAGHCCVQLLWMRQTLRDYGYKLTKVPLLCDNESAIKMADNPVEHSRTKHIAIRYHFLRDHQQKGDIEISYINTKDQLADIFTKPLDEQSFNKLRHELNILDSRNFFC

SEQ ID NO: 10328 - protein, 830 aa, Zea mays
  Clone ID: TF_ZM4442.C1.o1.fg.pep
MSGDHSKKEMETGDKPTTSHEKASSEESRNKGKGKEKKASSHKSHRSGDKKKKMRKVVYYETDTSSPSTSSSDAPSITSKRHERKKFSKIPLRYPRIPRHTPLLSVPLGKPPTFDGEDYARWSDLMKFHLTSLHKSIWNVVEFGAQVPSVGDEDYDEDEVAQIEHFNSQATTILLASLSREEYNKVQGLKSAKEVWDMLKTAHEGDELTKITKRETIEGELGRFRLRQGEEPQDMYNRLKTLVNQVRNLGSKKWDDHEMVKVILRSLIFLNPTQVQLIRGNPRYTLMTPEEVIGNFVSFEFMIKGLKKINELDVPSTSEAQPVAFKATEEKKESTSSRTPIDASKLDNEEMALVIKSFRQILKQRRGKDYKPRSKKVCYKCGKPGHFIAKCPISSDSDRGDGKKGRRKEKKKYYKKKGGDAHVCREWDSNESSTDSSSDEDAANISVTKGLLFPNVGHKCLMAKDGKKKKVKSKSSTRYESSSDDNASDEEDNLRTLFANLNMQQKEKLNKLISAIHEKDDLLDTQEDFLIKENKKHVKVKNAYALEVEKCKKLSSELSTCHETIDNLRNENGNLLAKVDSNVCDVSIPNLRNDNVDLLAKIEELNISLASLRNENEKLLAKAKDIDVCNASISDLRDKNDILRAKIVELNSCKPSTSTTEHVTICTRCRDINIDAIHDHMALIKQQNDHIAKLDAKIAEHDLENEKFKFARSMLYRGRRPGIKDDIGFQQGGNVKLNAPPKKLSNFVKGKAPMPQDNEGYILYPAGYHESKIRRIHSRKSHSGPNHAFMYKGEASSSRQSTHAKLPKKKTPSASNEHSISFKTFDASMF

SEQ ID NO: 10329 - protein, 1096 aa, Zea mays
  Clone ID: TF_ZM4496.C2.o4.fg.pep
MSGAHAKKEMVTGEKPATSHRKAPSRESGNKREESPPRVKSHRSGDKKKKMKKVVYYETDSLSPSTSGSDAPSVTSKRHERKKFSKIPLRYPRISKRTYLLSVLLGKPPVFNGENYCMWSEKMRHHLTSLHASIWDIVEFAAQEPSVGDEGYDSDEVAQIRHFNSQATTILLASLSREEYNKVQGLKSAKEIWDILKTAHEGDEVTKITKRETIEEELGQFMLHQGEEPQAMYNRLKTLVNQVRNLRSTKWDDHEMVKVILRSLVFLNPTQVQLIRGDPRYKLMSPEEVIGKFVQPVALKVMEEKKEESTSSRLPIDASKLDNEEMALIIKIFRQILNQRRGKDYKPRSKKVCYKCGKPGHFIAKCPISSDSDRGTNKKGRRKEKKKYYKKKGGDAHVCREWDSDEGSTDSSSDEDAANITVNKGLLFPNVGHKCLMAKDGKKKVYASGGSSWIIDSGCTNHMTGEKKMFSSYEKNHDPQRAITFVDEKSQTQETLKGFLRRAQNEFGLRIKKIRSDNGTEFKNSQIEGFLENEGIKHEFSSHYTPQQNGVVERKNRTLLDMARTMLDEYKTSNRFWAEAANTACYAINRLYLHRILKKTSYELLTGKKPNVSYFRVFGSKCFILVKRGRKSKFAPKAVEGFLLDYDSNTRAYRVFNKSTRLVEVSCDNVFDETNGSQVEQVDLDELDDEEAPCVALRNMSIGDVCPKESEDPPHAQDQPSSSNQASPPTQDEDQAQDDENKDQEESPLEEDNDQGRDANDQDKEDDEGPRPPHPRVHQAIQRDHPVNSILGDIHKGVTTRSRVAHFCEHYSFVSSIEPYRVEDALRDSDWVLAMQVELNNFTRNEVWHLVPRPNQNVLGTKWVFRNKQDEHGVVTRNKARLVAKGYSQVEGLDFGETYAPVVRLESIRILHAYATYHGFKLYQMDMKSAFLNGPIKEEVYVEQPPSFEDKFSRIMVQKFEMSMMGELKYFLGFQVKQLQEGTFISQTKYIQDILTKFGMKDAKPIKTPMGTNGHLDLDTGGKSVDQKVYRSMIGSLLYLCASRPDIMLSVCMCARFQVDPKEVHLRAMKRILRYLVHTPKFGLWYPKGSTFDLIG

SEQ ID NO: 10330 - protein, 1297 aa, Zea mays
  unsure (1)..(1297): unsure at all Xaa locations
  Clone ID: TF_ZM4496.C6.o2.fg.pep
MATSHGKAPSKESDAKGREESPSCVKSHRSGDKKKKIKKVVYYKTDSSSPSTSGSNAPSVTSKRHERKKFRDEGYDSDEVAQIRHFDSQETTILLASLCREEYNKVQGLKSAKEIWDVLKTAHEGDEVTKITKRETIEGEFGRFILNQGEEPQAMYNRLKTLVNQVRNLGSTKWDDHEMVKVILRSLVFRNPTQVQLICGDPRYKLMSPEELDNEQMALIIKSFRQILKQRKGKDYKPCSKKVCYKCGKPGHFIAKCPISSDSDRGDDKRGKKKEKKRYYKKKAAMPTVSSSPNVGHKCIMAKDDKKKKVQARTTPKYTTSNDEGSSSDNEDNLLSLFANLNMQQKEKLNELISAIHEKDELLDSQEEFLIKENKKHVKELSICHDTISNLRDENNSLIAKVEKSKVCHDSIDNLRNENASLFAKIDKLNESIASLKTENDKLISKAKDLNVCNIYISNLRNENAILHTKIDELNACKPSTSTVGHVTICTRCGDINVDAIHDHLALIKQQNDHIAQLTAKINEHEIENEKFKFARSMLYNGRRPGIKDGIGFQQGSNGKAPMAQDNEGYILYPAGYPEHKIRRIHAKKSHSISHHAFMYKNEASSSRHSTHVKMPKKKTPTASNEPNASSKTFDAPYVLTNKSGKVVAKYVGGNTRAPRLVFGYPRNNRTLLDMARTMLDEYKTSDQFWVEAINTACYSINRLYLHRILKKTSYELLTSKKPNVSYFRVFGSKCFILFKRGRKSKFAPKVVEGFLLGYDSNTRAYRVFNKSTGLVEVSCYIMFDETNGSQVEQVDLDELDDEEAPCVALRNMSIGDVCPKESKXPTQAQDQPSSSNQASPQTQDKDQAQDNEDEDQXDEPPQEEDNDQGGDDNDQDKEDDQNXGTKWVFRNKQDEHGVVTRNKARLVAKGYSQVEGLDFGETYAPVARLESICILLAYATHHGFKLYQMDVKSAFLNGPIKEEVYVEQPPGFEDSEYPNHVYKLSKALYGLKQAPRAWYECLRDFLITNGFKLKYFLGFQVKQLQEGTFISQTKYIEDILTKFRMKDAKPIKTPMGTNGHLDLDMGGKSVDQKVYRSMIGSLLYLCAYRPDIMLSVCMCARFQADPKEVHLRSMKRIMRYLVYTPKFGLWYPKGSTFDLKGYSDVDWVGCKIDRKSTSETCQFLGRSLVSWASKKQNSVALSTAEAEYIAAGHCCAQLLWVRQTLRDYGYKLSKVPLLCDNESAICIADNPVEHSRIKHIDIRYHFLRDHQQRGDIEIAYVSTKEQLADIFTKPLDEKTFTKLRNELNILDSRNFD

SEQ ID NO: 10331 - protein, 957 aa, Zea mays
  Clone ID: TF_ZM4547.C1.o1.fg.pep
MSGDHAKKEMETGEKPTTSHVSTSSEESRTKRKEKKKISSNKGKEKKSSSHHKEKKEKSSSHKPRRSGDKQKRMRKVVYYETDTSSTSTSDSDAPSVTSKRQERKKFSKIPLHYPRISKHAPLLSVPLGKPPTFDGEDYARWSDLMRFHLTSLHKSIWDVVEFGAQVPSVGDKDYDEDEVAQIEHFNSQATTILLASLSREEYNKVQGLKSAKEVWDVLKTAHEGDELTKITKRETIEGELGRFRLRKGEEPQHMYNRLKTLVNQVRNLGSVKWDDHEMVKVILRSLIFLNPTQVQLIRGNPRYTKMTPEEVIGHFVSFECMIEGSRKINELDDPSTSEAQPVAFKATEEKKEESTPSRQPIDASKLDNEEMALVIKSFRQILKQRRGKDYKSCSKKVCYKCGKPGHFIAKCPISSDSDRGDDKKGRRKEKKKYYKKKGGDAHVCREWDSDESSSDSSDDEDAANIAVTKGLLFPNVGHKCLMAKDGKRKKVKSNSSTKYESSSDDNNSDEEDNLRVLFANLNMEQKEKLNELISAIHEKDDLLDSQEDCLIKENKKHVKVKKAYALEVEKCEKLSSELSTCREMIDNLRNENASLNTKVDSHVCIVSTSNPRDNNDDLLARIEKLNTSLASLRVENDNLIPKAKDFDVCNVTISDLRDKNDILRAKIVELNSCKPSTSTIEHVSICDRCRDIDVNAIHDHMSLIKQQNDHIAKLDAKIAEHNLENEKFKFARSMLYNGRRPGIKDGIGFQRGDNDKLNAPPKNLSNFVKDKAPMPQDNEGYILYPAGYPESKIRKIHSRKSHSGPNHAFMYKGETSSSRQPTRAKLPRKKTPNASNDHTISFKTFDASYVLTNKSGKIVAKFVGGKHKGSKACVWVPKDIVSNAKGPKTVWVYASGGSSWILDSGCTNHMTGEKKMFSSYEKNQDPQRAITFGDGNQGVTVFRRSDDSIAFKGVLE

SEQ ID NO: 10332 - protein, 946 aa, Zea mays
  Clone ID: TF_ZM4553.C2.o1.fg.pep
MATCIDLTYGKAVSTALSVEAKYASSGKNKGFGGERPNQGQAKKQRFVIRPSSQNRTFSRPPSFPFKQPIIIRPNNTPTTPNQPGAPGTRFPALPSSSTGCFNCGKSGHFIKDCPYPRQNQSNAPQGSRRSAQPKGNAVGKNTKKTGRVYYTQVATTPEGEPVMMGTFPVASHPAIILFDSGASHTFISKKFVEQHHLACHESKEGFKIHSPGGHIFTREVAYEVPVTMAGQNFPANMIVLKGQDIDVILGMNWLTQHKAILNTKLRTVRLSYNQEEILLSLPATNPAKTSGRVYEAIVPEIKNIPVVCEFPDVFPEDLPGLPPERDVEFVIELKPGTAPISRRSYRMPPNELAELKIQLQDLLNKGFIRPSSSPWGCPAIFVKKKDQTLRMCVDYRPLNEVTIKNKYPLPRIDILFDQLTGARVFSKIDLRSGYHQIRIRPEDIPKTAFTTRYGLFEYLVMSFGLTNAPAHFTYLMNSVFMPELDKFVVVCIDDILIYSKNEEDHAQHLRIVLTRLREHQLYAKFSKCAFWLEEIQFLGHVLSAKGIAVDPSKVKDILEWKPPTTVHQVRSFLGLAGYYRRFIPDFSKLVKPITSLLKNDIKFNWSSKCNEAFEQLKTLLTTAPVLAQPDITKPFDVYCDASGSGLGCVLMQEGRVIAYASRQLRRHEEHYPTHDLELAAVVHALKIWRHYLLGNICHIYTDHKSLKYIFTQSELNMRQRRWLELIKDYELEIHYHPGKANVVADALSRKTSCHCLMVKTSENTLCQEMEKLNLGIIQQGTLNQLKLESIILQRIIDAQKDNLGDYVYLKVSPMKGVSRFGVKGKIAPRYIGPFLVLEQCGPMAYRLQLPETLSAVHNVFHVSQLKKCLRVLDRTVEVTDVVLKPDLTYSEHPIRVLDQKDRVTRRKTLKFYKIQWNQHSEDEATWETQDFLDKNFPGFLASCKL

SEQ ID NO: 10333 - protein, 1537 aa, Zea mays
  Clone ID: TF_ZM4555.C2.o1.fg.pep
KQRRGKDYKSRSKKVCYKCGKPGHFIAKCPISSDSDRGDDKKGRRKEKKRYYKKKGGDAHVCREWDSDESSSDSSDDEDAANIAVTKGLLFPNVGHKCLMAKDGKKKVKSKSSTKYESSSDDNASDEEDNLRSLFANLNIAQKEKLNELVSAIHEKDDLLDSQEDYLIKENKKHVKVKNAYALEVEKCNKLSSELSMCHDTIANLRNENAKLIAKVDSHVCIDPRNDNVDLLARIDELNVSIASLRNENEKLIAKAKDIDVCNATISDLRTKNDMLHAKVVELKSCKPSTSNVEHISICTRCRDINVDAIHDHLALIKKQNDHIAQLNAKIREHDSENEKFKLARSMLYNGRRPGIKDGIGFQRRDNVKLNAPPKNLSNFVKGKAPMPQDNEGYILYPAGYPESKIRKIHSRKSHSGPNHAYMYKDETSSSRQPTHAKLPRKKISNASNEHSISFKTFDASYVLTNKSGKVVAKFVGGKHKGSKTCVWVPKVLVSNAKGPKTVWVYASGGSSWILDSGCTNHMTGEKRMFSSYEKNQDPQRAITFGDGNQGVTVFRRSDDSIAFKGVLEGQLYLVDFDRAELDTCLIAKTNMGWLWHRRLAHVGMKNLHKLLKGEHILGLTNVHFEKDRICSACQAGKQVGTHHPHKNIMTTDRPLELLHMDLFGPIAYISIGGSKYCLVIVDDYSRFTWVFFLQEKSQTQETLKGFLRRAQNEFGLRIKKIRSDNGTEFKNSQIEGFLEEEGIKHEFSSPYTPQQNGVVERKNRTLLDMARTMLDEYKTPDRFWAEAVNTACYAINRLYLHRILKKTSYELLTGKKPNISYFRVFGSKCFILIKRGRKSKFAPKTVEGFLLGYDSNTRAYRVFNKSTGLVEVSCDVVFDETNGSQVEQVDLDEVGEEQAPCIALRNMSIGDVCPRESEEPPNAQDQPSSSMQASPPTQNEDEAQVDEGQNQEDEPPQDNGNDQGGDANDQEKEDEEEPRPPHPRVHQAIQRDHPVDTILGDIHKGVTTRSRVAHFCEHYSFVSSIEPHRVEEALQDSDWVVAMQEQLNNFTRNEVWHLVPRPNQNVVGTKWVFRNKQDEHGVVTRNKARLVAKGYSQVEGLDFGETYAPVARLESIRILLAYATYHGFKLYQMDVKSAFLNGPIKEEVYVEQPPGFEDSEYPNHVYRLSKALYGLKQAPRAWYECLRDFLIANGFKVGKADPTLFTKTLENDLFVCQIYVDDIIFGSTNETTCEEFSRIMTQKFEMSMMGELKYFLGFQVKQLQEGTFISQTKYTQDILAKFGMKDAKPIKTPMGTNGHLDLDTGGKSVDQKVYRSMIGSLLYLCASRPDIMLSVCMCARFQSDPKESHLTAVKRILRYLAYTPKFGLWYPRGSTFDLIGYSDADWAGCKINRKSTSGTCQFLGRSLVSWASKKQNSVALSTAEAEYIAAGHCCAQLLWMRQTLRDYGYKLTKVPLLCDNESAIKMADNPVEHSRTKHIAIRYHFLRDHQQKGDIEISYINTKDQLADIFTKPLDEQSFTRLRHELNILDSRNFFC

SEQ ID NO: 10334 - protein, 1608 aa, Zea mays
  unsure (1)..(1608): unsure at all Xaa locations
  Clone ID: TF_ZM4576.C2.o1.fg.pep
TSGVSHWDTLKTAHKGDEVTKITKRETIEGELGRFQLRQGEEPQDMYNRLKTLVNQVRNLGSKKWDDHEMVKEVIGNFVSFKLMIKGSKKINELDGPSTSEAQPVTFKAMEEKKEESTSSRQPIDASKLDNEEMALIIKSFHQILKQRRGKDYKPRSKKVCYKCGKPGHFIAKCPISSDSDRGDDKKGRRKEKNRYYKKKGGDAHVCREWDSDKSSSDSSFDEDAANIAVTKGLLFPNVGHKCLMAKVSKKKKVKSRSSTKYETSSDEDDASNEEDNLRILFANLNMQQKEKLNELISAIHEKDDLLDTQEDFLIKENKKHVKVKNAYALEVEKCEKLSSELSTCHETIDKLRNENANLLAKVDSNVCDVSIPNLRNDNDDLLDKIEELNISLASLRIENEKLLTKAKELDVCNITISDLRDKNDILRAKIVELNSCKPSTSTTEHVTICTRCRDVDVNAIHDHLSMIKQQNDHIAKLDAKIAEHELENEKFKFARSMLYNGRRPGIKDGVGFQQGGNVKLNAPPKKLSNFVKGKAPMPQDNEGYILYPAGYPESKIRRIHSRKSHSGSNHAFMYKGXYASGGSSWIIDSGCTNHMTGEKKMFSSYEKNXRPQRAITFGDGNQGVTVFRRSDDSVAFKGVLEGQLYLVDFDRAELDTCLIAKTNMGWLWHRRLAHVGMKNLHKLLKGEHILGLTNVHFEKDRICSACQAGKQVGAHHPHKNIMTTDRPLELLHMDLFGPIAYISIGGSKYCLVIVDDYSRFTWVFFLQEKSHTQETLKGFLRQAQNEFGLRIKKIRSDNGTEFKNSQIEGFLEEEGIKHEFSSPYTPQQNGVVERKNRTLLDMARTMLDEYKTSDRFWAEAVNTACYAINRLYLHRILKKTSYELLTGKKPKISYFRVFGSKCFILIKRGRKSKFAPKTVEGFLLGYDSNTRAYRVFNKSSGQVEVSCDVVFDETHGSQVEQVDLDEIGDEEALCITLRNMSIGDVCPKESEEPPNAQDQPSSSTQASPPTQNEDEAQVDEGEDQRDEPPQDDDNDQGGDANDQDKEDEELRPPHPRVHQAIQRDHPVDTILGDIHKGVTTRSCVAHFCEHYSFVSSIEPHRVEEALQDSDWVVAMQEELNNFTRNEVWHLVPRPNQNVVGTKLVFRNKQDEHGVVTRNKARLVAKGYSQVEGLDFGETYAPVARLESIRILLAYATYHGFKLYQMDVKSAFLNGPIKEEVYVEQPPGFEDSEYPNYVYKLSKALYGLKQAPRAWYECLRDFLITNGFKVGKADPTLFTKTLDNDLFVCQIYVDDIIFGSTNESTCEEFSRIMTQKFEMSMMAELKYFLEFQVKQLQEGTFISQTKYTQDILSKFGMKDAKPIKTPMGTNGHLDLDREGKSVDQKVYRSMIGSLLYLCASRPDIMLSVCMCARFQADPKEAHLTAVKRILRYLVHTPKFGLWYPRGSTFDLIGYSDADWAGCKINRKITSGTCQFLGRSLVSWVSKKQNSVSLSTAEAEYITAGHCCAQLLWMRQTLRDYGYKLTKVRLLCDNESAIRMADNPVEHSRTKHIAILYHFLRDHQQKGDIEIAYINTKEQLADIFTKPLDEQTFNKLRHELNILDSRNFF

SEQ ID NO: 10335 - protein, 1018 aa, Zea mays
  unsure (1)..(1018): unsure at all Xaa locations
  Clone ID: TF_ZM4589.C1.o2.fg.pep
MSGDHAKKEMETGEKPTTSNEKALSGESHNKEKRKEKKKEKKTSSHKSHRSGDKIKKMRKVVYYETDTSSPSTSGSDAPSITSKRHERKKFSKIPLHYPRTSRHTPLLSIPLGKPPTFDGEDYARWSDLMKFHLTSLHKSIWNVVEFGAQVPSVGDEDYDEDEVAQIEHFNSQATSILLASLSREEYNKVQGLKSAKEVWDMLKTAHEGDELTKITKRETIEGELGRFRLRQGEEPQDMYNRLKTLVNQVRNLGSKKWDDHEVVKVILRSLIFLNPTQVQLIRGNPRYTLMTLEEVIGNFMSFEFMIKGSRKINELDSPSTSEAQSVAFKATEEKKEESTPSRQPIDASKLDNEEMALVIKSFRQILKQRKGKDYKPRSKKVCYKCGKPGHFIAKCPISSDSDRGDDKKGRRKEKKRYYKKKGGDAHVCREWDSDESSSDSSDDEDTANIAVTKGLLFPNVGHKCLMAKDGKKKVKSKSSTRYESSSDENASDEEDNLRTLFANLNMQQKEKLNELISAIHEKDDLLDSQEDFLIKENKKHVKVKNAYALEVEKCEKLSSELSTCHETIDNLRNVNSNLLAKVDSNICNVSIPNLRNNNDDLLAKIEELNISLASLRDENEKLLAKAKDFDVCNTTISDLRSRNDILHAKVVELKSCKPSTSTIEHTSICTRCRDVNIDAIHDHMALIKQQNDHIAQLNAKINEHDLENEKFKFARSMLYSGRHPGIKDGIGFQKGDNVKLNAPPKKLSNFVKGKAPMPQDNEGYILYPAGYPESKIRRIHSRKSHSGPNHAFMYKGETSSSKQPTRAKLPKRKTPSASNEHSFSFKTFDAPYVLTNKSSKVVAKYVGGKHKGSKTCVWVPKVLVSNAKGPKTIWVYASGGSSWIIDSGCTNHMTGEKKMFSSYEKNQDPXRAITFGDGNQXNMGWLWHRRLAHVGMKNLHKLLKGEHILGLTNVHFEKDRICSACQAGKQVGVHHPHKNIMTTDRPLELLHMDLFGPIAYISEREMCPWVISKYFGD

SEQ ID NO: 10336 - protein, 1414 aa, Zea mays
  Clone ID: TF_ZM4623.C5.o1.fg.pep
MSGEHAKKEMETGDKPTTSHGKATSQESRNKGKGKEKKASSHKSHRSGDKKKKMRKVVYYETDTSSPSTSGSDAPSITSKRHERKKFRDEDYDEDEVAQIEHFNSQATTILLASLSREEYNKVQGLKSAKEVWDVLKTAHEGDELTKITKRETIEGELGRFRLRKGEEPQDMYNWLKTLVNQVRNLGSKKWDDHEMVKEVIENFVSFEYMIKGLKKINELDDPSTSEAQSIAFKATEEKKEESTSSRQPIDASKLDNEEMALVIKSFRQILKQRRGKDYKPRSKKVCYKCGKPGHFIAKCPISSDSDRGDDKKGRRKEKKKYYKKKGGDAHVCREWDSDKSSTDSSSDEDAANIAITKGLLFPNVGHKCLMVKDGKKKKVKSKSSTRYESSSDDNASDEEDNLRTLFANLNMQQKEKLNELISAIHEKDDLLDTQEDFLIKENKKHVKVKNAYALEVEKCEKLSSELSTCHETIDNLRSENADLLAKVDSNVCNVSIPNLGNDNDDLLAKIEELNISLASLRIENEKLIAKAKELDVCNVTNSDLRDKNDILHAKIVELNSCKPSTSIIEHTTICTRCRDVNIDAIHDHMALIKQQNDHIAKLDAKIAEHDLENEKFKFARSMLYRGRRPGIKDGIGFQQGGNVKLNAPPKKLSNFVKGKAPMPQDNEGYILYPAGYPEDKIRRIHSRKSHSGPNHAFIYKGETSSSRQPTRAKLPEKKTPSASNDHDISFKTFDASYVLTNKSGKVYASGGSSWVIESGCTNHMTGEKKMFSSYEKNQDPQRAITFGDGNQGLTNVHFEKDRICSACQAGKQVGTHHPHKNIMTTDRPLELLHMDLFGPIAYISIGGKKSHTQETLKGFLRRAQNEFGLRIKKIRSDNGTEFKNSQIEGFLEEEGIKHEFSSPYTPQQNGVVERKNRTLLDMARTMLDEYKTLDRFWAEAVNTACYAINRVFGSKCFILVKRGRKSKFAPKTIEGFLLVYDSNTRAYRVFNKSSGQVEVSCDVVFDETNGSHVEQVDLDEIGVEEAPCIALRNMSIGDVCPKESEEPPNAQDQPSSSTQASPPTQNEDEAQVDEGQDQEDEPPQDDGNDQGGDANDQDKEDEEPRPPHPRVHQAIQRDHPVDTILGDIHKGVTTRSRVAHFCEHYSFVSSIEPHRVEEALQDSDWVVAMQEELNNFTRNEVWHLVPRLNQNVVGTKWVCRNKQDEHGVVTRNKARLVAKGYYQVEGLDFGETYAPVARLESIRILLAYATYHGFKLYQMDVKSAFLNGPIKEEVYVEQPLGFEDKFSRIMTQKFEMSMMGELKYFLGFQVKQLQEGTFISQTKYTQNILNKFGMKDAKPIKTPMGTNGHLDLDTGGKSVDQKKEHIGDLPVLGKILGVLGFKEAIFRSSFNHRSRVYCRRPLLRAIALDEANP

SEQ ID NO: 10337 - protein, 1769 aa, Zea mays
  Clone ID: TF_ZM4628.C5.o1.fg.pep
MSGDHAKKEMETGEKPTTSRGSTSSEESRTKRKDKKKDSSKRKEKKSSSSHHQEKKEKSSSHKPHRKGDKHKRMRKVVYYETDTSSTSTSDSDAPSVTSKRQERKKYSKIPLRYPRISKHTPLLSVPLGKPPTFDGEDYARWSDLMRFHLTSLHKSIWNVVEFGAQVPSVGDEDYDEDEVAQIEHFNSQATTILLASLSKEEYNKVQGLKSAKEIWDLLKTAHEGDELTKITKRETIEGELGRFRLRKGEEPQHMYNRLKTLVNQARNLGSVKWDDHEVVKVILRSLIFLNPTQVQLIRGNPRYTKMTPEEVIGNFVSFECMIEGSRKINELDDATTSEAQPVAFKATEEKKEESTPSRQPIDASKLDNEEMALVIKSFRQILKQRRGKDHKSRSKKVCYKCGKPGHFIAKCPISSDSDRGDDKKGRRKEKKRYYKKKGGDAHVCREWDSDESSSDFSDDEDAANIAVTKGLLFPNVGHKCLMAKDGKKKVKSKSSTKYESSSDDNASDEEDNLCSLFANLNIAQKEKLNELVSAIHEKDDLLDSQEDCLIKENKKHVKVKKAYALEIEKCEKLSSELSTCREMIDNLRNENAILNAKVDSHVCNVSIPNLRDDNVDLLAKIDELNVSLTSLRIENEKLLAKAKDFDVCNTTISDLRTKNDILHAKVVELKSCKPSTSIVEHVSICTRCRDVDVNAIHDHMALIKQQNDHIAKLDAKIAEHNLENEKFKFARSMLYNGRRSGIKDGIGYQRGDNVKLNAPPKNLSNFVKGKAPMPQDNEGYILYPAGYPESKIRRIHSRKSHSGPNHAFMYKGETSSSRQPTRAKLPKKTPIASNKHNISFKTFDASYVLTNKSGKIVAKYVGGKHKGSKTCVWVPKVLVSNAKGPKTIWVYASGGSSWILDSGCTNHMTGEKRMFSSYEKNQDPQRAITFGDGNQGVTVFRRSDDSIAFKGVLEGQLYLVDFDRAELDTCLIAKTNLGWLWHRRLAHVGMKNLHKLLKGEHILGLTNVHFEKDRICSACQAGKQVGAHHPHKNIMTTDRPLELLHMDLFGPIAYISIGGSKYCLEKSQTQETLKGFLRRAQHEFGLRIKKIRSDNGTEFKNSQIEGFLEEEGIKHEFSSPYTPQQNGVVERKHRTLLDMARTMLDEYKTPDRFWAEAVNTACYAINRLYLHRILKKTSYELLTGKKPNISYFKVFGSKCFILVKRGRKSKFAPKTVEGFLLGYDSNTRAYRVFNKSTGLVEVSCDVVFDETNGSQVEQVDLDEIGNEEAPCIALRNMSIGDVCPKESEEPPNAQDQPSSSMQASPPTQNEDEAQVDEGQNQEDEPPQDNGNDQGGDENNQEKEDEEEPRPPHPRVHQAIQRDHPVDTILGDIHKGVTTRSRVAHFCEHYSFVSSIEPHRVEEALQDSDWVVAMQEELNNFTRNEVWHLVPRPNQNVVGTKWVFRNKQDEHGVVTRNKARLVAKGYSQVEGLDFGETYAPVARLESIRILLAYATYHGFKLYQMDVKSAFLNGPIKEEVYVEQPPGFEDSEYPNHVYRLSKALYGLKQAPRAWYECLRDFLITNGFKVGKADPTLFTKTLDNDLFVCQIYVDDIIFGSTNESTCEEFSRIMTKKFEMSMMGELKYFLGFQVKQLQEGTFISQTKYTQDILSKFGMNDAKPIKTPMGTNGHLDLDTGGKSVDQKSISNQVIGILKGNWSLRRRQRLPLRNSSFAITPTISLFFGGEMSIKEKDFVFGIILTHLFMTKEKDSTKRALMIPFLAIHAKKGEK

SEQ ID NO: 10338 - protein, 1703 aa, Zea mays
  Clone ID: TF_ZM4635.C5.o5.fg.pep
MSGDHAKKEMETGDKPTTSHGKASSEESRNKGKGKEKKSSSHKSHRSGNNKKKMRKMVYYETDTSSPSTSGSNAPSITSKRHERKKFSKTPLHYPRIPKHTPLLSVSLGKPPTFDGEDYARWSDLMRFHLTSLHKSIWDIVEFGVQVPSVGDEDYDEDEVAQIQHFNSQASTILLASLSREEYNKVQGLKGAKKIWDTLKTSHEGDEVTKITKRETIEGELDRFRLRQGEEPQDMYNRLKTLVNQVRNLRSKKWDDHEIVKVILRSLVFLNPTQVQLIRGNPRYTLRTPEEVIGNFVSFELMIKGSKKINELDGPSTSEAQPVAFKATEEKKEESTSSRTPIDASKLDNEEMALIIKSFRQILKQRRGKNYKPCSKKVCYKCGKPGHFIAKCPISNDSDRGDDKKGRRKEKKKYYKKKGDDAHVCREWDSDESSSDSSSDEDAANIAVTKGLLFPNVSHKCLMAKDGKKKKVKSRSSTKYETSSDEDNASNEEDNLRILFANLNMQQKEKLNELISVIHEKDDLLDTQEDFLIKENKKHVKVKNAYALEVEKYEKLSSELSTCHETIDNLRNNNAKLIAKVDSNACNVSIPNPRNDNVDLLAKIEELNISLASLRDENKKLLAKAKELDVCNASISDLRSKNDILHAKVVELKSCKPSTSIVEHTSICTRCRDINVDAIHDHLALIKKQNDHIAQLNAKISEHDLENEKFKFARSMLYSGRRPSIKDGIGFQKGDNVKLNAPPKRLSNFVKGKAPMPQDNEGYILYPAGYPESKIRRIHSRKSHSGPNHAFMYKGETSSSRQPTRAKLPKKKTPSASNDHSISFKTFDASYVLTNKSGKVYASGGSSWIIDSGCTNHMTGEKKMFSSYEKNQDPQRAITFGDGNQGLVKGATVFRRSDDSIAFKGVLEGQLYLVDFDRAELDTCLITKTNMGWLWHRRLAHVGMKNLHKLLKGEHILGLTNVHFEKDRICSACQAGKQVGVHHPHKNIMTTDRPLEILHMDLFGPIAYISIGGSKYCLVIVDDYSRFTWVFFLQEKSHTQETLKGFLRRAQNEFGLRIKKIRSDNGTEFKNSQIEGFLEEEGIKHEFSSPYTPQQNGVVERKNRTLLDMARTMLDEYKTSDRFWAEAVNTACYAINRVFGSKCFILVKRGRKSKFAPKTVEGFLLGYDSNTRAYRVFNKSSGQVEVSCDVVFDETNGSQVEQVDLDEIGDEEAPCIALRNMSIGDVCPKESEEPPNAQDQPSFSTQASPPTQNEDGAQVDEERDQNDEPPQDDDNDQGGDANDQDKEDEEPRPPHPRVHQAIQRDHPVDTILGDIHKGVTTRSCVAHFCEHYSFVSSIEPPRVEEALQDSNWVVAMQEELNNFTSNEVWHLVPRPNQNVVGTKWVFHNKQDEHGVVTRNKARLVAKGYSQVEGLDFGETYAPVARLESIHILLAYATYHGFKPYQMDVKSAFLSGPIKEKVYVEQPPGFEDSEYPNHVYKLSKALYGLKQAPRAWYECLRDFLITNGFKVGKADPTLFTKTLDNDLFVCQIYVDDIIFGSTNESTCEEFSRIMTQKFEMSMMGELKYFLGFQVKQLQEGTFISQTKYTQDILSKFGMKDAKPIKTPMGTNGHLDLDTEGAKGSQKANKKTKKRVQQKGARDNRSAPWSGAPDCPVCHRTVSGAPPDNDRCTRELQVEFNTFENSQRHSAIIHRTVRCPRGERL

SEQ ID NO: 10339 - protein, 1649 aa, Zea mays
  Clone ID: TF_ZM4646.C5.o1.fg.pep
MPPRTRLTARKSTGPIGVPRHQLAPRHESSSSGSNDPIGDLEARDQLADRDLALDWAVQSRLLMCAKEARAQARVKELSSTVDDLQVYCNTLHEEVHVLYSQLHPSEPAPPAEAEAGPSHVAGRALGGELDLFEPPPSLSNVKWKVFSGTLCLPQMFLPQMPTRTRAQDAAGTSGGRDVTPNPPPVPPTLAEAIAALVNATADNTRFLREMAGQQQLQQQAGRGFQQGPRETTYLDFSETRPPLFIKAEDPLEADEWIRVIEQKFGLLRCSEVQKPLFAAQQLRGPASTWWGNFVAIQPDNHQVTWNEFKAAFREHYIPEGVLHMKQEEFMKLQQGGDTVTQYLNKFNHLSQYAIDQVNTDLKKKNCFMRGLNDRMQRKMAACIDLTYGKAVSTALSVEAKYANSGKTKGFGGERPNQGQAKKPRFVIRPSSQNRPFSRPPSFPFKQPIIIRPNNAPTTPKQPGAPGTRFPVLPSSSTGCFNCGKSGHFIKDCPYPRQNQANNQQGSGNSAPGKGSTPGKNTKKTGRVYYTQVATTPEGEPVMMGTFPVASHPAIILFDSGASHTFISKTFVEQHHIAYHESKEGFKIHSPGGHIFTKEVAYGVPVTMAGRNFPANMIVLKGQDIDVILGMNWLTQYKAILNTEFRTVRLSYNQEEILLTLPATNPAKASGRVYEAIVPEIKNIPVVCEFPDVFPEDLPGLPPERDVEFVIELKPGTAPISRRSYRMPPNELAELKTQLQDLLNKGFIRPSSSPWGCPAIFVKKKDQTLRMCVDYRPLNEVTIKNKYPLPRIDILFDQLTGARVFSKIDLRSGYHQIRIRPEDIPKTAFTTRYGLFEYLVMSFGLTNAPAHFTYLMNSVFMPELDKFVVVFIDDILIYSKNEEDHAQHLRIVLTRLREHQLYAKFSKCAFWLEEIQFLGHVLSAKGIAVDPSKVKDILEWKPPTTVHQVRSFLGLAGYYRRFIPDFSKLVKPITSLLKNDIKFNWSSKCNEAFEQLKTLLTTAPVLAQPDITKPFDVYCDASGSGLGYVLMQEGRVIAYASRQLRRHEEHYPTHDLELAAVVHALKIWRHYLLGNICHIYTDHKSLKYIFTQSELNMRQRRWLELIKDYELEIHYHPGKANVVADALSRKVACHCLMAKTFENTLCQEMEKLNLGIIQQGTLNQLKLESIILQRIIDAQKDNLGMKHIREKVKAGTAKCFKEDDQGVIWFKNRIVVPKNEELHQQILDEAHLSRYSIHPGSTKMYQDLKQHYWWTKMKIEIARYVAKCDTCRRVKAIHMKTAGPLQSLPIPTWKWEDISMDFIVGLPRTAKGYDSIWVIVDRLTKIAHFLPVKVTYTIATYAALYIARILSLHGVPKTIVSDRGPQFVSKFWEELHKFLGTKLLHSSAYHPQTSGQTERVNQILEDMLRACVLDFSPKWDECLPLAEFSYNNSYQESIKMAPFEALYGRRCRTPLNWSEPGERYFFRPDMVKEVEEKVHRIIHNMKKAQARQKSYADRRRQPLCFLVDDYVYLKVSPMKGISRFGIKGKLAPRYIGPFLVLEQCGPVAYRLQLPETLSAVHNVFHVSQLKKCLRVPDRTVEVADVVLEPDLTYSEHPIRVLDQKDRVTRRKTLKFYKIQWNQHSEDEATWETQDFLDKNFPGFLASCKL

SEQ ID NO: 10340 - protein, 905 aa, Zea mays
  Clone ID: TF_ZM4678.C5.o1.fg.pep
MSGDHAKKEMGTGEKPITSHGEAPSGESYNKGKGKEKESPSHKSRRSGDKKKKMRKVVYYETDSSSPSTTGSDTPSVTSKRHERKKFSKIPLRYPRIPKHTPLLSVPLGKPPTFDGEDYARWSDMMRYHLTSLHKSIWDVVEFGVHVPSVGDEDYDEDEVAQIVHFNSQATTILLTSLSREEYNKVQGLKSAKEIWDVLKTAHEGDEVTKITKRETIEGELGRFRLRQGEEPQEMYNRLKTLVNQVRNLGNKKWDDHEMVKVILRSLVFLNPTQVQLIRGNPRYTLMSPEEVIGNFVSFELMIKGSKKINELDGPFTAEAQPVAFKATEEKKEESTSSRQPIDASKLDNEKMTLIIKSFRQILKQRRGKDYKSRSKKVCYKCGKPGHFIAKCPISSDSDRGDDKKGRRKEKKRYYKKKGGDAHVCQEWDSDESSTDSSSDEDAANIAVTKGLLFPNVGHKCLMAKDDKRKKVKSRSSTKYETSSDEDNASDEEDNLCTLFANLNMQQKEKLNELISAIHEKDDLLDTQEDFLIKENKKHVKVKNTYALEVEKCEKLSNELSTCHDTIANLRNENDKLIAKVDSNICDDSISNLRDDKANLLAKIEKLNDSLASLRNENEKLIAKAKDFDVCNVTISNLRSENDILHAKVVELKFCKPSTSTVEHTSICTRCRDINIDAIHDHMALIKQQNDHIAKLDAKIAEHDLENEKFKFARSMLYSGRRPGIKDGIDFQKGDNVKLNAPPKRLSNFVKGKAPMPQDNEGYILYPAGYPESKIRRIHSRKSHSGPNHAFVYKGETSSSRQSTRAKLPKRKTPTASNGHNISFKTFDASYVLTNKSGKVYASGGSSWIIDSGCTNHMTGEKKMFSSYKKNQDPQRAITFGDGNQGLVKGLGKIAISPHYTTVDL

SEQ ID NO: 10341 - protein, 1877 aa, Zea mays
  Clone ID: TF_ZM4683.C2.o1.fg.pep
MSGDHTKKEMETGEKPTTSYGSTSSEESRTKRREKKKSSSNKGKEKKSSSHHKEKKEKSSSHKPHRKGDKHKRMRKVVYYETDTSSTSTSDSDAPSVTSKRQERKKYSKIPLRYPRISKHTPLLSVPLGKPPTFDGEDYARWSDLMQFHLISLHKGIWDVVEFGVQVPSIGDENYDEDEVAQIEHFNSQATTILLASLSKEEYNKVQGLKNAKEIWDVLKTAHEGDELTKITKRETIEGELGRFRLHKGEEPQHMYNRLKTLVNQVRNLGSKKWDDHEVVNVILRSLIFLNPTQVQLIRGNPRYTKMTPEEVIGHFVSFECMIEGSRKINELGDPSEAQPVAFKATEERKEESTPSRQPIDASKLDNEEMALVIKSFRQILKQRRGKDYKSRSKKVCYKCGKPGHFIAKCPISSDSDRGDDKKGRRKEKKRYYKKKGGDAHVCREWDSDESSSDSSDDEDAANIAVTKRLLFPNVGHKCLMAKDGKKKKVKSNSSTKYESSSDDNASDEEDNLRILFANLNMEQKEKLNELISAIHEKDDLLDSQEDCLIKENKKHVKVKKAYALEVEKCEKLSSELSTCREMIDNLRNENAILNAKVDSHVCNVSIPNLRDDNIDLLAKIDELNASLASLRLENENLIAKAKNFDVCNATISDLRTKNEIKIDAKIAEHNLENEKFKFARSMLYNGRRPGIKDGIGFQRGDNVKLNTPPKNLSNFVKGKAPMPQDNEGYILYPAGYPESKIRKTHSRKSHSGPNHAFMYKGETSSSRQPTRAKLPRKKISNASNEHSISFKTFDASYVLTNKSGKVVAKFVGGKHKGSKTCVWVPKVLVSNAKGPKTVWVYASGGSSWILDSGCTNHMTGEKRMFSSYEKNQDPQRAITFGDGNQGLVKGVTVFRRSDDSIAFKGVLEGQLYLVDFDRAELDTCLIAKTNMGWLWHRRLAHVGMKNLHKLLKGEHILGLTNVHFEKDRICSACQAGKQVGTHHPHKNIMTTDRPLELLHMDLFGPIAYISIGGSKYCLVIVDDYSRFTWVFFLQEKSQTQETLKGFLRRAQNEFALRIKKIRSDNGTEFKNSQIEGFLEEEGIKHEFSSPYTPQQNGVVERKNRTLLDMARTMLDEYKTPDRFWAEAVNTACYAINRLYLHRILKKTSYELLTGKKPNISYFRVFGSKCFILIKRGRKSKFAPKTVEGFLLGYDSNTRAYRVFNKSTGLVEVSCDVVFDETNGSQVEQVDLDEIGEEQAPCIALRNMSIGDVCPKESEEPPSTQDQPSSSMQASPPTQNEDEAQNDEEQNQEDEPPQDDSNDQGGYTNDQEKEDEEEPRPPHPRVHQAIQRDHPVDTILGDIHKGVTTRSRVAHFCEHYSFVSSIEPHRVEEALQDSDWVVAMQEELNNFTRNEVWHLVPRPNQNVVGTKWVFRNKQDEHGVVTRNKARLVAKGYSQVEGLDFGETYAPVARLESIRILLAYATYHGFKLYQMDVKSAFLNGPIKEEVYVEQPPGFEDSEYPNHVYRLSKALYGLKQAPRAWYECLRDFLIANGFKVGKADPTLFTKTLEKDLFVCQIYVDDIIFGSTNESTCEEFSRIMTQKFEMSMMGELKYFLGFQVKQLQEGTFICQTKYTQDILTKFGMKDAKPIKTPMGTNGHLDLDTGGKSVDQKVYRSMIGSLLYLCASRPDIMLSVCMCARFQSDPKESHLTAVKRILRYLAYTPKFGLWYPRGSTFDLIGYSDADWAGCKINRKSTSGTCQFLGRSLVSWASKKQNSVALSTAEAEYIAAGHCCAQLLWMRQTLRDYGYKLTKVPLLCDNESAIKMADNPVEHSRTKHIAIRYHFLRDHQQKGDIEISYINTKDQLADIFTKPLDEQSFTRLRHELNILDSRNFFC

SEQ ID NO: 10342 - protein, 2413 aa, Zea mays
  Clone ID: TF_ZM4782.C1.o2.fg.pep
MSGEHAKKEMETGDKPATSHGKASSEESRNKKKGKEKKASSHKSHRSGDKKKKMRKVVYYETDTSSLSTSGSDAPSITSNRHERKKFSKIPLHYPRTSRHTPLLSVPLGKPPTFDGEDYARWSDLMKFHLTSLHKSIWNVVEFGAQVPSVGDEDYDDDEVAQIEHFNSQATTILLASLSREEYNKVQGLKSAKEVWDVLNTAHEGDELTKITKRETIEGELGRFRLRQWEEPQDMYNRLKTLVNQVRNLGSKKWDDHEVVKVILRSLIFLNPTQVQLIRGNPRYTLMTPEELIGNFVSFEFMIKGSRKINELDGPSTSEAQPVAFKVMKEKKEVSTPSRTPIDASKLDNEEMTLVIKSFRQILKQWRGKDYKPRSKKVCYKCGKPGHFIAKCPISSDSDRGDDKKGRRKEKKRYYKKKGGDAHVCREWDSDESSSDSSDDEDAANIAVTKGLLFPNVGHKCLMAKDGKKKKVKSKSSTRYESSSDDNASDEEDNLHTLFANLNMQQKEKLNELISAIYEKDDLLDSQEDFLIKENKKHVKVKNAYALEVEKCEKLSSELSTCHETVDNLRNENSNLLTKVDSVACNVSIPNLRNDNDDLLAKIEELNMSLASLRIENEKLLAKAKELDVCNATISDLRSRNDILHAKVVQLKSCKPSTSTVEHTTICTRCRDVDINAIHDHMALLKQQNDHIAKLDAKIAEHELENEKFKYARSMLYSGRRPGIKDGIGFQKGDNVKLNAPPKKLSNFVKGKAPMPQDNEGYILYPASYPKSKIRRIHSRKSHSGPNHAFMYKGETSSSRQPTRAKLPKKKTPSASNGHNISFKTFDASYVLTNKSGKVVAKYVGSKHKGSKTCVWVPKVLVSNAKGPKTIWVYASGGSSWIIDSGCTNHMTGEKKMFSSYEKNQDPQRAITFGDGNQGVTVFRRSDDSIAFKGVLEGQLYLVDFDRAELDTCLIAKTNMGWLWHRRLAHVGMKNLHKLLKGEHILGLTNVHFEKDRICSACQTGKQVGAHHPHKNIMTTDRPLELLHMDLFGPIAYISIGGSKYCLVIVDDYSSFTWVFFLQENSHTQETLKGFLRRAQNEFGLRIKKIRSDNGTEFKNSQIEGFLEEEGIKHEFSSPYTPQQNGVVERKNRTLLDMARTMLDEYKTSDRFWAEAVNTSCYAINRLYLHRILKKTSYELLTGKKPNISYFRVFDSKCFILVKRGRKSKFAPKTVEGFLLGYDSNTRAYRVFNKSTGQVEVSCDVVFDETNGSQVEQVDLDEIGDEEAPCIALRNISIGDVCPKESKEPPNAQDQPSSSTQASPPTQNKDEAQIDEGEDQANEPPQDDDNDQGGDANDQDKEDEEPWPPHPRPHRVEEALQDSDWVVAMQEELNNFTRNEVWHLVPRPNQNVVGTKWVFRNKQDEHGVVTRNKARLVAKGYSQVEGLDFGETYAPVARLESIRILLAYATYHGFKLYQMDVKSAFLNGPIKEEVYVEQPPGFEDSEYPNHVYKLSKALYGLKQAPRAWYECLRDFLITNGFKVRKADPTLFTKTLENDLFVCQIYVDDIIFGSTNESTCEEFSRIMTQKFEMSMMGELKYFLGFQVKQLQEGTFLSQTKYTQDILSKFGMKDAKPIKTPMGTNGHLDLDEGAHRARSPPSPRRLPRPQSLLNLPPQGAGGSAAASGGGGRRGRRAGAAAGARLRAGLPGDGSQIRPLSPLTERIQGTTRSCPRPFACFVVLSSPRGDPTYEQEVFLATRCGRRMLDLSRFRDRDRARCRDWCFAAFVLAYATYLDDRLKERMQDRGAGGASPGKWHVDGDPVGMACQVAEAWELVPRGRLVKESAAMYCELTEVMVVLLDRFADLGTPACVRVHSIFTSTAWNLGMLSSRFTDRTAWNLDSALTTVETLASAAICGIVHSIIGGQPLLIVGVAEPTIIMYTYIYNFAKNQPNLGEKMFLPWATWVYIWTAVMLFLMAIFNVAAILNKFTRFAGELFVMLITVLFMQEAIKGMVGEFSAPNAWQRSLIADYGVPLMVILWTSLSYSLPSRIPSGVPRRLFTPLPWEPKSLQHWTVAKDLFSVPTVHIFLAIVPATMVAGLYFFDHTVASQMSQQKEFNLKNPSAYHYDILVLSLTLLRKKMVQTAKEGMMNNATSSEVYVKMQDVFIKMDHGGDTVSAHKEPKDLKDAIIPEGNGSGTVPEVFDPEKHVDAYLPVRVNEQRVSNLLQSLLIAGCIRVTPLIQKIPTSVLWGYFAYMSIDSLPRNQFWERIQLLFITPQRRYKVLEGAHASFMESVPFNTICTFTLFQLIYLLIVFGMTWIPVAGILLPLLFFFFLIIIRQHFIPKYFDPSHLRELDAAEYEELKGFTPDPSVCEDESVRSGDAQPGYASEILEEFTTHRGELKRRNSTFHDGRLLQLNSVKMTRELSRVPSWLT

SEQ ID NO: 10343 - protein, 956 aa, Zea mays
  Clone ID: TF_ZM4824.C1.o1.fg.pep
MSGDHAKKEMETGEKPTTSQGSTSSEESRTKRKEKKKISSNKGKEKKSSSHHKEKKEKSSSHKPRRSGDKQKRMRKVVYYETDTSSTSTSGSDAPSVTSKRQERKKFSKIPLHYSRISKHAPLLSVPLGKPPTFDGEDYARWSDLMRFHLTSLHKSIWDVVEFGAQVPSVGDKDYDEDEVAQIEHFNSQATTILLASLSREEYNKVQGLKNAKEVWDVLKTAHEGDELTKITKRETIEGELGRFRLRKGEEPQHMYNRLKTLVNQVRNLGSVKWDDHEMVKVILRSLIFLNPTQVQLIRGNPRYTKMTPEEVIGNFVSFECMIEGSRKINELDEPTTSEAQPVALKATEEKKEEATPSRQPIDASKLDNEEMVLVIKSFRQILKQRRGKDYKSRSKKVCYKCGKPGHFIAKCPISSDSDRGDDKKGRRREKKRYYKKKGDDAHVCREWDSDESSSDSSDDEDAANIAVTKGLLFPNVGHKCLMAKDDKRKKVKSNSSTKYESSSDDNASDEEDNLRSLFANLNIAQKEKLNELVSAIHEKDDLLDSQEDLLIKENKKHVKVKKAYALEIEKCEKLSSELSTCREMIDNLKHENASLNAKVDLHVCNVSIPNPRDNNDDLLARIEELNISLASLRVENESLIAKAKELDVCNTTISDLRDKNDILHAKIVELNSCKPSTSIVEHVSICTRCRDIDVNAIHDHMSLIKQQNDHIAKLDAKIAEHNLEDEKFKFARSMLYNGRRPGIKDGIGFQRGDIVKLSAPPKRLSNFVKGKAPMPQDTEGYILYPAGYPESKIRRIHSRKSHSGPNHAFMYKGETSSSRQPTRAKLPKKTPNASNDHNISFKTFDASYVLTNKSGKVVAKYVGGKHKGSKTCVWVPKVLVSNAKGPKTIWVYASGGSSWILDSGCTNHMTGEKRMFSSYEKNQDPQRAITFGDGNQGLVKGVTVFRRSDDSIAFK

SEQ ID NO: 10344 - protein, 1926 aa, Zea mays
  Clone ID: TF_ZM4868.C2.o1.fg.pep
MSGDHAKKEMETGEKPTTSHGSTSSEESRTKRREKKKSSSNKGKEKKSSSHHKEKKEKSSSHKPHRKGDKHKRMRKVVYYETDTSSTSTSDSDAPSVTSKRQERKKYSKIPLRYPRISKHTPLLSVPLGKPPTLDGEDYARWSDLMRFHLTSLHKSIWDVVEFGAQVPSVGDEDYDEDEVAQIEHFNSQATTILLASLSKEEYNKVQGLKSAKEIWDVLKTAHEGDELTKITKRETIEGELGRFRLHKGEEPQHMYNRLKTLVNQVRNLGSKKWDDHEVVNVILRSLIFLNPTQVQLIRGNPRYTKMTPEEVIGHFVSFECMIEGSRKINELGDSSEAQPVAFKATEEKKEEATPSRQPIDTSKLDNEEMALVIKSFRQILKQRRGKDYKSRSKKVCYKCGKPGHFIAKCPISSDSDRGDDKKGRRKEKKRYYKKKGGDAHVCREWDSDESSSDSSDDEDAANIAVTKGLLFPNVDHKCLMAKDGKKKVKSKSSTKYESSSDDNASDEEDNLRSLFANLNIAQKEKLNELVSAIHEKDDLLDSQEDCLIKENKKHVKVKKAYALEIEKCEKLSSELSTCREMIDNLRNENAILNAKVDSHVCNVSIPNLRNDNVDLLAKIDELNVSLASLRNENEKLLAKAKDFDVCNTTISDLRDKNDILHAKIVELNSCKPSTSIVEHVSICTRCRDVDINAIHDHMALIKQQNDHIAKLDAKIAEHNLENEKFKFARSMLYNGRRPGIKDGIGFQRGDNVKISAPPKRLSNFVKGKAPMPQDNEGYILYPAGYPESKIRKIHSRKSHSGPNHAFMYKGETSSSRQPTRAKLPRKKTPNASNDHDISFKTFDASYVLTNKSGKVVAKYVGGKHKGSKTCVWVPKVLVSNAKGPKTIWVYASGGSSWILDSGCTNHMTGEKRMFSSYEKNQDPQRAITFGDGNQGLVKGVTVFRRSDDSIAFKGVLEGQLYLVDFDRAELDTCLIAKTNMGWLWHRRLAHVGMKNLHKLLKGEHILGLTNVHFEKDRICSACQAGKQVGSHHPHKNIMTTDRPLELLHMDLFGPIAYISIGGSKYCLVIVDDYSRFTWVFFLQEKSQTQETLKGFLRRAQNEFDLRIKKIRSDNGTEFKNSQIEGFLEEEGIKHEFSSPYTPQQNGVVERKNRTLLDMARTMLDEYKTSDRFWAEAVNTACYAINRLYLHRILKKTSYELLTGKKPNISYFRVFGSKCFILVKRGRKSKFAPKTVEGFLLGYDSNTRAYRVFNKSTGLVEVSCDVVFDEANGSQVEQVDLDEIGEEEAPCIALRNMSIGDVCPKESEEPPNAQDQPSSSMQASPPTQDQEEAQVDEEKDQSNEPPQDDGNDQGGDTNDQDKEDEEEPRPPHPRVHQAIQRDHPVDTILGDIHKGVTTRSRVAHFCEHYSFVSSIEPNRVEEALQDSDWVVAMQEELNNFTRNEVWHLVPRPNQNVVGTKWVFRNKQDEHGVVTRNKARLVAKGYSQVEGLDFGETYAPVARLESIRILLAYATYHGFKLYQMDVKSAFLNGPIKEEVYVEQPPGFEDSEYPNHVYRLSKALYGLKQAPRAWYECLRDFLIANGFKVGKADPTLFTKTLENDLFVCQIYVDDIIFGSTNESTCEEFSRIMTQKFEMSMMGELKYFLGFQVKQLQEGTFISQTKYTQDILSKFGMKDAKPIKTPMGTNGHLDLDTGGKSVDQKVYRSMIGSLLYLCASRPDIMLSVCMCARFQSDPKESHLTAVKRILRYLTYTPKFGLWYPRGSTFDLIGYSDADWAGCKINRKSTSGTCQFLGRSLVSWASKKQNSVALSTAEAEYIAAGHCCAQLLWMRQTLRDYGYKLTKVHLLCDNESAIKMADNPVEHSRTKHIAIRYHFLRDHQQKGDIEISYINTKDQLADIFTKPLDEQTFTRLRHELNILDSRNFFC

SEQ ID NO: 10345 - protein, 598 aa, Zea mays
  Clone ID: TF_ZM4871.C2.o2.fg.pep
MAGNQFQQHGRRAPPQGPRETSYLDFSETRPPLFVKAEDPLEADEWIRVIEQKFGLIRCTETQKSLFVAQQLRGPASTWWGNFVAIQPARHQVTWDEFKLAFREHYIPEGVLHMKQEEFIRLKQGGDTVMQYLNKFNHLSQYAIDQVNTDLKKKNCFMRGLNDWLQRKMATYLDLTYSRAVSTALAVEAKNTGQGKSKGFGGDRSNQGPEKRTRLVIRPFNQNHSSPRPPSYPFKQPVFIRPTTAPASTNQLSAPGARFPAHPSSSTGCFNCGKSGHFIKDCPYPKLNKFNNQQNSGTSNQGKGNMANNSVGKNVKKTGRIYYTQVATTPEGEPIMMDLPGLPLERDVEFVINLKPDTAPISRRSYWMPPNELAELKMKLQDLMEKGFIRPSSSPWGCPTIFVKKKDQTLRMCVDYRPLNEEIQFLGHVLSANGIAVDPSKVKDILEWKPPTTVHQVRSFLGLAGYYRRFIPDFSKIVKLITSLLKNDTKFNWSSRCNEAFEQLKGFKGCHLQAGLITVVMSKLCQRESGGGKPNFLLAWFPKTLAIAPKIWQLIGLLGTANLSSSLSGTIIRGTLKTPNSQLVTPISIKLQRPDGYD

SEQ ID NO: 10346 - protein, 447 aa, Zea mays
  Clone ID: TF_ZM4889.C5.o1.fg.pep
MTPEEVIGNFVSFEFMIKGSRKINELDGPSTSEAQPVAFKATEEKKEESTPSRTPIDASKLDNEEMTLVIKSFRQILKQRRGKDYKPRSKKVCYKCGKPGHFIAKCPISSDSDRGDDKKGRRKEKKRYYKKKGGDAHVCREWDSNESSSYSSSDEDAANIAVTKGLLFPNVGHKCLMAKDGKKKKVYASRGSSWIIDSGCTNHMTGEKKMFSSYEKNQDPQRAITFGDGNQDSLDYNLLSVSQLCQMGYNYLFTDEKSHTQETLKGFLRRAQNEFGLRIKKIRSDNGTEFKNLQIEGFLEEEGIKHEFSSPYTPQQNGVVERKNRTLLDMARTMLDEYKTSDRFWAEAVNTACYAINRNRKSLQMHKINHPPPRKHLHQLKMRMRLKLMKEKIKQMSHLKMTAMIKGEMQMSKTRRMKNQDRHTQESTKQSNEITPSTPSSATFIRE

SEQ ID NO: 10347 - protein, 1572 aa, Zea mays
  Clone ID: TF_ZM4891.C1.o15.fg.pep
MRRVKAIRNKSTTKDEVTNSRAKEEDMTKRKKSVDHVAIENRERMMLQYALSVALNGVFTMHTLESLFLSRVRKRQIFVAFAPRWYQMRKNKTEVREDSVLHLGSFAYNLSGGVCASLGLYNITTLHSLLALVYCNTLHEEVHILYSQLHPSEPPHPAEAEAGPSHVAGCALGGELDLFEPPPSLRCRPGLEDRTQPELLGGRDVTPNPPPVPPTLAEAIAALVNATADNTRFLREMAGQQQFQQQAGRGYPQGPRETTYLDFSETRPPLFVKAEDPLEADEWIRVIEQKFGLLCCSETQKPLFAAQQLRGPASTWWGNFVAIQPVNHQYAIDQVNTDLKKKNCFMRGLNDRLQRKMATCIDLTYGKAISTALSVEAKYANSGKNKGFGGERPNQGQAKKQQFVIRPSNQNRPFSRPPSFPFKQPIIIRPNNTPTTPNQPGAPGTRFPALPSSSTGCFNCGKSGHFIKDCPYPRQNQSNASQGSGKSAQPKGNAVGKKYKEDGACILHSSGYYTGRRASDDGKKFVEQHHIAYHESKEGFKIHSPGGHIYTREVAYGVPVTMAGRNFPANMIVLKGQDIDVILGMNWLTQHKAILNTELRTVRLSYNQEEILLTLPATNPAKASGRVYEAIVPEIKNIPVVCEFPDVFPEDLPGLPPERDVEFVIELKLGTAPISRRSYRMPPNELAELKIQLQDLLNKGFIRPSSSPWGCPAIFVKKKDQTLRMCVDYRPLNEVTIKNKYPLPRIDILFDQLTGARVFSKIDLRSGYHQIRIRPEDIPKTAFTTRYGLFEYLVMSFGLTNAPAHFTYLMNSVFMPELDKFVVVFIDDILIYSKNEEDHAQHLRIVLTRLREHQLYAKFSKCAFWLEEIQFLGHVLSAKGIAVDPSKVKDILEWKPPTTVHQVRSFLGLAGYYRRFIPDFSKLVKPITSLLKNDIKFNWSSKCNEAFAQLKTLLTTAPVLAQPDITKPFDVYCDASGSGLGCVLMQEGRVIVYASRQLRRHGEHYPTHDLELAAVSELNMRQTRWLELIKDYELEIHYHPGKANVVADALSRKTSCHCLMAKTSENTLCQEMEKLNLGILQQGTLNQLKLESIILQRIIDAQKDNLGMKHIREKIRAGVAKCFKEDDQGVIWFKNRIVVPKNEELRQQILDEAHLSRYSIHPGSTKMYQDLKQHYWWTKMKIEIARYVARCDTCKRVKAIHMKTAGPLQSLPIPTWKWEDISMDFIVGLPRTAKGYDSIWVIVDRLTKIAHFLPVRAKYTVATYAALYIDRILSLHGIPKTIVSDRGPQFVSKFWEELHKSLGTKLLHSSAYHPQTSGQTERVNQILEDMLRACVLDFSQKWDECLPLAEFSYNNSYQESIKMAPFEALYGRQCRTPLNWSEPGERYFFRPDMVKEVEEKVQRIIHNMKKAQTRQKSYADRRRQPLCFLVDDYVYLKVSPMKGVSCFGVKGKLAPRYIGPFLVIEQCGPVAYRLQLPETLSAVHNVFHVSQLKKCLRVPDRTVEVTDVVLEPDLTYSEHPIRVLDQKDRVTRRKTLKFYKIQWNQHSEDEATWETQDFLNKNFPGFLASCKL

SEQ ID NO: 10348 - protein, 1540 aa, Zea mays
  Clone ID: TF_ZM4893.C6.o6.fg.pep
MPPRTRLTARKSTGPIGVPRHQLAPRHESSSSGSNDPIGDLEARDQLADRDLALDWAVQSRLLMCAKEVRAQARVKELSSTVDNLQMPIRTRGQDAAGTSGGRDVTPNPPPVPPTLAEAIAALVNATADNTRFLREMAGQQQFQQQAGRGYPQGPRVTTYLDFSETRPPLFVKAEDPLEADEWIRVIEQKFGLLRCSETQKPLFAAQQLRGPASTWWGNFMAIQPDNHQVTWDEFKAAFREHYIPEGVLHMKQEEFMKLQQGGDTVNQYLNKFNHLSQYAIDQVNTDLKKKNCFMRGLNDRLQRKMATCIDLTYGKAVSMALSVEAKYTNSGKNKGFGAYHYPPNNTPTTPKQPGAPGTRFPALPSSSTGCFNCGKSGHFIKDCPYPRQNQSNASQGSGKSAQPKGNAVGKNTKKTGRIYYTQVATTPEGEPVMMGTFPVASHPAIILFDSGASHTFISKKFVEQHHIAYHESKEGFKIHSPGGHIYTKEVAYGVPVTMAERNFPANMIVLKGQDIDVILGMNWLTQHKAILNTELRTVRLSYNQEEILLTLPATNPAKASGRVYEAIVPEIKNIPVVREFPDVFPEDLPGLPPERDVEFVIELKPGTAPISRRSYRMPPNELAELKIQLQDLLNKGFIRPSSSPWGCPAIFVKKKDQTLRMCVDYRPLNEVTIKNKYPLPRIDILFDQLTGARVFSKIDLRSGYHQIRIRPEDIPKTAFTTRYGLFEYLVMSFGLTNAPAHFTYLMNSVFMPELDKFVVVFIDDILIYSKNEEDHAQHLRIVLTRLREHQLYAKFSKCAFWLEEIQFLGHVLSAKGIAVDPSKVKDILEWKPPTTVHQVRSFLGLAGYYRRFIPDFSKLVKPITSLLKNDIKFNWSSKCNEAFEQLKTLLTTAPVLAQPDITKSFDVYCDASGSGLGCVLMQEGRVIAYASRQLRRHEEHYPTHDLELAAVVHALKIWRHYLLGNICHIYTDHKSLKYIFTQSELNMRQRRWLELIKDYELEIHYHPGKANVVADALSRKTSCHCLMAKTSENTLCQEMEKLNLGIIQQGTLNQLKLESIILQRIIDAQKDNLGMKHIREKIKAGVAKCFKEDDQGVIWFKNRIVVPKNEELRQQILDEAHLSRYSIHPGSTKMYQDLKQHYWWTKMKIEIARYVAKCDTCRRVKAIHMKTAGPLQSLPIPTWKWEDISMDFIVGLPRTAKGYDSIWVIVDRLTKIAHFLPVKVTYTIATYAALYIARILSLHGVPKTIVSDRGPQFVAKFWEALHNSLGTKLLHSSAYHPQTSGQTERVNQILEDMLRACVLDFSPKWDECLPLAEFSYNNSYQESIKMAPFEALYGRRCRTPLNWSEPGERYFFRPDMVKEVEEKVQKIVHNMKKAQARQKSYADRRRQPLCFLVDDYVYLKVSPMKGISRFGVKGKLAPRYIGPFLVLEQCGPVAYRLQLPETLSAVHNVFHVSQLKKCLRVPDRTVEVTDVVLEPDLTYSEHHIRVLDQKDRVTRRKTLKFYKIQWNQHSEDEATWETQDFLDKNFPGFLASCKL

SEQ ID NO: 10349 - protein, 1869 aa, Zea mays
  Clone ID: TF_ZM4903.C4.o1.fg.pep
MSGDHAKKEMETGEKPTTSHGSTSSEESRTKRKEKKKSSSNKGKEKKSSSHHKEKKERSSSHKPHRRGDKHKRMRKVVYYETDTSSASTSNSDAPSVTSKRQERKKFSKIPLHYPRISKNAHLLSVPLGKPPTFDGEDYARWSDLMRFHLTSLHKSIWDVVEFGAQVPSVGDKDYDEDEVAQIEHFNSQATTILLASLSREEYNKVQGLKSAKEVWDVLKTAHEGDELTKITKRETIEGELGRFRLRKGEEPQHMYNRLKTLVNQVRNLGSVKWDDHEMVKIYTKMTPEEVIGNFVSFECMIEGSRKINELDDSTTSEAQPVAFKATEEKKEEATPSRQPIDASKLDNEEMALVIKSFRQILKQRRGKDYKPRSKKVCYKCGKPGHFIAKCPISSDSDRGDDKKGRRKEKKKYYKKKGGDAHVCREWDSDESSSDSSDDEDAANIAVTKGLLFPNVGHKCLMAKDGKRKKVKSNSSTKYESSSDDNDSDEEDNLRVLFANLNMEQKEKLNDLISAIHEKDDLLDSQEDCLIKENKKHVKVKKAYALEVEKCEKLSSELSTCREMIDNLRNENASLNAKIDSHVCIVSTFNPKNNNDDLLAKIEELNISLASLRVENDNLITKAKDYDVCKVTISDLRDKNDILHAKIVELNSCKPSTSIVEHVSICTRCRDVDVNAIHDHMALIKQQNDHIAKLDAKIAEHNLENEKFKFARSMLYNGRRPGIKDGIGFQKGDNDKLNAPPKNLSNFVKGKAPMPQDNEGYILYPAGYPESKIRKIHSRKSHSGPNHAFMYKGETSSSRQPTRAKLPRKKTPNASNDHDISFKTFDASYVLTNKSGKVYASGGSSWILDSGCTNHMTGEKKMFSSYEKNQDPQRAITFGDGNQGVTVFRRSDDSIAFKGVLEDQLYLVDFDRAELDTCLIAKTNMGWLWHRRLAHVGMKNLHKLLKGEHILGLTNVHFEKDRICSACQAGKQVGTQHPHKNIMTTDRPLELLHMDLFGPIVYISIGGSKYCLVIVDDYSRFTWVFFLQEKSQTQETLKGFLRRAQNEFGLRIKKIRSDNGTEFKNSQIEGFLEEEGIKHEFSSPYTPQQNGVVERKNRTLLDMARTMLDEYKTSDRFWAEAVNTACYAINRLYLHRILKKTSYELLTGKKPNISYFRVFGSKCFILVKRGRKSKFAPKTVEGFLLGYDSNTRAYRVFNKSTGLVEVSCDVVFDETNGSQVEQVDLDEIGEEQAPCIALRNMSIGDVCPKESEEPPHAQDQPSSSTLASPPTQNEDEAQVDEVEDQANEPPQDDDNNQGGDANDQDKEDEEQKPPHPRVHQAIQRDHPVDTILGDIHKGVTTRSRVAHFCEHYSFVSSIEPHRVEEALQDSDWVVAMQEELNNFTRNEVWHLVPRPNQNVVGTKWVFRNKQDEHGVVTRNKARLVAKGYSQVEGLDFGETYAPVARLESIRILLAYATYHGFKLYQMDVKSAFLNGPIKEEVYVEQPPGFENSEYPNHVYKLSKALYGLKQAPRAWYECLRDFLIANGFKVGKADPTLFTKTLKNDLFVCQIYVDDIIFGSTNESTCEEFSRIMTQKFEMSMMGELKYFLGFQVKQLQEGTFISQTKYTQDILNKFGMKDAKPIKTPMGTNGHLDLDTGGKSVDQKVYRSMIGSLLYLCASRPDIMLSVCMCARFQSDPKESHLTAVKRILRYLAYSPKFGLWYPRGSTFDLIGYSDADWAGCKINRKSTSGTCQFLGRSLVSWASKKQNSVALSTAEAEYIAAGHCCAQLLWMRQTLRDYGYKLTKVPLLCDIESAIKMADNPVEHSRTKHIAIRYHFLRDRQQKGDIEISYINTKDQLADIFTKPLDEQTFTKLRHELNILDSRNFFC

SEQ ID NO: 10350 - protein, 1921 aa, Zea mays
  Clone ID: TF_ZM4904.C2.o1.fg.pep
MSGDHAKKEMETGEKPTTSQGSTSSEESRTKRKEKKKISSNKGKEKKSSSHHKEKKEKSSSHKPHRSGDKHKRMRKVVYYETDTSSPSTSGSDAASVTSKRQERKKYSKIPLRYPRISKHTPLLSVPLGKPPTFDGEDYARWSDLMRFHLTSLHKGIWDVVEFGAQVPSVGDQDYDEDEVAQIEHFNSQATTILLASLSREEYNKVQGLKNAKEVWDVLKTAHEGDELTKITKRETIEGELGRFRLHKGEEPQHMYNRLKTLVNQVRNLGSKKWDDHEVVNVILRSLIFLNPTQVQLIRGNPRYTKMTPEEVIGHFVSFECMIEGSRKINELGDPSEAQPVAFKATEEKKEESTPSRQPIDASKLDNEEMALVIKSFRQILKQRRGKDYKSRSKKVCYKCGKPGHFIAKCPISSDSDRGDDKKGRRKEKKRYYKKKGGDAHVCREWDSDESSSDSSDDEDAANIAVTKGLLFPNVGHKCLMAKDGKKKVKSKSSTKYESSSDDNASDEEDNLRSLFANLNIAQKEKLNELVSAIHEKDDLLDSQEDCLIKENKKHVKVKKAYALEIEKCEKLSSELSTCREMIDNLRNENAILNAKVDSHVCNVSIPNLRDDNVDLLAKIDELNVSLASLRLENENLIAKAKDFDVCKVTISNLKDKNDILHAKIVELDSCKPSTSTIEHVTICARCRDIDVNAIHDHIILIKQQNDHIAKLDAKIAEHNLENEKFKFARSMLYNGRRPGIKDGIGFQRGDNVKISAPPKRLSNFVKGKAPMPQDNEGYILYPAGYPEDKIRKIHSRKSHSGPNHAFMYKGETSSSRQPTRAKLPRKKTPNASNDHAISFKTFDASYVLTNKSGKVVAKFVGGKHKGSKTCVWVPKVLVSNAKGPKTVWVYASGGSSWILDSGCTNHMTGEKRMFSSYEKNQDPQRAITFGDGNQGVTVFRRSDDSIAFKGVLEGQLYLVDFDRAELDTCLIAKTNMGWLWHRRLAHVGMKNLHKLLKGEHILGLTNVHFEKDRICSACQAGKQVGTHHPHKNIMTTDRPLELLHMDLFGPIAYISISGSKYCLVIVDDYSRFTWVFFLQEKSQTQETLKGFLRRAQNEFGLRIKKIRSDNGTEFKNSQIESFLEEEGIKHEFSSPYTPQQNGVVERKNRTLLDMARTMLDEYKTSDRFWAEAVNTACYAINRLYLHRILKKTSYELLTSKKPNISYFRVFGSKCFILVKRGRKSKFAPKTVEGFLLGYDSNTRAYRVFNKSTGLVEVSCDVVFDETNGSQVEQVDLDEIGEEQAPCIALRNMSIGDVCPKESEEPPKAQDQPSSSTQASPPTQNEDETQVDEVEDQANEPPQDIGNDQGGDANEEDKEEEEQRPPHPRVHQAIQRDHPVDTILGDIHKGVTTRSRVAHFCEHYSFVSSIEPHRVEEALQDSDWVVAMQEELNNFTRNEVWHLVPRPNQNVVGTKWVFRNKQDEHGVVTRNKARLVVKGYSQVEGLDFGETYAPVARLESIRILLAYATYHGFKLYQMDVKSAFLNGPIKEEVYVEQPPGFEDSKYPNHVYKLSKALYGLKQAPRAWYECLRDFLIANGFKVGKADPTLFTKTLENDLFVCQIYVDDIIFGSTNESTCEEFSRIMTQKFEMSMMGELKYFLGFQVKQLQEGTFISQTKYTQDILNKFGMKDAKPIKTPMGTNGHLDLDTGGKSVDQKVYRSMIGSLLYLCASRPDIMLSVCMCARFQADPKEAHLTVVKRILRYLAYTPKFGLWYPKGSTFNLIGYSDADWAGCKINRKSTSGTCQFLGRSLVSWASKKQNSVALSTAEAEYIVAGHCCAQLLWMRQTLRDYGYKLTKVPLLCDNESAIKMADNPVEHSRTKHIAIRYHFLRDHQQKGDIEISYINTKDQLADIFTKPLDEQSFNKLRHELNILDSRNFFC

SEQ ID NO: 10351 - protein, 1600 aa, Zea mays
  Clone ID: TF_ZM4920.C3.o16.fg.pep
METGDKSTTSHEKASSEESRNKGKGKEKKSSSHKSHRSGDKKKKMRKVVYYETDTSSPSTSGSDAPSITSKRHERKKFSKIPLRYPRISKHTPLLSVPLGKPPTFDGEDYARWSDLMRFHLTSLHKSIWDVVEFGVQVPSVGDKDYDEDEVAQIQHFNPQASTILLASLSREEYNKVQGLKGAKEIWDTLKTAHEGDEVTKITKRETIEGELGRFRLRQGEEPQDMYNRLKTLVNQVRNLGSKKWDDHEMVKVILRSLVFLNPTQVQLIRGNPRYTLMTPEEVIGNFVSFELMIKGSKKINELDGPSTSEAQPVAFKATEEKKEESTPCRTPIDASKLDNEEMALVIKSFRQILKQRRGKDYKPRSKKVCYKCGKPGHFIAKCPISSDSDRGDDKKGRIKEKKKYYKKKGGDAHVCREWDSDESSSDSSSDEDAANIAINKGLLFPNIGHKCLMTKDGKKKKVKSKSSTKYESSGDDNASDEEDNLRTLFANLNMQQKEKLNELISAIHEKDDLLDTQEDFLIKENKKHVKVKNAYALEVEKCEKLISELSTCHDIINNLKNENASLIAKVDSNACNISIPNLRNDNVDLLAKIEELNISLDSLRIENEKLIAKAKELDVCNASISDLRSKNDILHAKVVELKSSKPSTSTVEHTSICTRCRDVDIDAIHDHMVLIKQQNDHIAKLDAKIVEHELENEKFKFARSMLYSGRRPGIKDGIGFQQGGNVKLNAPPKRLSNFVKGKAPMPQDNEGYILYPAGYPESKIRRIHSRKSHFGPNHAFMYKGETSSSRQPTQAKLPKKKTPSASNDHDISFKTFDASYVLTNKSGKVYASGGSSWIIDSGCTNHMTGEKKMFPSYEKNQDPQRAITFEDGNQGVTVFRRSDDSVAFKGVLEGQLYLVDFDRAELDTCLIAKTNMGWLWHRRLAHVGMKNLHKLLKGEHILGLTNVHFEKDRICSACQAGKQVGVHHPHKNMMMTDRPLELLHMDLFGPIAYISIGGSKYCLVIVDDYSRFTWVFFLYDKSHTQETLKGFLRRAQNEFGLRIKKIRSDNGTEFKNSQIEGFLEEEGIKHEFSSPYTPQQNGVVERKNRTLLDMARTMLDEYKTSDRFWAEAVNTACYAINRLYLHRILKKTSYELLTGKKPNISYFRVFGSKCFILVKRGRKSKFAPKTVEGFLLGYDSNTRAYRVFNKSTGQVEVSCDVVFDETNGSQIEQVDLDDIGDEEAPCITLRNMSIGDVCPKQYEEPPNAQDQPSSSTQASPSTRNEDEAQVDEGEEQRDEPPKDDGNDQGGDANNQDKEDEEPRPPHPRVHEAIQRDHLVDTILGDIHKGVTTRSRVAHFCEHYSFVSSIEPHRVEEALQDSDWVVAMQEELNNFTRNEVWHLVPRPNQNVVGTKWVFRNKQDEHGVVTRNKARLVAKGYSQVEGFDFGETYAPVARLESIRILLAYATYHGFKLYQMDVKSAFLNGPIKEEVYVEQPPGFEDSEYPNHVYKLSKALYGLKQAPRAWYECLRDFLITNGFKVGKADPTLFTKTLENDLFVCQIYVDDIIFGSTNESTCEEFSRIMTQKFEMPMMGELKYFLGFQVKQLQEGTFISQTKYT

SEQ ID NO: 10352 - protein, 1687 aa, Zea mays
  Clone ID: TF_ZM4923.C3.o1.fg.pep
METGEKPTTSHGSTSSEESRTKRKEKKNISSNKGKEKKSSSHHKEKKEKSSSLKPHRSGNKQKRMRKVVYYETDTSSTSTSDSDVPSVTSKRQERKKFSKIPLHYPRISKHAPLLSVPLGKPPTFDGEDYARWSDLMRFHLTSLHKSIWDVVEFGAQVPSVGDKDYDEDEVAQIEHFNSQATTILLASLSREEYNKVQGLKSAKEVWDVLKTAHEGDELTKITKRETIEGELGRFRLRKGEEPQHMYNRLKTLVNQVRNLGSVKWDDHEMVKVILRSLIFLNPTQVQLIRGNPRYTKMTPEEVIGHFSFRQILKQRRGKDYKSRSKKVCYKCGKPGHFIAKCPISSDSDRGDDKKGRRKEKKRYYKKKGGDAHICREWDSDESSSDSSDDEDAANIAVTKGLLFPNVGHKCLMAKDGKRKKVKSRSSTKYETSSDENASDEEDNLRTLFANLNMEQKEKLNELISAIHEKDDLLDSQEDCLIKENKKHVKVKNAYALEIEKCEKLSSELSTCREMIDNLRNENASLNAKVDSHVCNVSIPNPRDNNDDLFARIEELNISLASLRVENENLIAKAKELDVCKVTISDLRDKNDILHAKIVELNSCKPSTSTIEHVTICTRCRDIDVNAIHDHMALIKQQNDHIAKLDAKIAEHNLENEKFKFARSMLYNGRRPGIKDGIGFQRGDNVKLSASPKRLSNFVKGKTPMPQDNEGYILYPAGYPESKIKKIHSRKSHSGSNHAFMYKSETSSSRQPTRATLPKKKIASASNEHDISFKTFDASYVLTNKSGKVVAKYVGGKHKGSKTCVWVPKVLVSNAKGPKTIWDYASGGSSWILDSGCTNHMTGEKRMFSSYEKNQDPQRAITFGDGNQDYNLLSVSQLCQMGYNCLFTDIGVTVFRRSDDSIAFKGVLEGQLYLVDFDRAELDTCLIAKTNMGWLWHRRLAHVGMKNLHKLLKGEHILGLTNVHFEKDRICSACQAGKQVGTHHPHKNIMTTDRPLELLHMDLFGPIAYISIGGSKYCLVIVDDYSRFTWVFFLQEKSQTQETLKGFLRRAQNEFGLRIKKIRSDNGTEFKNSQIEGFLEEEGIKHEFSSPYTPQQNGVVERKNRTLLDMARTMLDEYKTSDRFWAEAVNTACYAINRLYLHRILKKTSYELLTDCRRFLLGYDSNTRAYRVFNKSTGLVEVSCDVVFDETNGSQVEQVDLDEIDEEEAPCIALRNMSIGDVCPKESEEPSNTQDQPSSSMQASPPTQNEDEAQIDEGQVQEDEPPQDDGNDQGGDANDQEKEDEQEPMPPHPRVHQAIQRDHPVDTILGDIHKGVTTRSRVAHFCEHYSFVSSIEPHRVEEALQDSDWVVAMQEELNNFTRNEVWHLVPRPNQNVVGTKWVFRNKQDEHGVVTRNKARLVAKGYSQVEGLDFGETYAPVARLESIRILLAYATYHGFKLYQMDVKSAFLNGPIKEEVYVEQPPGFEDCEYPNHVYKLSKALYGLKQAPRAWYECLRDFLIANGFKVGKADPTLFTKTLENDLFVCQIYVDDIIFGSTNESTCEEFSRIMTQKFEMSMMGELKYFLGFQFKQLQEGTFISQTKYTQDILTKFGMKDAKPIKTPMGTNGHLDLDTGGKSVDQKEEHIGDLPVLGKILGVLGFKEAKFGRSFHRRSRVYCRRPLLRAIALDEANPAGLRLQINQSPFAM

SEQ ID NO: 10353 - protein, 1895 aa, Zea mays
  Clone ID: TF_ZM4930.C2.o1.fg.pep
MSGDHAKKEMETGEKPTTSHGSTSSEESRTKRREKKKSSSNKGKEKKSSSHHKEKKERSSSHKPHRSGDKQKRMRKVVYYETDTSSTSTSDSDAPSITSKRQERKKFSKIPLHYPRISKHAPLLSVPLGKPPTFDGEDYAMWSDLMRFHLTSFHKSIWDVVEFGAQVPSVGDKDYDEDEVAQIEHFNSQATTILLASLSREEYNKVQGLKSAKEVWDVLKTAHEGDELTKITKRETIEGELGRFRLRKGEEPQHMYNRLKTLVNQVRNLGSVKWDDHEMVKVILRSLIFLNPTQVQLIRGNPRYTKMTPEEVIGHFVSFECMIEGSRKINELDDPSTSEAQPVAFKATEDKKEESTPSRQPIDASKLDNEEMALVIKSFRQILKQRRGKDYKSRSKKVCYKCGKPGHFIAKCPISSDSDRGDDKKGRRKEKKRYYKKKGGDAHVCREWDSDESSSDSSDDEDAANIAVTKGLLFPNVGHKCLMAKDGKRKKVKSRSSTKYETSSDENASDEEDNLRTLFANLNIAQKEKLNELVSAIHEKDDLLDSQEDLLIKENKKHVKVKNAYALEIEKCEKLSSELSTCREMIDNLRNENASLNTKVNSHVCNVSTSNPKDNNDDLLARIEELNISLASLRIENENLIAKAKDFDVCKVAISDLRDKNDILHAKIVELNSCKPSTSIVEHVSICTRCRDVDINAIHDHMALIKQQNDHIAKLDAKIAEHNLENEKFKFARSMLYNGRRPGIKDGIGFQKGDNVKNNAPPKRLSNFVKGKAPMPQDNEGYILYPAGYPESKIRRIHSRKSHSGPNHAFMYKGETSSSRQPTYAKLPRKKIPNASNDHNISFKTFDASYVLTNKSGKVYASGGSSWILDSGCTNHMTGEKKMFSSYEKNQDPQRAITFGDGNQGLVKGVTVFRRSDDSIAFKGVLEGQLYLVVFDRAELDTCLIAKTNMGWLWHRRLAHVGMKNLHKLLKGEHILGLTNVHFEKDRICSACQAGKQVGSHHPHKNIMTTDRPLELLHMDLFGPIACISIGGSKYYLVIVDDYSRFTWVFFLQEKSQTQETLKGFLRRAQNEFGLRIKKIRSDNGTEFKNSQIEGFLEEEGIKHEFSSPYTPQQNGVVERKNRTLLDMARTMLDEYKTPDRFWAEAVNTACYAINRLYLHRILKKTSYELLTGKKPNISYFRVFGSKCFILVKRGRKSKFAPKTVEGFLLGYDSNTRAYRVFNKSSGLVEVSCDVVFDETNGSQVEQVDLDEIGEKQAPCIALRNMSIGDVCPKESEEPPHTQDQPSSSTLASPPTQNENEAQVDEEEDQSNEPPQDDGNDQGGDANNQEKEDKQEPRPPHPRVHQAIQRDHPVDTILGDIHKGVTTRSRVAHFCEHYSFVSSIEPHRIEEALQDSDWVVAMQEELNNFTRNEVWHLVPRPNQNVVGTKWVFRNKQDEHGVVTRNKARLVAKGYSQVEGLDFGETYAPVARLESIRILLAYATYHGFKLYQMDVKSAFLNGPIKEEVYVEQPPGFEDSEYPNHVYKLSKALYGLKQAPRAWYECLRDFLIDNGFKVGKADPTLFTKTLENDLFVCQIYVDDIIFGSTNESTCEEFSRIMTQKFEMSMMGELKYFLGFQVKQLQEGTFISQTKYTQDILNKFGMKDAKPIKTPMGTNGHLDLDTGGKSVDQKVYRSMIGSLLYLCASRPDIMLSVCMCARFQADPKEAHLTAVKRILRYLAYTPKFGLWYPRGSTFDLIGYSDADWAGCKINRKSTSGTCQFLGRSLVSWASKKQNSVALSTAEAEYIAAGHCCAQLLWMRQTLRDYGYKLTKVPLLCDNESAIKMADNPVEHSRTKHIAIRYHFLRDHQQKGDIEISYINTKDQLADIFTKPLDEQSFNKLRHELNILDSRNFFC

SEQ ID NO: 10354 - protein, 250 aa, Zea mays
  Clone ID: TF_ZM4932.C2.o20.fg.pep
MSGAHAKKEMVTGEKPATSHGKAPSGESGNKKREESPPRVKLHRSGDKKKMKKVVYYETNSSSPSTSNFDTPSVTSKRHERKKFSSKQIIERDATSTPEVQPVTFKAMEEKKEESSSSRLPIDTSKIDNEEMALIIKSFRQILKQRKGRDYKPRSKKVCYKCGKPGHFIAKCPISSDSDRGDDKRGKKEKKRYYKKKDGDAHICREWDSNESSTDSSSDEDAANIAVNKGLLFRNVGHKCLMAKEGKKKP

SEQ ID NO: 10355 - protein, 933 aa, Zea mays
  Clone ID: TF_ZM4948.C2.o1.fg.pep
MKKVVYYETDSSSPSTSGSDAPSVTSKRRERKKFSKIPLRYPRISKRTPLLSVPLGKPPVFDGEDYCMWSDKMRHHLTSLHASIWDIIEFGTQEYNKVQGLKSAKEIWNVLKTAHEGDQVTKITKRETIEGKLGRFILNQGEEPEAMYKRLKTLVNQVRNLRSTKWDDHEMVKVILRSLVFCNPTQVQLIRGDPRYKLMSPEEVIGKFVSFELMIKGSKQIIEQGGTSTPEVQPVAFKATEEKKEESTSSRLPIDASKLNNEEMALIIKSFRQILKQRTGKDYKPRSKKVCYKCGKPGHFIAKCPISSDSDRDNNKRGKKKEKKRYYKKKGGDAHVCREWDSDESSTDSSSDEDATKITVNKGLLFPNVGHRCLMTKDNKKKKVKSRASSKYTTSSDEGNSSEDEDDLLNVFANLNMQQKEKLNELIGAIHEKDELLDSQEEFLIKENKKHVKVKNAYAQEVEKNENLTKELSICHDKISNLRNENGNLFAKVEKSNVCHDSIVNLKNDNASLIAKIGKLNESISSLKIENASLISKAKDLNVCNASISNLRNENAILHAKIDELNVSKPSTSIVDHVSICMRCRDINVDAIHDHLALIKQQNDHIAQLTSKINEHEIENEKNKFARSMLYNRRRPGIKDGIGFQQGDNVKLNAPKRLSNFVKGKAPMAQDNEGYILYPVGYPEHKIRRIHAKKSHSISHHAFMYKNEASRTFDASYVLTNKSGKVVAKYVGGKHKGSKSCVWVPKVYESGGSSWIIDSGCTNHMTGEKRMFSSYEKTMIPKELSHSGMEIKEKSQIQETLKGFLRRTQNEFGLRIKKIRNDNGTEFKNSQIEGFLEDEGIKHEFSSPYTPQQNGVVERKNRTLLDMARTMLDDYKTPDRFWAEAINAACYSINRLYLHRILKKTSYELLTGKKSNVSYFRVFGSESRLEGGE

SEQ ID NO: 10356 - protein, 2768 aa, Zea mays
  Clone ID: TF_ZM4949.C2.o4.fg.pep
MSGDHAKKEMETGEKPTTSHGSTSSEESRTKRKEKKKSSSNKGKEKKSSSHHKEKKERSSSHKPHRRGDKHKRMRKVVYYETDTSSTSTSGSDAPSVTSKRQERKKFSKIPLHYPRISKNAPLLSVPLGKPPTFDGEDYARWSDLMRFHLTSLHKSIWDVVEFGAQVPSVGDKDYDEDEVAQIEHFNSQATTILLASLSREEYNKVQGLKSAKEVWDVLKTAHEGDELTKITKRETIEGELGRFRLRKGEEPQHMYNRLKTLVNQVRNLGSTKWDDHEMVKVILRSLIFLNPTQVQLIRGNPRYTKMTPEEVIGNFVSFECMIEGSRKINELDDPSTSEAQPVAFKATEEKKEEATPSRQPIDASKLDNEEMALVIKSFRQILKQRRGKDYKSRSKKVCYKCGKPGHFIAKCPISSDSDRGDDKKGRRKEKKKYYKKKGGDAHVCREWDSDESSSDSSDDEDAANIAVTKGLLFPNVGHKCLMAKDGKRKKVKSNSSTKYESSSDDNDSDEEDNLRVLFANLNMEQKEKLNELISAIHEKDDLLDSQEDCLIKENKKHVKVKKAYALEVEKCEKLSSELSTCREMIDNLRNENASLNAKVDSHVCIVSTSNPKDNNDDLLARIEELNISLASLRVENKILIAKAKDYDVCKVTISDLRDKNDILHAKIVELNSCKPSTSIVEHVSICTRCRDVDVNAIHDHMALIKQQNDHIAKLDAKIAEHNLENEKFKFARSMLYNGRRPGIKDGIGFQRGDNVKINAPPKNLSNFVKGKAPMPQDNEGYILYPAGYPESKIRKIHSRKSHSGPNHAFMYKGETSSSRQPTRAKLPRKKTPNASNDHAISFKTFDASYMLTNKSGKVYASGGSSWILDSGCTNHMTGEKKMFSSYEKNQDPQRAITFGDGNQGVTVFRRSDDSIAFKGVLEGQLYLVDFDRAELDTCLTAKTNMGWLWHRRLAHVGMKNLHKLLKGEHILGLTNVHFEKDRICSACQAGKQVGAHHPHKNIMTTDRPLELLHMDLFGPIAYISIGGSKYCLVIVDDYSRFTWVFFLQDKSHTQETLKGFLRRAQNEFGLRIKKIRSDNGTEFKNSQIEVERKNRTLLDMARTMLDEYKTPDRFWAEAVNTACYAINRLYLHRILKKTSYELLTGKKPNISYFRVFGSKCFILVKRGRKSKFAPKTVEGLLLGYDSNTRAYRVFNKSTGLVEVSCDVVFDETNGSQVEQVDLDEIGEEQAPCIALRNMSIGDVCPKEFEEPPNTQDQPSSSTQASPPTHDEDEAQVDEGEDQKDEPPQDDGNDQGGDANDEDKEDEQPRPPHPRVHQAIQRDHPVDTILGDIHKGVTTRSRVAHFCEHYSFVSSIEPHRVEEALQDSDWVVAMQEELNNFTRNEVWHLVPRPNQNVVGTKWVFRNKQDEHGVVTRNKARLVAKGYSQVEGLDFGETYAPVARLESIRILLAYATYHGFKLYQMDVKSAFLNGPIKEEVYVEQPPGFEDSKYPNHVYKLSKALYGLKQAPRAWYECLRDFLIANGFKVGKADPTLFTKTLDNDLFEFSRIMTQKFEMSMMGELKYFLGFQVKQLQEGTFICQTKYTQDILTKFGMKDAKPIKTPMGTNGHLDLNTGGKSVDQKATFNSDRGDDKKGKRREKKKYYKKKGGDAHVCREWDSDESSTESSSDEDAANIAVTKGLLFPNVGHKCLMAKDGKRKKVKSKSSTKYESSSDDNASDEENNLRTLFANLNMEQKEKLNELISAIHEKDDLLDSQEDFLIKENKKHVEKCEKLSSELSTCHDTITNLRNENASLNAKVDSHVCNVSIPNLRNDNDDLLAKIEELNISLASLRVENENLIAKAKELDVCNVTISDLRDNNDILRAKIVELNSCKPSTSSVEHVSFCTRCRDVDINAIHDHMTLIKQQNDHIAILDAKIAEHNLENEKFKFARSMLYNGRHPGIKDGIGYQRGDNVKLSAPPKRLSNFVKGKAPMPQDNEGYILYPAGYPESKIRKIHSRKSHSGPNHAFMYKGETSSSRQPTRAKLPKKKTPSASNEHDISFKTFDASYVLTNKSGKVYASGGSSWILDSGCTNHMTGEKKMFSSYEKNQDSQRAITFGDGNQGVTVFRRSDDSIAFKGVLEGQLYLEKSQTQETLKGFLRRAQNEFGLRIKKIRSDNGTEFKNSQIEGFLEEEGIKHEFSSPYTPQQNGVVERKNRTLLDMARTMLDEYKTPDRFWAEARGRKSKFAPKTVEGFLLGYDSNTRAYRVFNKSSGLVEVSCNVVFDETNGSQVEQVDLDEIGEEQAPCIALRNMSIGDVCPKEFEEPPNTQDQPSSSTQASPPTQNEDEAQVDEGEDQRDEPPQDNGNDQGGDASDQDKEDEQPRPPHPRVHQAIQRDHPVDTILGDIHKGVTTRSRVAHFCEHYSFVSSIEPHRIEEALQDSDWVMAMQEELNNFLRNEVWHLVPRPNQNVVGTKWVFRNKQDEHGVVTRNKARLVAKGYSQVEGLDFGETYAPVARLESIRILLAYATYHGSKLYQMDVKSAFLNGPIKEEVYVEQPPGFEDSEYPNHVYRLSKALYGLKQAPRAWYECLRDFLIANGFKVGKADPTLFTKTLDNDLFVCQIYVDDIIFGSTNESTCEEFSRIMTQKFEMSMMGELKYFLGFQVKQLQEGTFICQTKYTQDILTKFGMKDAKPIKTPMGTNGHLDLNKGGQVRTVRALAADRPHHQDDPRTGPMQKSKSALWTVRRKRADRLGPRADRPASGADRPARTVRTRQADRPRSAEWSNG

SEQ ID NO: 10357 - protein, 1188 aa, Zea mays
  Clone ID: TF_ZM4960.C1.o10.fg.pep
MSGNHAKKEMETGDKPATSHGKVSSEESRNKKKGKEKKASSHKSHRSGDKKKKMRKVVYYETDTSSPSTSGSDAPSITSKRHERKKFSKIPLHYPRTSRHTTLLSVPLGKPPTFDGEDYARWSDLMKFHLTSLHKSIWNVVEFGAHVPSVGDEDYDEDEVAQIEHFNSQATTILIASLSREEYNKVQGLKSAKEVWDVLKTAHEGDELTKITKRETIEGELGRFRLCQGEEPQDMYNRLKTLVNQVRNLGSKKWDDHEVVKVILRSLIFLNPTQVQLLHGNPRYTLMTPEEVIGNFVSFEFMIKGSRKINELDSPSTSDAQPVAFKATEEKKEESTPSRTPIDTSKLDNEEMTLVIKSFRQILKQRRGKYYKPRSKKVCYKCGKPGHFIAKCPISSDSDRGDDKKGRRKEKKRYYKKKGGDAHVCREWDSDESSSDSSDDEDTANIAVTKGLLFPNVGHKCLMAKDGKKKKVKSKSSTRYESSSDDNASDEEDNLRTLFANLNMQQKEKLNELISAIHEKDDLLDSQEDFLIKENKKHVKVKNAYSLEVEKCEKLSSELSTCHETIDNLRNENANLLAKVDSIACNISISNPRNDNDDLLARIEELNISLASLRDENEKLLAKAKELDVCNVTISDLRTKNDILHAKVVELKSCKPSTSTVEHTTICTRCRDVDINAIHDHMALIKQQNDHIAKLDAKIAEHEIENEKFKFARSMLYNGRGHGIKDGIGFQQGGNVYASGGSSWIIDSGCTNYMTGEKKMFSSYEKNQDPQRAITFGDGNQGIIVFRRSDDSIAFKGVLEGQLYLVDFDRAELDTCLIAKTNMGWLWHRRLAHVGMKNLHKLLKGEHILGLTNVHFEKDRICSACQAGKQVGAHHPHKNIMTTDRPLELLHMDLFGPIAYKSIDGSKYCLVIVDDYSRFTWVFFLQEKSHTQETLKGFLRRAQNEFGLRIKKIRSDNGTKFKNSQIEGFLEEEGIKHEFSSPYTPQQNGVVERKNRTLLDMARTMFDEYKTSDRFWAEAVNTACYAINRLYLHRILKKTSYELLTGKNPNISYFRVFGSKCFILIKRGRNYKFAPKTVEGFLLGYDSNTRAYRVFNKSSRQVEVSCDVVFDETNGSQVEQVDLDEIGDEEAPCIALRNMSIGDVCPKESKEPPNAQDQPSSSTQASPPTQNEDEAQVDEGEDQANEPS

SEQ ID NO: 10358 - protein, 1468 aa, Zea mays
  unsure (1)..(1468): unsure at all Xaa locations
  Clone ID: TF_ZM4981.C2.o9.fg.pep
MSGDHAKKEMETGEKPTTSHRKASSEESRKKGKGKEKKASSHKSHRSGDKIKKMRKVVYYETDTSSPSTFGSDAPSVTSKRHERKKFSKIPLRYPRISKHTPLLFVPLGKPPTFDGEDYARWSDLMRFHLTSLHKSIWDVVEFGVQVPSVGDEDFDVDEVAQIEHFNSQATTILLASLSREEYNKVQGLKSAKEVWDVLKTAHEGDELTKITKRETIEGELGRFRLRQGEEPQDMYNRLKTLVNQVRNLGSKKWDDHEVVKVILRSLIFLNPTQVQLIRGNPRYTLMTPEEVIGNFVSFEFMIKGSRKINELDDPSTSEAQPVAFKATEEKKESTPSRTPIDASKLDNEEMALVVKSFRQILKQRRGKDYKPRSKKVCYKCGKPGHFIAKCPISSDSDRGDDKKGRRKEKKRYYKKKGGDAHVCREWDSDESSSDSSDDEDAANIAVTKGFLFANVGHKCLMAKDGKKKKVKSKSSTRYESSSDDNASDEEDNLRTLFANLNMQQKEKLNELISAIHEKDDLLDSQEDFLIKENKQHVKGKALMPQDNEGYILYPAGYPESKIRRIHSRKSHSGPNHAFMYKGKTSSSRQPTRAKLPKKKTPNASNDHDISFKTFDASYVLTNKSGKVYASGGSSWIIDSGCTNHMTGEKKMFSSYEKNQNPQRAITFGDGNQGVTVFRRSDDSIAFKGVLEGQLYLVDFDRAKLDTCLIANTNMGWLWHRRLAHVGMKNLHKLLKGEHILGLTNVHFEKDRICSACQAGKQVGAHHPHKNIMTTDRPLELLHMDLFGPIAYISIGGKTLKGFLRRAQNEFDLRIKKIRSDNGTEFKNSQIEGFLEEESIKHEFSSPYTPQQNGVVERKNRTLLDMARTMLDEYKTSDRFWAEAVNTACYAINRLYLHRILKKTSYELLTGKKPNISYFRVFGSKCFILVKRGRKSKFAPKTVEGFLLGYDSNTRAYRVFNKSSGQVEVSCDVVFDETNGSQVEQVDLDEIGDEEAPCIALRNMSIGDVCPKESEEPPNAQDQPSSSTQASPPTQNEDEAQMDEGEDQANEPPQDDGNDQGGDANEQDKEDEEQRPPHPRVHQAIQQDHPVDTILGDIHKGXVEEALQDSDWVMAMQEELNNFTRKXGTKWVFRNKQDEHGVVTRNKARLVAKGYSQVEGLDFGETYAPVARLESIRILLAYATYHGFKLYQMDMKSAFLNGPIKEEVYVEQPPGFEDSEYPNHVYKLSKALYGLKQAPRAWYECLRDFLITNGFKVGKADPTLFTKTLENDLFVCQIYVDDIIFGSTNESTCEEFSRIMTQKFEMSMMGELKYFLGFQVKQLQEGTFLSQTKYTQDILSKFGMKDAKPIKTPMGTNGHLDLDEGGKSVDQKGRCQRFIYNYTKSTVRNTVDYSGQEKLFEKTGQARTVRALAVDRPQHQDDPRTEPMQKSKSVLRTVRRKSKDRLRPRADRPVGKEPKNPKVTGSEK

SEQ ID NO: 10359 - protein, 1614 aa, Zea mays
  Clone ID: TF_ZM4990.C2.o4.fg.pep
MSGDHAKKEMETGEKPTTSHGSTSSEESRTKRKEKKKISSNKGKEKKSSSHHKEKKEKSSSHKPRRSGDKQKRMRKVVYYETDTSSTSTSDSDAPSVTSKRQERKKFSKIPLHYPRISKHAPLLSVPLGKPPTFDGEDYARWSDLMRFHLTSLHKSIWDVVEFGAQVPSVGDKDYDEDEVAQIEHFNSQATTILLASLSREEYNKVQGLKSAKEVWDVLKTAHEGDELTKITKRETIEGELGRFRLRKGEEPQHMYNRLKTLVNQVRNLGSVKWDDHEMVKVILRSLIFLNPTQVQLIRGNTRYTKMTPEEVIGNFVSFECMIEGSRKINELDDPSTSEAQPVAFKATEEKKEEATPTRQPIDASKLDNEEMALVIKSFRQILKQRRGKDYKSHSKKVCYKCGKPGHFIAKCPISSDSDRGDDKKGRRKEKKRYYKKKGGDAHVCREWDSDESSSDSSDDEDAANIAVTKGLLFPNVGHRCLMAKDGKRKKVKSNSSTKYESSSDDNASDEEDNLRSLFANLNIAQKEKLNELVSAIHEKDDLLDSQEDLLIKENKKHVKVKKAYALEIEKCEKLSSELSTCREMIDNLRNENASLNTKVDSHVCNVSTSNPRDNNVDLLARIDELNASLASLRIENEKLLAKAKDFDVCNATISDLRTKNDMLHAKVVELKSCKPSTSIVEHVSICTRCRDINIDAIHDHMALIKQQNDHIAKLDAKIAKHNLENEKFKFARSMLYNGRRPGIKDGIGFQRGDNVKISAPPKRLSNFVKGKAPMPQDNEGYILYPAGYPESKIRRIHSRKSHSGPNHAFMGSSWILDSGCTNHMTGEKKMFSSYEKNQDPQRAITFGDGNQGVTVFRRSDDSIAFKGVLEGQLYLVDFERAELDTCLIAKTNMGWLWHRRLAHVGMKNLHKLLKGEHILGLTNVHFEKDRICSACQAGKQVGSHHPHKNIMTTDRPLELLHMDLFGPIAYISIGGSKYCLVIVDDYSRFTWVFFLQEKSQTQETLKGFLRRAQNEFSLRIKKIRSDNGTEFKNSQIEGFLEEEGIKHEFSSPYTPQQNGVVERKNRTLLDMARTMLDEYKTSDRFWAEAVNTACYAINRLYLHRILKKTSYELLTGKKPNISYFRVFGSKCFILVKRGRKSKFAPKTVEGFLLGYDSNTRAYRVFNKSSGQVEVSCDVVFDETNGSQVEQVDLDEIGIEEAPCIALRNMSIGDVCPKESEEPPNAQDQPSSSTQASPPTQNEDEAQVDEEEDQSNEPPQDDGIDQGGDANNQDKEDEEQRPPHPRVHQAIQRDHPVDTILGDIHKGVTTRSRVAHFCEHYSFVSSIEPHRIEEALLDSDWVVAMQEELNNFTRNEVWHLVPRPNQNVVGTKWVFRNKQDEHGVVTRNKARLVAKGYSQVEGLDFGETYAPVARLESIRILLAYATYHGFKLYQMDVKSAFLNGPIKEEVYVEQPPGFEDSEYPNHVYKLSKALYGLKQAPRAWYECLRDFLIANGFKVGKADPTLFTKTLENDLFVCQIYVDDIIFGSTNESTCEEFSRIMTQKFKMSMMGELKYFLGFQVKQLQEGTFISQTKYTQDILNKFGMKDAKPIKTPMGTNGHLDLDTGGHTVNDL

SEQ ID NO: 10360 - protein, 1681 aa, Zea mays
  Clone ID: TF_ZM4995.C3.o9.fg.pep
MSRELAKKEMKTDDKPATSHGKASSEESRNKKKGKEKKASSHKSHRSGDKKKKMRKVVYYETDTSSPSTSGSDAPSITSKRHERKKFSKIPLHYPRTSRHTQLLSVPLGKLPTFDGEDYARWSDLMKFHLTSLHKSIWNVVEFGAQVPSVGDEDYDEDEVAQIEHFNSQATTILLASLSREEYNKVQGLKSAKEVWDVLKTAHEGDELTKITKREMIEGELGRFRLLQGEEPQDMYNRLKTLVNQVRNLGSKKWDDHEMVKVILRSLIFLNPTQVQLIRGNPRYTLMTPEEVIVNFVSFEFMIKGSRKINELDGPSTSEAQPVAFKATEEKKEESTPSRQPIDASKLDNEEMALVIKSSRQILKQRRGKDYKPRSKKVCYKCGKPGHFIAKCPISSDRGDDKKGRRKEKRYYKKKGGGAHVCREWDSDESSSDSSDDEDAANIAVTKGLLFPNVGHKCLMAKDDKKKKVKSKSSTRYESSSDDYASDEEDNLRTLFANLNMQQKEKLNELISAIHEKDDLLDTQEDFLIKENKKHVKVKNAYALEVEKCEKLSSELSTCHETIDNLRNENANLLAKVESNVCNVSIPNDNIELLSKIEELNISLASLRIENKKLIARAKDFDVCNVTISDLRDKNDILCAKIVELNSCKPSTSTVEHTSICTRCRDVDIDAIHDHMVLIKQQNDHIAKLDAKIAEHEIENEKFKFARSMLYSGRRPGIKNGIGFQQGGNVKLNAPPKKLSNFVKGKAPMPQDNEGYILYPAGYPESKIRRIHSRKSHSGPNHAFMYKGETSSSRQPTRAKLPKRKTPSASNDHDISFKTFDASYVLTNKSGKVYASGGSSWVIDSGCTNHMTGEKKMFSSYEKNQDSQRAITFGDGNQGVTVFRRSDDSIAFKGVLEGQLYLVNFDRVELDTCLIAKTNMSWLWHRRLAHVGMKNLHKLLKGEHILGLTNVHFEKDRICSACQAGKQVGAHHPHKNIMTTDRPLELLHMDLFSPIAYISISGSKCYLVIVDDYSRFTWVFFLQEKSHTQETLKGFLRRAQNEFGLRIKKIRSDNGTEFKNSQIEGFLEEEGIKHEFSSPYTPQQNGAVERKNRTLLDMARTMLDEYKTSDRFWAEAVNTACYAINRLYLHRILKKTSYELFTGKKPNISYFRVFGSKCFILLKRGRKSKFAPKTVEGFLLGYDSNTRAYRVFNKSSGQVEVSCDVVFDETNGSQVEQVDLDEKGTCPLGMVCPKESEEPPNAQDQPSSSTQASPPTQNEDEAQVDEGEDQANEPPQDDDNDQGGDANYLDKEDEEARPPHPRVHQAIQRDHPVDTILGDIHKGVTTRSRVAHFCEHYSFVSSIEPHRIEEALQDLDWVVAMQEELNNFTRNEVWHLVPRPNQNVVGTKWVFRNKQDEHGVVTRNKARLVAKGYSQVEGLDFGETYAPVARLESIRILLAYATYHGFKLYQMDVKSAFLNGPIKEEVYVEQPPGFEDSEYPNHVYKLSKALYGLKQAPRAWYECLRDFLITNGFKVGKADPTLFTKTLENDLFVCQIYVDDIIFGSTNESTCEEFSRIMTQKFEMSMMGELKYFLGFQVKQLQEGTFLSQTKYTQDILSKFGIKDAKPIKTPMGTNGHLDLDEGGKPVDQKKEHIGDLPVLRKILGVLGFKEAKFRSSFNRRSRVYCRRILLRAIALDEANP

SEQ ID NO: 10361 - protein, 587 aa, Zea mays
  Clone ID: TF_ZM5003.C1.o1.fg.pep
METGDKPTTSHGKASSEESRKKGKGKEKKASSHKSHQSGDKKKKMRKVVYYETDTSSPSTSGSDAPSVTSKRHERKKFRDEDYDEDEVAQIEHFNSQATTILLASLSREEYNKVQGLKSAKEVWDVLKTAHEGDELTKITKRETIEGELGRFRLRKGEETQDMYNRLKTLVNQVRNLGSKKWDDHEMVKVILRSLIFLNPTQVQLIRGNPRYTLMTPEEVIGNFVSFEYMIKGSKKINELDDPSTSEAQPVAFKATEEKKEESTSSRQPIDASKLDNEEMALVIKSFRQILKQRSGKDYKPRSKKVCYKCGKPGHFIAKCPISSVSDRGDDKKGRRKERKKYYKNKGGDTHVCREWDSDESSSDSSSKEDVANIAVTKGLLFPNVGHKCLMAKDGKKKKVYASGGSSWIIDSGCTNHMTGEKKMFSSYEKNQDPQRAITFGDGNQGVTVFRRSDDSVAFKGVLEGQLYLVDFDRAELDTCLIAKTNMGWLWHRRLAHVGMKNFHKLLKGEHILGLTNVHFEKDGICSACQAGKQVGAHHPHKNIMTTDRPLELLHMDLFGPIAYISIDERKISYPRDIKGILETGSK

SEQ ID NO: 10362 - protein, 1615 aa, Zea mays
  Clone ID: TF_ZM5004.C2.o7.fg.pep
MSGDHAKKEMETDEKPTTSNGSTSSEESRTKRREKKKSSSNKEKEKKSSSHHKEKKEKSSSHKPHRSGDKQKRMRKVVYYETDTSSTSTSGSDAPSVTSKRQERKKFSKIPLHYPRISKHAPLLSVPLGKPPTFDGEDYARWSDLMRFHLSSLHKSIWDVVEFGAQVPSVGDKDYDEDEVAQIEHFNSQATTILLASLSREEYNKVQGLKSAKEVWDVLKTAHEGDELTKITKRETIEGELGRFRLRKGEEPQHMYNRLKTLVNQVRNLGSIKWDDHEVVKVILRSLIFLNPTQVQLIRGSRKINELDDPTTSKAQPVAFKATEEKKEESTPSRQPIDASKLDNEEMALVIKSFRQILKQRRGKDYKSRSKKVCYKCGKPGHFIAKCPISSDSDRGDDKKGRRKEKKRYYKKKGGDAHVCREWDSDESSSDSSDDEDAANIAVTKGLLFPNVGHKCLMAKDGKRKKVKSNSSTKYESSSDDNASDEEDNLRSLFANLNIAQKEKLNELVSAIREKDDILDSQEDLLIKENKKHVKVKKAYALEIEKCEKLSSELSTCCEMIDNLKHENARLNAKNISLASLRVENENLIAKAKDFDVCKVTISDLRDKNDILHAKIVELNSCKPSTSTVEHTSICTRCRDVNIDAIHDHITLIKQQNDHIAKLDAKIAEHNLENEKFKFARSMLYSGRRPGIKDGIGFQRGDNVKLSAPPKRLSNFVKGKAPMPQDNEGYILYPAGYPESKIRRIHSRKSHSGPNHAFMYKGETSSSRQPTRAKLTKKTPSASNEHSLSFKTFDASYVLTNKSGKVYASGGSSWILDSGCTNHMTGEKKMFSSYEKNQDPQRAITFGDGNQGLVKGVTVFRRSDDSIAFKGVLEGQLYLVDFDRAELDTCLIAKTNMGWLWHRRLAHVGMKNLHKLLKGEHILGLTNVHFEKDREKSQTQETLKGFLRRAQNEFGLRIKKIRSDNGTEFKNSQIESFLEEEGIKHEFSSPYTPQQNGVVERKNRTLLDMARTMLDEYKTSDRFWAEAVNTACYAINRLYLHRILKKTSYELLTGKKPNISYFRVFGSKCFILVKRGRKSKFAPKTVEGFLLGYDSNTRAYRVFNKSTGLVEVSCDVVFDETNGSQVEQVDLDEIGIEEAPCIAIRNMSIVDVCPKEFEEPPNAQDQPSSSMQASPPTQNEEEAQVDEEEDQSNEPTQDDGIDQGGDANDQDKEDEEQRPPHPRVHQAIQRDHPIDTILGDIHKGVTTRSRVAHFCEHYSFVSSIEPHRVEEALQDSDWVVAMQEELNNFTRNEVWHLVPRPNQNVVGTKWVFRNKQDEHGVVTRNKARLVAKGYSQVEGLDFGETYAPVARLESIRILLAYATYHGFKLYQMDVKSAFLNGPIKEEVYVEQPPGFEDSEYPNHVYKLSKALYGLKQAPRAWYECLRDFLIANGFKVGKADPTLFTKTLKNDLFVCQIYVDDIIFGSTNESTCEEFSRIMTQKFEMSMMGEFKYFLGFQVKQLQEGTFISQTKYTQDILNKFGMKDAKPIKTPMGTNGHLDLDTGGKSVDQKSISNQVIGVLKGNWSLRRRQRLPLRNSSFADASSLSPFLGEKSMSIKEKDFVFGGQSKSPWQKN

SEQ ID NO: 10363 - protein, 1490 aa, Zea mays
  Clone ID: TF_ZM5010.C1.o3.fg.pep
MSGDHAKKEMETGEKPTTSHGSTSSEESRTKRKEKKKSSSNKGKEKKSSSHHKEKKEKSSSHKSHRKGDKHKRMRKVVYYETDTSSTSTSDSDAPSVTSKRQERKKFSKIPLHYPRISKHAPLLSVPLGKPPTFDGEDYARWSDLMRFHLTSLHKSIWDVVEFGAQVPSVGDEDYDEDEVAQIEHFNSQATTILLASLSREEYNKVQGLKSAKEVWDVLKTAHEGDELTKITKRETIEGELGRFRLRKGEEPQHMYNRLKTLVNQVRNLGSKKWDDHEMVKVILRSLIFLNPTQVQLIRGNPRYTKMTPEEVIGNSVSFECMIEGSRKINELDEPTTSEAQPVAFKATKEKKEESTPSRQPIDASKLDNEEMALVIKSFRQILKQWKGKDYKSRSKKVCYKCGKPGHFIAKCPISSDSDRGDDKKGRRKEKKKYYKKKGGDAHVCREWDSDESSSDSSDDEDAANIAVTKGLLFPNVGHKCLMAKDGKRKKVKSNSSTKYESSSDDNASDEEDNLCTLFVNLNMQQKEKLNELISAIHEKDDLLDSQEDFLIKENKKHVKVKNAYALEVEKCQKLSIELSTCHETIDNLRNENANLLAKVDSHVCNVSIPNPRDNNDDLLARIEELNISLASLRLENENLIAKAKDFDVCKITISDLRDKNDILHAKIVELNSCKPSTSTVEHTSICTRCRDVNIDAIHDHMTLIKQQNDHIAKLDAKIAEHNLENENFKFARSMLYNGRRPGIKDGIGFQRGDNVKLSAPPKRLSNFVKGKAPMPQDNEGYILYPAGYPEDKIRRIHSRKSHSGPNHAFMYKGETSSSRQPTRAKLPRKKTPSASNDHDISFKTFDASYVLTNKSGKVYASGGSSWILDSGCTNHMTGEKKMFSSYEKNQDPQRAITFGDGNQGVTVFRRSDDSIAFKGVLEGQLYLEKSQTQETLKGFLRRAQNEFGLRIKKIRSDNGTEFKNSQIEGFLEEEGIKHEFSSPYTPQQNGVVERKNRTLLDMARTMLDEYKTSDRFWAEAVNTACYAINRLYLHRILKKTSYELLTEQVDLDEIGEEEAPCIALRNMSIGDVCPKESEEPPNAQDQPSSSTQASPPTQNEDEAQVDEVEDQANEPPQDDDNDQGGDANDQDKEDEEPRPPHPRVHQAIQRDHPVDTILGDIHKGVTTRSRVAHFCEHYSFVSSIEPHRVEEALQDSDWVVAMQEELNNFTRNEQDEHGVVTRNKARLVAKGYSQVEGLDFGETYAPVARLESIRILLAYATYHGFKLYQMDVKSAFLNGPIKEEVYVEQPPGFEDSEYPNHVYKLSKALYGLKQALRAWYECLRDFLIANGFKVGKADPTLFTKTLENDLFVCQIYVDDIIFGSTNESTCEEFSRIMAQKFEMSMMGELKYFLGFQVKQLQEGTFISQTKYTQDILNKFGMKDAKPIKTPMGTTGIHLIPVGQKPTGISIYRRELLNSRRFRAYSRRFSAARRPLSGIRLSPSAADGNY

SEQ ID NO: 10364 - protein, 1731 aa, Zea mays
  Clone ID: TF_ZM5012.C1.o12.fg.pep
MSGDHAKKEMDTGDKPATSLEKASSGESRNKGKGKEKKPSSHKLHRSGDKKKKMRKVVYYETDTSSPSTSGSGAPSITSKRHERKKFSKIPLHYPRTSRHTPLLSVPLGKPLTFDGEDYARWSDLMKFHLTSLHKSIWNVVEFGAQVPSIGDEDYDEDEVAQIEHFNSQATTILLASLSREEYNKVQGLKSAKEVWDVLKTAHEGDELTKITKRETIEGELGRFRLRKGEEPQDMYNRLKTLVNQVCNLGSKKWDDHEMIKVILRSLIFLNPTQVQLIRGNPRYTLMTLEEVIRNFVSFEYMIKGSKKINELDDPSTSEAQPVAFKATEEKKEESTLSRQPIDASKLDNEEMALVIKSFRQILKQRRGKDYKPRSKKVCYKCGKPGHFIAKCPISSDSDRGDDKKGRRKEKKKYYKKKGGDAHVCREWDSDESSSDSSDDEDAANIAVTKGLLFPNVGHKCLMAKDGKNKKVKSKSSTRYESSSDDNASDEEDNLLTLFANLNMQQKEKLNELISAIHEKDDLLDTQEDFLIKENKKHVKVKNAYALEVEKCEKLSSELSTCHETIDNLRNENDNLYDNLLAKVDLNGCDASIPNLRNDNDNLLTKIEELNITLGSLRNENKNLLAKAKELDVCNASISDLRSKNDILHAKVVELKSCKPSTSTVQHTTICTRCRDVDINAIHDHMTLIKQQNDHIAKLDAKIAEHDLENEKFKFARSMLYRGRRSGIKDGIGFQQGGNVKLNAPPKKLSNFVKGKAPMPQDNEGYILYPVGYPESKIRRIHSRKSHSGPNHAFMYKGETSSSRQPTRAKFPKKKTPSASNDHDISFKTFDASYVLTSKSGKVVAKYVGGKHKGPKTCVWVYASGGSSWIIDSGCTNHMTGEKKMFSSYEKNQDPQRAITFGDGNQGVTVFRRSDDSVAFKGVLEGQLYLVDFDRAKLDTCLIAKTNMGWLWHRRLAHVGMKNLHKILKGEHILGLTNVHFEKDRICSACQAGKQVGAHHPHKNIMTTDRPLELLHMDLFGPIAYISIGGSKYYLVIVDDYSRFTWVFFLQEKSHTQETLKGFLRRAQNEFGLRIKKIRSDNGTEFKNSQIEGFLEEEGIKHEFSSPYTPQQNGVVERKNRTLLDMARTMLDEYKTSDRFWAEAVNTACYAINRLVFGSKCFILVKRGRKSKFAPKTVEGFLLGYGSNTRAYRVFNKSSGQVQVSCDIVFDEANGSQVEQVDLDEIGDEEAPCIALRNMSIGDVCPKEFEEPPNAQDQPSSSTQASPPTQNEDEAQVDEGQDQEDEPPQDDGNDQGGDANDQDKEDEEPRLPHPRVHQAIQRDHPVDTILGDIHKGVTTISRVAHFCEHYYFVSSIEPHRVEEALQDSDWVVAMQEELNNFTRNEQDEHGVVTRNKARLVAKGYSQVEGLDFGETYAPVARLESIRILLAYATYHGFKLYQMDVKSAFLNGPIKEEVYVEQPPGFEDSEYPNHVYKLSKALYGLKQAPRAWYECLRDFLVDNGFKVGKADPTLFTKTLENDLFMSMMGELKYFLGFQVKQLQEGTFLSQTKYTQDILSKFGMKDAKPIKTPMGTNGHLDLDTEGCKINRKSTSGTYQFLGRSLVSWASKKQNSIALSTAEAEYIAAGHGCVQLLWMRQTLRDYGYKLTKVPLLCDNESAIRMADNPVEHSRTKHIAIRYHFLRDHQQKGDIEIAYINTKDQLADIFTKPLDEQTFNKLRHELNILDSRNFF

SEQ ID NO: 10365 - protein, 917 aa, Zea mays
  Clone ID: TF_ZM5029.C1.o1.fg.pep
MAMMGSTSEKLYLCQVPNFGFEMIKLRPGLPKVHWTRTTVGGPNDLGGSVTAGIGAKPISSDIIKHFKKNFQYLSKKISFILTLSLSGSTHLVIPDMPHTRKTAHKSTGPIGVPRHQLAPRHEGSNNGNNDPIRDLEAQVEQLRTELHHQNRVWAEDSQCIAELSAEVGRLRYSERDSAIDWAINSRSITWHREAKARARVDELSTTLCNLQVYCNTLHEKVHVLYGRLHSDVPADPIAMGARPSGTAGEGPDAELDLFKPPPSTNLADERCHQGLVRMTVRVLPVAGKILQIHHLYHQRWPRLSLPWLTRLSIIPAFYARWRVTNSSSKAEGLLHRDRVKPHTWTSLKRVPHPLFVKAEDPLEADEWIRVIEQKFGLIRCTETQKSLFAAQQLRGPASTWWGNFVAIQQAGHQVTWDEFKLAFREHYIPEGVLHMKQEEFIRLKQAGDTVMQYLNKFNHLSQYAIDQVNTDLKKKNCFMRGLNNRLQRKMVTCLDLTYSRAVTTALAVEAKNTGQGKSKGFGGDRSNQRPKKRTSSSTGCFNCGKSGHFIKDCPYPRQNKSNNQQNSGSSNQGKGNMANNSAGKNVKKTGRIYYTQVATTPEGEPIRVRPKDIPKTAFTTRYGLFKYLVMSFGLTNAPAHLTYLMNSVFMPELDKFVVFIDDILIYSRNEEEHAKHLRIVLTRLREHQLYAKFSKCAFWLEEIQFLGHVLSANGIAVDPSKVQDILEWKSPTIVHQVRSFLGLAGYYRRFIPDFSKIVKPITSLLKNDIKFNWSSKCNEAFEQLKLELNMRQRRWLELIKDYELEIHYHPGKANVVADALSRKASCHCLTVKTSDTTLCQEMEKLNLGMIQHGTLIQLKLESILLQRIIDAQRSDKGMKHIHEKIEADKTNCFRRDNQGIVWFNNRIVVPKDDEVH

SEQ ID NO: 10366 - protein, 752 aa, Zea mays
  Clone ID: TF_ZM5029.C3.o7.fg.pep
MEQFIAAQMQILQGITAAIQQIQQNQQNQQHQQQQQYAPPARDKHRDFMSHHSPTFSHAVDPLDADDWLKVIGKKLDITQCNDREKVLYASGRLEGAASDWWDAFTVAHPNVDTITWQEFQENFRAHHIPSGIMKLKKKEFLSLTQGSMSVSEYRDRFTQLSRYAPEEVDTDEKRQQRFLEGLIGPLNYQLQSHTFPNFQTLLNKAIGLESKRKELSDHKRKFQGQSSRNTWPNNAQGSQFRSGNQGGNNYQVQRSGQQGQGNNQNQNHQRSNSKTNQRSGGSSQNRQGGASTTQARNNAHVQPNGCFKCGELGHYANNCPRRNQQKPQKSNNQRNDQNTPARGSAQNKTPQNQSRGRVNHVTAESVPGDADIVYGMFLVNSIPASVLFDSGASHSFITESFVEKHIIPKYPLKKILHISSPGGDMKATHSCPHVNIKIQGIDFSVNPVVLGSNGIDVILGCNWLKSCDGVIQCANGTIMLTSPQGERIQVNIDKSTDAKGKIVINHLEEKPLENIKVVCEYPDVFLEELPVLFVNKKDGSRRMCVHYRSLNEVTIKNKYPLPRIEDLFDQMKGAKIFSKIDLRSGYHQLKIRAEDVPKTAFTTRYGLYEFLVMSFGLTNAPAYFMNLMNKVFMEYLDQFVVVFIDDILIYSPNEETHEDHLRLVLQKLRNNQLYAKFSKCEFWLKEVAFLGHIVTDGGIKVEPGKISEILDWKQPKDASKIRSFLGLAGYYRRFIEGFSKLVKPLTSLLEK

SEQ ID NO: 10367 - protein, 743 aa, Zea mays
  Clone ID: TF_ZM5037.C4.o1.fg.pep
MSGDHAKKEMETGEKPTTSYGSTSSEESRTKRREKKKSSSNKGKEKKSSSHHKEKKEKSSSHKPHRKGDKHKRMRKVVYYETDTSSTSTSDSDAPSVTSKRQERKKYSKIPLRYPRISKHTPLLSVPLGKPPTFDGEDYARWSDLMRFHLISLHKSIWDVVEFGAQVPSVGDENYDEDEVAQIEHFNSQATTILLASLSKEEYNKVQGLKNAKEIWDVLKTAHEGDELTKITKRETIEGELGRFRLQKGEEPQHMYNRLKTLVNQVRNLGSKKWDDHKVVNVILRSLIFLNPTQVQLIRGNPRYTKMTPEEVIGHFVSFECMIEGSRKINELGDPSEAQPVAFKATEEKKEESTPSRQPIDASKLDNEEMALVIKSFRQILKQRRGKDYKSRSKKVCYKCGKPGHFIAKCPISSDSDRGDDKKGRRKEKKRYYKKKGGDAHVCREWDSDESSSDSSDDEDAANIAVTKGLLFPNVGHKCLMAKDGKKKKVKSNSSTKYESSSDDNASDEEDNLRSLFANLNIAQKEKLNELVSAIHEKDDLLDSQEDCLIKENKKHVKVKKAYALEVEKCEKLSSELSTCREMINNLRNENAILNAKVDSHVCNVSIPNLRDDNIDLLAKIDELNASLASLRLENENLIAKAKDFNVCNATISDLRTKNEMLHAKVVELKSCKPSTSNLEHISICTRCRDIDVDAIHDHLALIKKQNDHIAQLNAKISEHDLVNEKFKFARSERELGLHLVPK

SEQ ID NO: 10368 - protein, 1639 aa, Zea mays
  Clone ID: TF_ZM5055.C5.o1.fg.pep
MSGEHAKKEMETGDKPATSHGKASSEESRKKGKGKEKKASSHKLHRSGDKKKKMRKVVYYETDTSSPSTSDSDAPSITSKRHERKKFSKIPLHYPRTSRHTPLLSVPLGKPPTFDGEDYARWSDLMKFHLTSLHKSIWNVVEFGAQVPSVGDVDYDEDEVAQIEHFNSQATTILLAFLSREEYNKVQGLKSAKEVWDVLKTAHEGDELTKITKRETIEGELGRFRLRQGEEPQDMYNQLKTLVNQVRNLGSKKWDDHEVVKVILRSLIFLNPTQVQLIRGNPRYTLMTPEEVIGNFVSFEFMIKGSRKINELDGPSTSEAQPVAFKATEEKKEESTPSRTPIDASKLDNEEMALVIKSFRQILKQRRGKDYKPRSKKVCYKCGKPGHFIAKCPISSDSDRGDDKKGRRKEKRYYKKKGGDAHVCREWDSDESSSDSSDDEDATNIAVTKGLLFPNVGHKCLMAKDGKKKKVKSKSSTRYESSSDDNASDEEDNLRTLFANLNMQQKEKLNELISAIHEKDDLLDSQEDFLIKENKKHVKVKNAYALEVEKYEKISSELSTCHETIDNLRNENSNLLAKVDSIACNVSIPNLRNDNDDLLAKIEELNMSLASLRIENEKLLAKAKELDVCNATISDLRSRNDILHAKVVELKSCKPSTSTVEHTTICTRCRDVDIDAIHDHMVLIKQQNDHIAKLDAKIAEHELENEKFKFARSMLYSGRRPGIKDGIGFQKGDNVKLNAPPKKLSNFVKGKAPMSQDNEGYILYPAGYPESKIRRIHSRKSHSGPNHAFMYKGKTSSSRQPTRAKLPKKKTPSASNDHDISFKTFDASYVLTNKSGKVYASGGSSWIIDSGCTNHMTGEKKMFSSYEKNQDPQRAITFEDGNQGVTVFRRSDDSIAFKGVLEGQLYLVDFDRAELDTCLIAKTNMGWLWHRRLAHIGMKNLHKLLKGEHILGLTNVHFEKDRISSACQAGKQVGAHHPHKNIMTTDRPLELLHMDLFGPIAYISIGGSKYCLVIVDDYSCFTWVFFLQEKSHTQETLKGFLRRAQNEFGLRIKKIRSDNGTEFKNSQIEGFLEEEGIKHEFSSPYTPQQNGVVERKNRTLLDMARTMLDEYKTSDRFWAEAVNTACYAINWLYLHRILKKTSYKLLIGKKPNISYFRVFGSKCFILVKRGRKSKFAPKTVEGFLLGYDSNTRAYRVFNKSTGQVEVSCDVVFDETNGSQVEQVDLDEIGDEEAPYIALRNMSIRDVCPKESEEPPNAQDQPSSSTQASPPTQNEDEAQVDEGQDQEDEPPQDDGNDQGGDANDQDKEDEEQRPPHPRVHQAIQRDHPVDTILGDIHKGVTTRSRTKWVFRNKQDEHGVVIRNKARLVATGYSQVKGLDFGETYAPVARLESIRILLAYATYHGFKLYQMDVKSAFINGPIKEEVYVEQPPDFEDSEYPNHVYKLSKALYGLKQAPRAWYECLRDFLITNGFKVGKADPTLFTKTLENDLFVCQIYVDDIIFGSTNESTCEEFSRIMTQKFEMSMMGELKYFLGFQVKQLQEGTFLSQTKYTQDILSKFGMKDAKPIKTPMGTNGHLDLDEGGKSVDQKKEHIGDLPVLGKILGVLGFKEAKFRSSFYRRSRVHCRRPLLRATTLDEANP

SEQ ID NO: 10369 - protein, 592 aa, Zea mays
  Clone ID: TF_ZM5105.C5.o1.fg.pep
MSGDHSKKEMVTGEKPATSHGKAPSGESGNKMKGFPSHNKSHWSGEKKKKMKKVVYYETDSLSPSTSGSDAPSVTSKHHERKKFRDEYNDADEVAQIRHFNSQATTILLTSLSREEYNKVQGLKSAKEIWDVLKTTHEGDEVTKITKRETIKGELGRFMLNQGEEPQAMYNRLKILVNQVRNLGSTKWDDLEMVKEVIGKFVSFELMIKGSKQIIEQGTTSTPEVQPVAFKATEEKKEESTSSRLPIDASKLDNEEMTLIIKSFRQILKQRKGKDYKPRSKKVCYKCGKPGHFIAKCPISSDSDRGDDKKGKRREKKRYYKKKGGDAHVCRECDSNERSTDSSSDEDAANLAINKGLLFPNVGHKCLMAKDGKKKKVKSRASTKYATSSDEASSSDDEDDLLTLFANLNMQEKEKLNEWISDIHEKDELLDSQEDFVIKENKKHVKVKNAYVQEVEKCEKLTSELSICHDTISNLRNENAKLIAKVAKLNVCDDSLVNLKNDNASLISKIDKLNKSLSSLKIENDNLIVKAKDLNVCNDSITNLRNENAMLHAKIDELNACKPSTSNVSHVSICTRCRDINVDAIVTPGFGR

SEQ ID NO: 10370 - protein, 1644 aa, Zea mays
  Clone ID: TF_ZM5107.C2.o4.fg.pep
MSGDHAKKEMETGEKPTTSHGSTSSEESRTKRREKKKSSSNKGKEKKSSSHKPHRSEDKPKRMRKVVYYETDTSSTSTSGSDAPSVTSKRQGRKKFSKIPLHYSRISKHAPLLSVPLGKPPTFDGEDYARWSDLMRFHLTSLHKSIWDVVEFGAQVPSIGDKDYDEDEVAQIKHFNSQATTILLASLSREEYNKVQGLKSAKEVWDVLKTAHEGDELTKITKRETIEGELGRFRLRKGEEPQHMYNRLKTLVNQVRNLGSVKWDDHEVVKVILRSLIFLNPTQVQLIRGNPRYTKMTPEEVIGHFVSFECMIEGSRKINELDDPSTSEAQPVAFKATEEKKEESTPSRQPIDASKLDNEEMTLVIKSFRQILKQRRGKDYKSRSKKVCYKCGKPGHFIAKCPISSDSDRGDDKKGRRKEKKRYYKKKGGDAHICREWDSEESSSDSSDDEDATNIAVTKGLLFPNVGHKCLMAKDGKRKKVKSRSSTKYETSSDENASEEEDNLRTLFANLNMEQKEKLNELTSAIHEKDDLLDSQEDCLIKENKKHVKVKNAYALEVEKCQKLSSELSTCHEMIDNLKHENASLNAKVDSHVCNVSIPNPRDNNDDLFARIEELNISLTSLRVENENLIAKAKELDVCNATISNLRDKNDILHAKIVELNSCKTSTSTVEHVSICTRCRDVNIDAIHDHMALIKQQNDHIAKLDAKIAEHNLENEKFKFARSMLYNGRRPGIKDGIGFQKGDNVKLNAPPKKLSNFVKGKAPMPQDNEGYILYPAGYPESKIRKIHSRKSHSGPNHAFMYKGETSSSRQPTRAKVPKKIPIASNDHDISFKTFDASYVLTNKSGKIVAKYVGGKHKGSKTCVWVPKVLVSNAKGPKTIWGYASGGSSWIIDSGCTNHMTGEKKMFSSYEKNQDPQRAITFGDGNQGVTVFRRSDDSIAFKGVLEGQLYLVDFDRAELDTCLIAKTNMGWLWHRRLAHVGMKNLHKLLKGEHVLGLTNVHFEKDRICSACQAGKQVGTHHPHKNIMTTNRPLELLHMDLFGPIAYISIGGSKYCLVIVDDYSRFTWVFFLQEKSQTQETLKGFLRRAQNEFGLRIKKIRSDNGTEFKNSQIEGFLEEEGIKHEFSSPYTPQQNGVVERKNRTLLDMARTMLDEYKTSDRFWAEAVNTACYAINRLYLHRILKKTSYELLTEQVDLDEIGEEEAPCIALRNMSIGDVCPKESEEPPNAQDQPSSSTQASPPTQNEDEAQVDEVEDQANEPPQDDGIDQGEDANEEDKEEEEQRPPHPRVHQAIQRDHPVDTILGDIHKGVTTRSRVAHFCEHYSFVSYNEPHKVEEALQDSDWVVAMQEELNNFTRNEVWHLVPRPNQNVVGTKWVFRNKQDEHGVVTRNKARLVAKGYSQVEGLDFGETYAPVARLESIRILLAYATYHGFKLYQMDVKSAFLNGPIKEEVYVEQPPGFEDSEYPNHVYKLSKALYGLKQAPRAWYECLRDFLIANGFKVGKADPTLFTKTLENDLFVCQIYVDDIIFGSTNESTCEEFSRIMTQKFEMSMMGELKYFLGFQVKQLQEGTFISQTKYTQDILSKFGMKDAKPIKTPMGTNGHLDLDTGGKSVDQKSISNQVIGILKGNLSLRQRQRLPLRNSSF

SEQ ID NO: 10371 - protein, 1122 aa, Zea mays
  Clone ID: TF_ZM5109.C6.o2.fg.pep
MSGDHAKKEMETGDKPTTSHGKASSEESRNKGKGKEKKCSSHKSHRSGDKKKKMRKVVKYETDTSSPSTSGSDAPSVSSKRHGRKKFSKIPLRYPRIPKHTPLLSVLLGKPPTFDGEDYARWSDLMRFHLTSLHKSIWDVVEFGVQVPSVGDEDYDEDEVAQIQHFNSQASTILLASLSREEYNKVQGLKGAKEIWDTLKTAHEGDEVTKITKRETIEGELGRFRLRQGEEPQDMYNRLKTLVNQVRNLGSKKWDDHEMVKVILRSLVFLNPTQVQLICGNPRYTLMTPEEVIGNFHNRSHSKATEEKKAESTPSRTPIDASKLDNEEMVLIIKSFRQILNQRRGKDYKPRSKKVCYKCGKPGHFIAKCPISSDSDRGDDKKGRRKEKKKYYKKKGGDAHVCREWDSNESSTDSSDEDAANIAVTKGLLFPNVGHKCLMAKDGKRKKDDLLDTQEDFLIKENKKRVKVKNAYALEVEKCENYLAKELDVCNVTISDLRDKNDILRAKIVELNSCKPSTSTTEHVTICTRCRDVDVNAIHDHLSMIKQQNDHIAKLDAKIAEHELENEKFKFARSVTVFRRSDDSIAFKGVLEGQLYLVDFDRVELDTCLIAKTNMGWLWHRRLAHVGMKNLHKLLKGEHILGLTNVHFEKDRICSACQAGKQVGAHHPHKNIMTTDRPLELLHMDLFGPIAYISIGGSKYCLVIVDDYSRFTWVFFMQEKSHTQDTLKEFLRRAQNEFGLRIKKIRSDNRTEFKNSQIEGFLEEEGIKHEFSSPYTPQQNGVVERKNRTLLDMARTMLDEYKTSDRFWAEAVNTACYAINRLYLHRILKKTSYELLTGKKPNISYFRVFGSKCFILVKRGRKSKFAPKTVEGFLLGYDSNIRSYRVFNKSSGQVEVSCDVVFDETNGSQVEQVDLDEIGDEEALCIALRNMSFGDVCPKESEEPPNAQDQPSSSTQASPPTQNEDEAQVDEGEVQENEPPQDDGNDQGGEANDQDKEDEEPRPPHPRVHQAIQQDHPIETILGDIHKGVTTRSWVAHFCEHYSFVSSIEPHRVEEALQDSDWMVAMQEELNNFTRNEVWHLVPRPNQNFVGTKWVFRNKQDEHGVVTRNKSRLVAKGYSQVE

SEQ ID NO: 10372 - protein, 492 aa, Zea mays
  Clone ID: TF_ZmC11815_3.pep
MGMIRKINLMGVPLQVEDILFNIDRKKQRKRGCLACGEKGHFRDSCPTMAKPKKERSRGKALTSVRTWDDSSSEDEPPRTRSHWSSSRSSRSSHKCLMARGNKSIPSSSDENSSDDEGLLENFETFANLNSELSTKIELLESSVPSNTADDDLIKKNEKLKAKLASSQNTIENLLEKMEILSIHNDELTTKLENIGSTPGASLVKILEIIKKDASTSCFDLMDDTNPCNQVLVENIVIETCSDEVAKENEQLRQEVARLGKALYDKKGKAKQIQLPQYNTTAGVNKPMEGETVICRLCHKEGHKSFQCKTMTGDKPRQKLKQKPSSKISNTYIKKVDKKTATPYLIKKKKNGKVIAIKANKQANKGKGAKRIWVPKEIISTMKSTKKVWIPKGNSQDARITWTKGLRKATPQKKTLRTSRKHRTVRRHTGLSGVHTPDCLMHQGTAAQQLVPGGTQREDHRTVRCEDRTVRCGKPAAPTVTCSDKATARRTG

SEQ ID NO: 10373 - protein, 598 aa, Zea mays
  Clone ID: TF_ZmC4916_353.pep
MDPKGKGMVVDNNEKESIFNEPKNDKSTDLGSSHKRKDGKKKKTRRIKEIVYYDSDESSSSQKDDDDDYRKTVNSNFSFDYSRIPHSSNSHLLSIPLGKPPHFDGEDYRFWSHKMRSHLFSLHPSIWEIVENGMKFDSSDSPMFINEQIHKNAQATTVLLASLCRDEYNKVSGLDNAKQIWDTLKISHEGNDITMLTKMELVEGELGRFAMIRGEEPTQTYNRLKTLINKIRSYGSTRWTDHDVVRLLLRSFTILDPHLVNNIRENPRYTKMSPEEVLGKFVSGRMMIKEARYVDDALNGPINEPQPLALKATRSKEALPSKVAQIEAAGLNDEEMALIIKRFKTVLKGHKGQPSKTKTKGKRSCFKCGKIGHFIANCTDNESDQEHGSKREKKKNYKKAKGEAHLGKEWDSDCSSSDSDNEGLAATAFNKSALFPNERHTCLMAREKKVCTRNSTYASSSEDESSDEDEVDYSCLFKGLDRTKVDKINELIDALNDKNMLLEKQEDLLYEEHDKFVEAQRSHALEVKRNEMLSCELSSCHETISKLRSINDDLNAKLEIASKSTSCVENVVTCTRCKDINLDAYSEHLACISKLNEE

SEQ ID NO: 10374 - protein, 849 aa, Zea mays
  Clone ID: TF_ZmC4916_433.pep
MELVEGELGRFAVIRGEEPTQTYNRLKTLINKIRSYGSTRWTDHDVVRLMLRSFTIIDPHLVNLIRENPRYTKMTPEEILGKFVSRRMMVKEARYVDDALNGPLPVYEPQPVALKATSSKEALQSKVAQVEAAGLNEDEMALIIKRFKTALKGRKEYPSKNKAKGKRSCFKCGKTGHFIDQCPDNDNDQEQEKYGKKKKKKNYKKAKGEAHLGKEWNFNCSSSDSDDEGLAASAFDKSSLFPNEHHMCLMAKEKKGCQHYGRHSSIKDGLGFRKETKNLTSQKAPVLNKEKGKAPMASSSQKCHAYIYDRKFSRNAHRSNDHDAFNSHAMFASSSTFVHDRSRPRRNHVVHHVPRKVYASGGSSWIIDSGCTNHMTGEKKMFTSYVKNKDSQDSIIFGDGNQGKVKGLGKIAITSEHSTSNVFLVESLGYNLLYDKSETQGTLKRFLRRAQNEFELKVKKIRSDNGSEFKNLQVEEYLEEEGIKHEFSAPYTPQQNGVVEKKNRTLIDMARTMLGEFKTPKRFWSEAMNTSCHAINRLYMHRLLKKTSYELLTSKKPNVFYFRVFGSKCYILVKKEQVDLDDIDEDDVPTAAMRTMAIGEVPREEARDQGGAQEEQVMEEEAPLAPPTQVRATIQRNHPVDQILGDISKGVTTRSRLANFCEHYSFVSSIEPFRVEEALQDLDWVLAMQEELNNFKRNEVWSLVPRPKLNVVGTKWVFGNKQDEHGVVTRNKARLVEKGYAQVAGLDFEETFAPVARLESIRILLAYAAHHSFRLFQMDVKSAFLNGSIKEEVYVDQPPGFEDDRYPDHVFKLSKALYGLKQAPRAWYECLRDFLIANAFKVGKADPTL

SEQ ID NO: 10375 - protein, 1552 aa, Zea mays
  unsure (1)..(1552): unsure at all Xaa locations
  Clone ID: TF_ZM3616.C2.o3.fg.pep
MSREHAKKEMETGNKPATSHGKASSEESRNKGKGKEKKPSSHKSHRSGDKKKKMRKVVYYETDTSSPSTSGSDAPSVTSKRHERKKFSKIPLHYPRTSRHTPLLSVPLGKPPTFDGEDYARWSDLMKYHLTSLNKSIWNVVEFGAQVPSVGDEDYDEDEVAQIEHFNSQATTILLASLSREEYNKVQGLKSAKEVWDVLKTAHEGELGRFHLRQGEEPQDMYNRLKTLVNQVRNLGSKKWDDHEVVKVILRSLIFLNPTQVQLIRGNPRYTLMTPEEVIGNFVSFEFMIKGSRKINELDGPSTSEAQPVAFKATKEKKEESTPSRTPIDAFKLDNEEMALVIKSFRQILKQRRGKDYKPRSKNVCYKCGKPGHFIAKCPISSDSDRGDDKKGRRKEKKRYYKKKGGDAHVCREWDSDESSSDSSSDEDAANIAITKALPXVGHKCLMAKDGKKKKXIHEKYDLLDSQEDFLIKENKRHVKVKNAYALEVEKCEKLSSELSTCHETIDNLRNENANLLAKVDSIACNVSIPNLRNDNNDLLAKIEELNISLASLRDENEKLLAKAKDFDVCNATISDLRSKNDILHAKVVELKSCKPSISTVEHTTICTRCRDVDINAIHDHMALIKQQNDHIAKLDAKIAEHEIENEKFKFARSMLYSGRRPGIKDDIGFQQGGNVKINAPPKKLSNFVKGKAPMPQDNEGYFLYPVGYPENKIRRIHSRKSHSGPNHSFMYKGETSSFRQPTRAKLPKKKTPSASNDHDISFKTFDASYVLTNKSGKVYASGGSSWIIDSGCTNHMTGEKKMFSSYEKNQDPQRAITFGDGNQGVTVFRRSDDLIAFKGVLEGQLYLVNFDRAELDTCLIAKTNMGWLWHRRLAHVVMKNLHKLLKGEHILGLTNVHFEKDRICSACQAGKQVGAHHPHKNIMTTDRPLEVLHMDLFGLIAYISIGGSKYCLVIVDDYSRFTWVFFLQEKTHTQETLKGFLRRAQNEFGLRIKKIRSDNGTEFKNSQIEGFLEEEGIKHEFSSPYTPQQNGVVERKNRTLLDMARTMLDEYKTSDRFWAEAVNTACYAINRLYLYRILKKTSYELLTGKRPNISYFRVFGSKCFILVKRGRKSKFPPKTVEGFLLGYDSNTRAYRVFNKSSGLVEVSCDVVFDETNGSQVEQVDLDEIGDEEAPCISLRNMSIGDVCPKEFEEPPNAQDQPSPSTQASPPTQNEVEAQVDEGEDQANEPPQDDGNDQGGDANDQDKEDDEEQRPPHPRVHQAIQRDHPVDTILGDIHKGVTTRSRVAHIYEHYSFVSSIEPHRVEEALQDSDWVVAMQEELNNFTRNEVWHLVPRPNQNVVGTKWVFHNKQDEHGVVTRNKARLVAKGYSQVEGLDFGETYAPVARLESIRILLAYATYHGFKLYQMDVKSSFLNGPIKEEVYVEQPPAFEDSEYPNHVYKLSKVLYGLKQAPRAWYECLRDFLITNGFKVGKADPTLFTKTLENDLFVCQIYVDDIIFGSTNESTCEEFSRIMTQKFEMSMMGELKYFLGFQVKQLQEGTFLSQTKFKTF

SEQ ID NO: 10376 - protein, 1696 aa, Zea mays
  Clone ID: TF_ZM4499.C1.o6.fg.pep
MSGEHAKKEMETGEKPTTSHGSTSSEEFRTKRREKKKSSSNKGKEKKSSSHHKEKKEKSSSHKPHRSGDKQKRMRKVVYYETDTSSTSTSGSDAPSVTSKRQERKKFSKIPLHYPRISKHAPLLSVPLGKPPTFDGEDYARWSDLMRFHLTSLHKSIWDVVEFGAQVPSVGDKDYDEDEVAQIEHFNSQATTILLASLSREEYNKVQGLKSAKEVWDVLKTAHEGDELTKITKRETIEGELGRFRLRKGEEPQHMYNRLKTLVNQVRNLGSTKWDDHEMVKVILRSLIFLNPTQVQLIRGNPRYTKMTPEEVIGNFVSFECMIEGSRKINELDDPSTSEAQPVAFKATEEKKEEATPSRQPIDASKLDNEEMALVIKSFRQILKQRRGKDHKSRSKNVCYKCGKPGHFIAKCPISSDSDRGDNKKERRKEKKRYYKKKGGDAHVCREWDSDESSSDSSDDEDAANIAVTKGLLFPNVGHKCLMAKDGKKKVKSKSSTKYESSSDDNTNDEEDNLRSLFANLNMQQKEKLNELISAIHEKDDLLDTQEDFLIKENKKHVKVKNAYALEIEKCQKLSSELSTCHETIDNLRNENANLLAKVDSHVCNVSIPNPRDNNDDLLARIEELNISLASLRIENEKLLAKAKDFDVCNTTISDLRTKNDILHAKVVELKSCKPSTSTIEHVSICTRCRDVNIDAIHDHMALIKQQNDHIAKLDAKIAEHNLENEKFKFARSMLYNGRRPGIKDGIGFQRGDNVKLSAPPKRLSNFVKGKAPMPQDNEGYILYPASYPESKIRRIHSRKSHSGPNHAFMYKGETSSSRQPTRAKLPRKKTPNASNDHDISFKTFDASYVLTNKSGKVVAKYVGGKHKGSKTCVWVPKVLVSNAKGPKTIWVYASGGSSWILDSGCTNHMTGEKKMFSSYEKNQDPQRAITFGDGNQGLVKGVTVFRRSDDSIAFKGVLEGQLYLVDFDRAELDTCLIAKTNMGWLWHHRLAHVGMKNLHKLLKGEHILGLTNEKSQTQETLKGFLRRAQNEFDLRIKKIRSDNGTEFKNSQIEGFLEEEGIKHEFSSPYTPQQNGVVERKNRTLLDMGRTMLDEYKTSDRFWAEAVNTACYAINRLYLHRILKKTSYELLTSKKPNISYFRVFGSKCFILVKRGRKSKFAPKTVEGFLLGYDSNTRAYRVFNKSTGLVEVSCDVVFDETNGSQVEQVDLDEIGDEEAPCIALRNMSIGDVGPKESEEPPNAQDQPSSSMQASPPTQNEEEAQVDEEEDQSNEPPQDDGIDQGGDANDQDKEDEEQRPPHPRVHQAIQRDHPVDTILGDIHKGVTTRSRVAHFCEHYSFVSSIEPHRVEEALQDSDWVVAMQEELNNFTRNEVWHLVPRPNQNVVGTKWVFRNKQDEHGVVTRNKARLVAKGYSQVEGLDFGETYAPVARLESIRILLAYATYHGFKLYQMDVKSAFLNGPIKEEVYVEQPPGFEDSEYPNHVYKLSKALYGLKQAPRAWYECLRDFLIANGFKVGKADPTLFTKTLEKDLFVCQIYVDDIIFGSTNESTCEEFSRIMTQKFEMSMMGELKYFLGFQVKQLQEGTFISQTKYTQDILNKFGMKDAKPIKTPMGTNGHLDLDTGGTSFVKLHTLLFYIPLIMSLSYAMTNVFFKSISNQVIGVLKGNWSLRRRQRLPLRNSSFADAPSHSPFLGEKA

SEQ ID NO: 10377 - protein, 1769 aa, Zea mays
  Clone ID: TF_ZM4893.C2.o5.fg.pep
MSGEHAKKEMETGEKPTTSHGSTSSEEFRTKRREKKKSSSNKGKEKKSSSHHKEKKEKSSSHKPHRSGDKQKRMRKVVYYETDTSSTSTSGSDAPSVTSKRQERKKFSKIPLHYPRISKHAPLLSVPLGKPPTFDGEDYARWSDLMRFHLTSLHKSIWDVVEFGAQVPSVGDKDYDEDEVAQIEHFNSQATTILLASLSREEYNKVQGLKSAKEVWDVLKTAHEGDELTKITKRETIEGELGRFRLRKGEEPQHMYNRLKTLVNQVRNLGSTKWDDHEMVKVILRSLIFLNPTQVQLIRGNPRYTKMTPEEVIGNFVSFECMIEGSRKINELDDPSTSEAQPVAFKATEEKKEEATPSRQPIDASKLDNEEMALVIKSFRQILKQRRGKDHKSRSKNVCYKCGKPGHFIAKCPISSDSDRGDNKKERRKEKKRYYKKKGGDAHVCREWDSDESSSDSSDDEDAANIAVTKGLLFPNVGHKCLMAKDGKKKVKSKSSTKYESSSDDNTNDEEDNLRSLFANLNMQQKEKLNELISAIHEKDDLLDTQEDFLIKENKKHVKVKNAYALEIEKCQKLSSELSTCHETIDNLRNENANLLAKVDSHVCNVSIPNPRDNNDDLLARIEELNISLASLRIENEKLLAKAKDFDVCNTTISDLRTKNDILHAKVVELKSCKPSTSTIEHVSICTRCRDVNIDAIHDHMALIKQQNDHIAKLDAKIAEHNLENEKFKFARSMLYNGRRPGIKDGIGFQRGDNVKLSAPPKRLSNFVKGKAPMPQDNEGYILYPASYPESKIRRIHSRKSHSGPNHAFMYKGETSSSRQPTRAKLPRKKTPNASNDHDISFKTFDASYVLTNKSGKVVAKYVGGKHKGSKTCVWVPKVLVSNAKGPKTIWVYASGGSSWILDSGCTNHMTGEKKMFSSYEKNQDPQRAITFGDGNQGLVKGVTVFRRSDDSIAFKGVLEGQLYLVDFDRAELDTCLIAKTNMGWLWHHRLAHVGMKNLHKLLKGEHILGLTNVHFEKDRICSACQAGKQVGSHHPHKNIMTTDRPLELLHMDLFGPIAYISIDGSKYCLVIVDDYSRFTWVFFLQEKSQTQETLKGFLRRAQNEFDLRIKKIRSDNGTEFKNSQIEGFLEEEGIKHEFSSPYTPQQNGVVERKNRTLLDMGRTMLDEYKTSDRFWAEAVNTACYAINRLYLHRILKKTSYELLTSKKPNISYFRVFGSKCFILVKRGRKSKFAPKTVEGFLLGYDSNTRAYRVFNKSTGLVEVSCDVVFDETNGSQVEQVDLDEIGDEEAPCIALRNMSIGDVGPKESEEPPNAQDQPSSSMQASPPTQNEEEAQVDEEEDQSNEPPQDDGIDQGGDANDQDKEDEEQRPPHPRVHQAIQRDHPVDTILGDIHKGVTTRSRVAHFCEHYSFVSSIEPHRVEEALQDSDWVVAMQEELNNFTRNEVWHLVPRPNQNVVGTKWVFRNKQDEHGVVTRNKARLVAKGYSQVEGLDFGETYAPVARLESIRILLAYATYHGFKLYQMDVKSAFLNGPIKEEVYVEQPPGFEDSEYPNHVYKLSKALYGLKQAPRAWYECLRDFLIANGFKVGKADPTLFTKTLEKDLFVCQIYVDDIIFGSTNESTCEEFSRIMTQKFEMSMMGELKYFLGFQVKQLQEGTFISQTKYTQDILNKFGMKDAKPIKTPMGTNGHLDLDTGGTSFVKLHTLLFYIPLIMSLSYAMTNVFFKSISNQVIGVLKGNWSLRRRQRLPLRNSSFADAPSHSPFLGEKA

SEQ ID NO: 10378 - protein, 1462 aa, Zea mays
  Clone ID: TF_ZM5043.C4.o1.fg.pep
MDPKGKGIVINDKEKESFVNEPKDDKSTDSGSGHKRKDGKKKKTRRIKEIVYYDDSDESSSSQKDDDNDHEKKKTVNSNFSFDYSRIPQSINANLLFIPLGKPPHFDGEDYEFWSHKMRSHLFSLHPSIWELVESGMKFDSSDSPLFINEQIHKNAQATTVLLASLCRDEYHKVSGLDNAKQIWDTLKISHEGNDVTMLTKMELVEGELGRFAMIRGEESTQTYNRLKTLINKIRSYGSTRWTDHDVVRLMLRSFTILDPHLVNNIRENPMYTKMSPEEILGKFRFKTALKGRKEHPNKNKTKGKRSCFKCGKIGHFIANCTDNDSDQEKKSGKWEKKKNYKKAKGEAHLGKEWDSDCSSSDSDNEGLAATAFNKSSLFPNEHHTCLMAREKKVSTRNTSTYASSSEDESSDDDEIDYSCLFKGLDRTKVDKINELIDALNDKNRLLEKQEDLLYEEHDKFVSAQNSLALEVKRNEMLSCELSTCHETISTLKGVNDDLNAKLVVANKSNSCVEHVMICNRCKDFNVDACSEHLACISKLNDEVASLNAQLKTSKSEFDKLKFARDAYTIGRHPSIKDGLGFKREVKNLTSHKAPISAKEKGKAPMARSAQKNHAFMYHDRRHSRNVYRSYDAFDSHAMVASSSSIMHDRNLARRNAINHMPRRNIVHVPRKTNSEPSTIYHALNASFAICRKDRKIIARKLGAKCKGDKTCIWVPKAICTNLVGPNMSWVYASGGSSWIIDSGCTNHMTGEKRMFSSYVKNKDPQDSIIFGDGNQGKVKGLGKIAISNEHSISNVFLVESLGYNLLSVSQLCNMGYNCLFTNVDVSVFRRSDGSLAFKGVLDDKLYLVDFVKEEAGLDACLIAKTSMGWLWHRRLAHVGMKNLHKLLKGEHVIGLANVTFEKDRPCAACQAGKQVGSSHHAKNVMTTSRPLELLHMDLFGPVAYLSIGGIKYGLVIVDDFSRFTWVFFLQDKSETQGTLKRFLRRAQNEFELKVKKIRSDNGSEFKNLQVEEYLEEEGIKHEFSAPYTPQQNGVVQRKNRTLIDMAKTMLGEFKTPERFWSEAVNTACHAINRVYLHCLLKKTSYELLTGNKPNVSYFRVFGSKCYILVKKGRNSKFAPKAVEGFLLGYDSNTKVYRVFNKSSGLVEVSSDVVFDETNGSPREQVVDLDDIDEEDVPTAAMRTMAIGDVRPQEQKEQDQPSSSTMVHPPTQDDEQVHQEEAYDQGGAQDVHVIEEEAQPAPPTQVRAMIQRDHPVDQILGDISKGVTTRSRLVNFCEHYSFVSSIEPFRVEEALLDPDWVLAMQEELNNFKRNEVWTLVPRPKQNVVGTKWVFRNKQDKHGVVTRNKARLVAKGYAQVAGLDFEETFAPVARLESIRILLAYAAHHSFRLFQMDVKSAFLNGPIKEEVYVEQPPGFEDERYPDHVCKLSKALYGLKQAPRAWYECLRDFLIANAFKVGKAD

SEQ ID NO: 10379 - protein, 1353 aa, Zea mays
  Clone ID: TF_ZmC119_1836.pep
STWWGNFVAVQPAGHRITWDEFNLAFSEHYVPEGVLHMKQEEFIRLKQGGDTVMQYLNKFNHLSQYAIDQVNTDLKKKNCFMRGLNDRLQRKMATCLDLTYSRAVSMALVVEAKNTGQGKLKRFGGDRSNQGPEKRTRLVIRPFNQNRSSPRPPSYPFKQPVFIHPTIAPTSTNQPSAPGARFPTLPSSSTGCFNCGKFGHFIKDCPYPRQNQSNNQQRSESSKGNAANSTAGKNTRKTGWIYYTQVATTPEGEPVMMGTFLVANHPAVILFDSGASHTFISKKFVEKHCIPYTESREGFTIHSLGGQIFTKEVAYQVPVTLAERDFPTNMIVLKGQDIDHKAILNTDLRTIWLSYGQEEILLSIPIAIPAGPIGRVYGAIIPEIQDIPVVCEFPDVFPEDLPGLPLKRDVEFVIELKPGMAPISRRSYRMPPNELAELKTQLQDLLEKGFIRPSSSHWGCPAIFVKKKDQTLRMCVDYRPLNEVTIKNKYPLPRIDILFGQLTGARVFSKIDLRSGYHQIRIRPKNIPKTAFTMRYGLFEYLVMSFGLTNAPAHFTYLMKSVFMPELDKFVVVFIDDILIYSKNEEEHAQHLRIVLTRLREHQLYAKFSKCVFWLEEIQFMGHVLSAKGIAVDPSKVKDILEWKPPTTIHQVRNFLGLAGYYHRFIPDFSKLVKPITSLLKSDIKFNWSSKCNEAFEQLKLLLTTAPVLAQPDIEKPFDVYCDASGSGLGCVLMQEGRVIAYASRQLRQHEEHYPTHDLELVAVVHGLKIWRHYLLGNVYHIYTDHKSLKYIFTQSELNMRQRRWLELIKDYELEIHYHPGKANVVADALSRKTSCHCLMAKTSKNTLCQEMEKLNLAIIQQGTLNQLKLESIILQRIIDAQRDNLGMKHIREKIKAGVAKCFKEDDQGVIWFKNRIVVPKTEELRQQILDEAHLSRYSIHPGSTKMYQDLKQHYWWTKMKIEIARYVAKCDTCRRVKAIHMKTAGPLQSLPIPTWKWEDISMDFIVGLPRTAKGFDSIWVIIDRLTKIAHFLPVKVKYPVITYAELYITRILSLHGVPKTIVSDRGPQFVSKFWEELHKFLGTKLLHSSAYHPQTSGQTERVNQILEDMLRACVLDFSLKWDECLPLAEFSYNNSYQESIKMAPFEALYGRRCRTPLNWSEPGERYFFRPDMVKEVEEKVQRIIHNMKKAQARQKSYADKRRMPLYFLEGDYVYLKVSPMKGVSRFGVKGKLAPRYIGPFLILERYGPVAYRLQLPETLSAVHNVFHVSQLKKCLRVPDRTVEITDVVLEPDLTYSEHPIRVLDQKDRVTRRKTLKFYKIQWNQHSEDEATWETQDFLNKNFPGFLASCKL

SEQ ID NO: 10380 - protein, 377 aa, Zea mays
  Clone ID: TF_ZmC143274_1.pep
MGVPAFYRWLADRYPLTVSDAEEEEPVELEPGAFVPVDLRRPNPNGLEFDNLYLDMNGIIHPCFHPEGRPAPTTYDEVFKSIFDYIDHLFGLIRPRKLLYMAIDGVAPRAKMNQQRSRRFRAAKDAADAAAEEERLRKEFEAEGRTLAQKEKSEAIDSNVITPGTEFMFVLSTALQYYIQLRLNHTLGWQSVKIILSDSNVPGEGEHKIMSYIRLQRNLPGFDPNTRHCLYGLDADLIMLALATHEVHFSILREVISMPGQHEKCFLCGQVGHLAAECRGPSQPDNSVELPPIHKKKYQFLNIWVLREYLAKDLEIIDAPFKINFERLIDDFVFMCFFVGNDFLPHMPTLEIREGAINLLMSIYRSEFTSMGCYLTD

SEQ ID NO: 10381 - protein, 1402 aa, Zea mays
  Clone ID: TF_ZmC951_336.pep
MSGDHAKKEMETGEKPTTSHGSVSLEESRTKRKEKKKDSSKRKEKKKDSSKGKEKSSSHKPHRSEDKKKRMRKVVYYETDSSSASTSGSDATSVTSKRQERKKYSKIPLRYPRISKHTPLLSVPLGKPPTFDGEDYARWSDLMRFHLTSLHKSIWDVVEFGAQVPSVGDEDYDEDEVAQIEHFNSQATTILLASLSREEYNKVQGLKSAKEVWDVLKTAHEGDELTKITKRETIEGELGRFRLRKGEEPQNMYNRLKTLVNQVRNLGSKKWDDHKMVKVILRSLIFLNPTQVQLIRGNPRYTLMTPEEVIGNFVSFECMIEGSRKINKLDDPSTSEAQPVAFKATEEKKEESTPSRQPIDASKLDNEEMALVIKSFRQILKQRRGKDYKSRSKEVCYKCGKPGHFIAKCPLSSDSDRDNDKKGKRREKKRYHKKRGGDAHVCREWDSDESSTDSSSDEDAANIAVTKGLLFPNVGHKFLMAKDGKKKKVKSKSSTTYESSSDDNASDEEDNLRTLFANLNMEQKEKLNELISAIHEKDDLLDSQEDFLIKENKKHVKVKNAYALEIEKCEKLSSELSTCHVTIYNLRNENANLLAKVDSHVCNVSITNSRNNDDDLLARIEELNISLASLRIEKEKLLAKAKDFDVCNATISDLRTKNDMLHAKVVELKSCKPSTSIVEHVSICTRSKLDAKIAEHYLENENFKFARSMLYNGRGPGIKDGIGFQRGDNVKLNAPPKRLSNFVKGKAPMPQDNESYILYPAGYPEDKIRRIHSRKSHSGPNHAFMYKGETSSSRQPTRAKLPKKKTPSASNEHSLSFKTFDASYVLTNKSGKVVAKFVGGKHKGSKTCVWVPKVLVSNAKGPKTVWVYASGGSSWIIDSGCTNHMTGEKKMFSSYEKNKDPQRAITFGDGNQDSLDYNLLSVSQLCKMGYNCLFTDIGVTIFRRSDDSIEFKGRKSKFAPKTVEGFLLGYDSNTRAYRVFNKSTGQVEVSCDVVFDETNGSQVEQVDLDEIGIEEAPCIALRNMSIGDVCPKEPEEPSNAQDQPSSSTQASPPTQNEDEAQVDEVEDQANELPQDDGNDQGGDANNQEKEDEEQRPPHPRVHQAIQRDHPVDTILGDIHKGVTTRSRVAHFCEHYSFVSSIEPHRVEEALQDSDWVVAMQEELNNFTRNEVWHLVPRPNQNVVGTKWVFRNKQDEHGVVTRNKARLVAKGYSQVEGLDFGETYAPVARLESIRILLAYATYHGFKLYQMDVKSAFLNGPIKEEVYVEQPPGFEDGEYPNHVYKLSKALYGLKQAPRACRIMTQNFEMSMMGELKYFLGFQVKQLQEGTFISQTKYTQDILNKFGMKDAKPIKTPMGTNEHLDLDTGGKSVDQKPRQGPTRQSNPVARWTAKLCQQPFPPENL

SEQ ID NO: 10382 - protein, 432 aa, Zea mays
  Clone ID: TF_ZM3617.C9.o1.fg.pep
MALIIKSFRQILKQRRGKDYKPRSKRVCYKCGKSGHFIAKCPMSNDSDRGNDKKGKKKEKKRYYKKKGGDTHMCREWDSDESSTDSSDDEDATNIAVNKGLLFPNVGHKCFMAKDGKKKKVQSRATKYTTSSDEGSSSEDEDDLLTLFANLNMQQKEKLNKLIGAIHEKDELLDSQEEFLIKENKKHVKVEKLNACNDSIVSLRNENASLIAKIDKLNESISSLRDENARLISKAKDLNVCNDSISSLRNENAILHAKIDELNVCEPSTSTVDHVSICTRCRDVNVDAINDHLALIKQQNDHIAQLTTKINEHEIENEKFKFARSMLYNGRCPGIKNDIGFQQGSNVKLNTPKKLSNFVKGEKRMFSSYEKNEDPQQAITFRDGNQDSLDYNLLSVSQLCKMGYNCLFSDVGVTVFRRSDDSIAFKGVLEGQ

SEQ ID NO: 10383 - protein, 121 aa, Zea mays
  Clone ID: TF_ZM4405.C3.o3.fg.pep
MALIIKSFRQILKQRRGEDYKSHSKMVCYKCGKPGHFIAKCPLSSDSDRGDDKKGKRREKKRYYKKKGGDAHVCREWDSNESSTDSSSDKDAANIVVNKGLLFPNVGHKCLMAKDGKKKKK

SEQ ID NO: 10384 - protein, 752 aa, Zea mays
  Clone ID: TF_ZM5034.C4.o1.fg.pep
MALIIKSFRQILKQRRGKDYKPRSKRVCYKCGKSGHFIAKCPMSNDSDRGNDKKGKKKEKKRYYKKKGGDTHMCREWDSDESSTDSSDDEDATNIAVNKGLLFPNVGHKCFMAKDGKKKKVQSRATKYTTSSDEGSSSEDEDDLLTLFANLNMQQKEKLNKLIGAIHEKDELLDSQEEFLIKENKKHVKVEKLNACNDSIVSLRNENASLIAKIDKLNESISSLRDENARLISKAKDLNVCNDSISSLRNENAILHAKIDELNVCEPSTSTVDHVSICTRCRDVNVDAINDHLALIKQQNDHIAQLTTKINEHEIENEKFKFARSMLYNGRCPGIKNDIGFQQGSNVKLNTPKKLSNFVKGEKRMFSSYEKNEDPQQAITFRDGNQDSLDYNLLSVSQLCKMGYNCLFSDVGVTVFRRSDDSIAFKGVLEGQVYLVDFDRAELDTCLIAKTNMGWLWHRRLAHVGMKNLHKLLKGEHILGITNVHFEKDKFSLRIKKIRSDNGTEFKNSQIEGFLEDEGIKHEFSSPYTPQQNGVVERKNRTLLDMARTMLDEYKTPDRFWAEAINTACYSINRLYLHRILKKTSYELLTGKKSNVSYFRVFGSKCFILVKRGRKSKFTPKAVEGFLLGYDSNTRAYRVFNKSTGLVEVSCDIVFDETNGSQVEQVDLDELYDEEAPCVALRNMSIGDVCPKESEEPPQAQDQPSSSNQASPPTQNEEHAQGDEEEDQEDEPPQEEVNDQGGDEDNQDKEDD

SEQ ID NO: 10385 - protein, 1370 aa, Zea mays
  Clone ID: TF_ZM4939.C1.o6.fg.pep
MLNIAQCTDREKVLYASGRLTGPAADWWDSYTAAHDAADTITWAEFSTQFRNYHIPAGMIKIKKKEFLSLKQGSMSVSEYRDKFIQLSRYAPEEVAEDERKQEHFIEGLNGPLQYALVAHTFPSFQRLLDKALAIEHKRVQLGDLKRKAISQGQGSSSVRPRYSSPQSTPTRPGGPRPVQQSPLRTPPPRQATPTGTPTKFSGQSPGTTCFKCGKNGHYANVCPQRMATTPVQNRQQTPGSGKGYSIAKVNQVSVDATPDGGDLVIGMFYVNAIPATILFDSGATHSFMSARYANTNEIPLLNMRKPMIVVTPKGPVEANQMTRRLTLTIMGREFGATAIILESSSIDLILGMSWLRKAKAVIACGRGTVELTTTKGERFQVNIAVTSSPMRAMFFIPKEFVGNNIRVVRDFPDVFPEELPGMPPEREVEFVIDLLPGTAPISKRPYRMSVEELKELKKQLTELQEAGYIRPSSSPWGAPVLFVQKKDESQRMCVDYRSLNDVTVKNKYPLPRIEDLFDQMRGARVFSKIDLRSGYHQMRIRPSDIPKTAFSTRYGLYEFTVMSFGLTNAPAYFMNLMNKVFMEYLDRFVVVFIDDILIYSKSDSDHEEHLRMVLQKLRDNQLYAKFSKCEFWIDEVPFLGHIISNGGISVDPAKVKEIMEWRVPTTVTEIRSFLGLAGYYRRFIEGFSKIAKPMTSLLEKGKEFKWDEKCQDSFDLLKKRLMSPPVLVMPDLQKGFDIYCDACGQGLGCVLMQEGHVIAYASRQLRKHELNYPTHDLELAAVVHALKIWRHYIMGTKCQVYTDHKSLKYIFTQKDLNLRQRRWLELIKDYDLEIHYHPGKANLVADALSRKEHVHSAIVAQLPDEIVEDFRRLNLGIVTHTEGVTIDVEPTLEQEIRKGQIGDAKIKEIKDLITEGRVPEFTEDEQGIVWFKDRMCVPDIKSLREIILKEAHDSDYSIHPGSTKMYQDLKRKYWWYGLKRDVAAHVAMCDVCQRVKAEHQRPAGLLHPLKIPEWKWEEIGMDFITGLPRTQKGYDAIWVIVDRLTKVAHFIPVKTTYKGSQLAELYMARIVCLHGVPKKIVSDRGSQFTSRFWRSFHENMSTKLNFSTAYHPQTDGQTERTNQVLEDMLRACALQHGGSWDKSLPYAEFSYNNSYQASLKMSPFEALYGRKCRTPLYWDQTGERQFFGPELIQEAEEQVRIIRENLRVAQTRQKSYADNRRRPLEFEEGDYVYLKVSPLRGMRRFKVKGKLSPRYIGPFLIFRRVGEMAYQLELPASLSDVHNVFHVSQLKKCLRVPEEQLPMEELSVQGDLTYTEYPIKILDTLTRVTRNKVIKMCKVQWSHHGEDEATWEREEELRVDFPHLFPRSS

SEQ ID NO: 10386 - protein, 397 aa, Zea mays
  Clone ID: TF_ZmC31816_33.pep
MRRWRSSAKFSTKSSSKGGGRTTSPAPRKFATSVVSPVILLLDVHYLVIVTGAMTRRERGRKRRDTTRRRAAMPMFAGSGTPTMSRGSAKREIETTTSHGKALSRASDAKGREESPPRVKSHQSGDKKKKMKKVVYYETDSSSPSTSGSDAPSVTSKRHERKKFSSKQIVNLEQGDTSTPEVQPVAFKAMEEKKEESTSSRLPIDASKLDNEEMTLIIKSFRQILKQKRGKDYKPRSKRVCYKCGKPGHFIAKYPMSSDSDSGDDKRGKRKEKKYYKKKGGDAHMCQEWDSDMSSTNSSSDGDAANIAVNKGLLFPNVGHKCFMAKNDKKKKVQARTTPKHTTSSDEGSSSDDEDDFLSLFANFNMQQKEKLNELIGVIHEKDELLDSQEEFLIKEK

SEQ ID NO: 10387 - protein, 1690 aa, Zea mays
  Clone ID: TF_ZmC951_280.pep
MSGDYAKKEMETGEKPTTSYKSTSSEESRTKRREKKKSSSNKGKEKKSSSHHKEKKEKSSSHKPHRKGDKHKRMRKVVYYETDTSSTSTSDSDAPSVTSKRQERKKYSKIPLRYPRISKHTPLLSVPLGKPPTFDGEDYARWSDLMRFHLISLHKSIWDVVEFGAQVPSVGDENYDEDEVAQIEHFNSQATTILLASLSREEYNKVQGLKSAKEIWDVLKTAHEGDELTKITKRETIEGELGRFRLHKGEEPQHMYNRLKTLVNQVRNLGSKKWDDHEVVNVILRSLIFLNPTQVQLIRGNPRYTKMTPEEVIGHFVSFECMIEGSRKINELGDSSEAQPVAFKATEEKKEESTPSRQPIDASKLDNEEMALVIKSFHQILKQRRGKDYKSRSKMVCYKCGKPGHFIAKCPISSDSDRGDDKKGRRKEKKRYYKNKGGDAHVCREWDSDESSSDSSDDEDAANIAVTKGLLFPNVGHKCLMAKDGKRKKVKSNSSTKYESSSDDNASDEENNLRSLFANLNIAQKEKLNELVSAIHEKDDLLDSQEDCLIKENKKHVKVKKAYALEVEKCEKLSSELSTCREIIDNLRSENASLNAKVDSHVCNVSIPNPRDNNDDLLARIKELNISLASLRVENEKLITKAKELDVCNVAISDLRTKNDMLHAKVVELKSCKPSTSIVEHVSICTRCRDIDVNAIHDHMALIKQQNDHIAKLDAKIAEHNLENEKFKFARSMLYNGRRPGIKDGIGFQRGDNVKISAPPKRLSNFVKGKAPMPQDNEGYILYPAGYPESKIRRIPSRKSHSGPNHAFMYKGETSSSRQPTHAKLPRKKTPNASNEHNISFKTFDASYVLTNKSGKVVAKFVGGKHKGSKTCVWVPKVLVSNAKGPKTVWVYASGGSSWILDSGCTNHMTGEKRMFSSYEKNQDPQRAITFGDGNQGVTVFRRSDDSIAFKGVLEGQLYLVDFDRAELDTCLIAKTNMGWLWHRRLAHVGMKNLHKLLKGEHILGLTNVHFEKDRICSACQAGKQVGVHHPHKNIMTTDRPLELLHMDLFGPIAYISIGGSKYCLVIVDDYSRFTWVFFLQEKSQTQETLKGFLRRAQNEFGLRIKKIRSDNGTEFKNSQIEGFLEEEGIKHEFSSPYTPQQNGIVERKNRTLLDMARTMLDEYKTPDRFWAEAVNTACYAINRLYLHRILKKTSYELLTGKKPNISYFRVFGSKCFILVKRGRKSKFAPKTVEGFLLGYDSNTRAYRVFNKSTGLVEVSCDVVFDETNGSQVEQVDLDEISEEQAPCIALRNMSIGDVCPKESEEPPTTQDQPSSSTLASPPTQNEDEAQVDEVEDQANEPPQDDGNDQGGDANDQEKEDEEEPRPPHPRVHQAIQRDHPVDTILGDIHKGVTTRSRVAHFCEHYSFVSSIEPHRIEEALQDSDWVVAMQEELNNFTRNEVWHLVSRPNQNVVGTKWVFRNKQDEHGVVTRNKARLVAKGYSQVEGLDFGETYAPVARLESIRILLAYATYHGFKLYQMDVKSAFLNGPIKEEVYVEQPPGFEDSEYPNHVYRLSKALYGLKQAQEHVGKADPTLFTKTLENDLFVCQIYVDDIIFGSTNESTCEEFSRIMTQKFEMSMMGELKYFLGFQVKQLQEGTFICQTKYTQDILTKFGMKDAKPIKTPMGTNGHLDLDTGDSKPTLRKLTLRP

SEQ ID NO: 10388 - protein, 1567 aa, Zea mays
  Clone ID: TF_ZM4452.C2.o1.fg.pep
MSGDHAKREIVTSGDKSASSGRTHSRESGHKHKEESSSSTKSQRRGDKKKMKKVVYYETDSLSPSTSGFESASVTSKRLERKNIWDIVEYGAQVPKVGDKDYDSDKADQIRHFNSQATTILLTSLCREEYNKVQGLKMGKEIWDVLKTAHEGDEVTKITKQETIEGELGRFILNQGEEPQAMYSRLKTLVNQVRNLKSTKWDDHEMVKVILRSLIFRNPTQVQLIRGDPRYKLMSPEEVIGKFVSFELMIKGSKHIVNLEQGGTFTPKVQPVAFKAIEEEKKEPMPSRIPIDASKLDNEEMALIIKSFRQILKQRRGKDYKPHSKRVCYKCGKLGHFIAKCPMSSDSDRGDDKKGNRKEKKRYYKNKGGDAHVCREWDSDMSSTDTSSDEDAANITVNKGLLFPNVGHKCFMAKDGKKKKVELLDSQEEFLIKENKKHVKVKNAYAQEIEKCENLTKELSICHDTISNLRTENVSLIAKVEKSNVCHDSIVNLKNDNARLIAKIDKLNESIAILKTENEKLISKAKDLNVCNVYISNLRNENVILHAKIDELNACKPSTSTVDHVTICTRCRDINVDAIHDHLASIKEQNDHIAQLTAKINEHEIENEKFKFARSMLYSGRRPGIKDGIGFQQGGNIKLNAPKRLSNFVKGKAPMAQDNEGYILYPAGYPEHKIRRIHARKPHNVSHHAFMYKNEASSSRQSTHVKLPKKKTPTASNEPNVSFKTFDASYVLTNKSGKVVAKYIGGKQKGSKTCVWVPKDYASGGSSWIIDSGCTNHMTGEKRMFSSYEKNEDPQRAITFGDGNQDLGVTVFRRSDDSVAFKGEKSQTQETLKGFLRRAQNEFGLRIKKIRSNNGMEFKNSQIEGFLEEEGIKHEFSSPYTPQQNGVVERKNRTLLDMARTMLDEYKTLDWFWAEAINTACYSINRLYLHRILKKTSYELLTGKKPNVSYFRVFGSKCFILVKRGRKSKFAPKVVEGFLLGYDSNTRAYRVFNKSTGLVEVSCDIVFDETNGSQVENMSIGDMYPKESEEPPQAQDQPSSYMQASPPTQDEDQAQDNEDEDQEDEPPQEEDNDQGGDDHDKDKEDDQEIQGQQPPHPRVHQAIQRDHPVNSILGNIHKGVTTRSRVAHFCEHYSFVSSIEPYRVEDVVRDSNWVLAMQEELNNFTRNEVWHLVPRPNQNVVGTKWVFRNKQDEHGVVTRNKARLVAKGYSQVEGLDFGETYAPIARLESIHILLAYATYHGFKLYQMDVKSAFLNGPIKEEVYVEQPPGFEDSEYPNHVYKLSKALYGLKQAPRAWYKCLRDFLITNGFKVGKANPTLFTKTIAKDLFVCQIYVDDIIFGSTNKSTCEEFSRIMIQKFEMSMMGELKCFLGFQVKQLQEDTFTSQTQYIQDILTKFGMKDAKPIKTPMGTNGHLDLDTGGCKIDRKSTSGTCQFLGRSLVSWASKKQNSVALSNAEAEYIVVGHCCAQLLWMRQTLRDYGYKLSKFPLLCDNESAIRMADNPVEHSHTKHIAIRYHFLRESPTKGGYRGAKGSTQTNKKIKVGVQKKGAKEFEENPGLVHQIVRCAT

SEQ ID NO: 10389 - protein, 981 aa, Zea mays
  Clone ID: TF_ZmC6115_1.pep
MKEAEIGQRHNLFQTRAKVQDKVVKVIIDGGSCHNLASREMVEKLDIKIGYKVKVSFKIGEYVDTVECDVAPMSVCHMLLGRPWQYDRYSQHCGRTNQYTLDLKGRKFVLKPMTPQQIMVEHLQKKTEISAASRGGEEQNKLSAIHNSDFEDVFPQETPAGLPPIRGIEHQIDLILGAALPNRPPYRTNPEETKEIQRQVQELLNKGFVRESLSPCVVPVILVPKKDGSWRMCVDCRAINNITVRYPIPQLDDMLDELSGSTFFTKIDLRSGYHQIRMKTGDEWKTAFKTKFGLYEWLVMPFGLTNAPSTFMRLMNHVLRTFIGKFVVVYFDDILIYSKSFDEHVKHIRQVLDERRKEKLFANLEKCSFCTDHVVFLSFVVSAKGIEVDESKVKAIKDWPAPTNVSQVRSFHGLAGFYRRFVRDFSTIASPLNELTKKCVEFKWGNSQEDAFQELKKRLTEAPVLILPDFTKTFEVECDASGIGIGGVLMQQGKPIAYFSEKLGGAQLNYSVYDKELYALVRALETWQHYLWPKEFVIHSDHEALKYLKGQAKLNRRHAKWVEFIETFPYIVKYKKGKDNVVADALSRRNVLLNQLEESHGGGLTGHFGQKKTYEMLSDHFYWPKMRRDVIRFVERCVTCHKAKFSKMAHFIPCNKSDNASHVANLFFREILRLHGVPKTIVSDRDVKFVSYFWKTMWAKLGTKLLFSTTCHPQTDGQTEVVNRTLSMLLRTMVKKNLKDWEECLPHVEFAYNRAVHSTTNLCTFEIVYGFKSIAPIDLLPLPLQERTNIEASKCAAYIKKIHEKTKEAIELKAVRKATSMNKHRKKVLFEPGDLVWIHLRKERFPEQRKSKLMPRGDGLFRVFAKINDNAYKIDLPPSYGVSNTFNVADLLPYTSEDTSESRTTPFHGEEDDTTTTLRNTLQPPRHTTSTQVPSTSRIRAKMLYSTSKDRIKYELDGFHYETQATDPSEVDIEVLREWAH

SEQ ID NO: 10390 - protein, 1126 aa, Zea mays
  Clone ID: TF_ZM4618.C1.o5.fg.pep
MSGGDGPPPVFYGDDFPYWKICMEAYLEAIDIGVYKNATQGFPEPRDPTNLVGEEFNYEKWNVKAKNTLFRGLCKDVFNRVRNHKNAHDLWMDICALHEGTRSEREERYHIAMRKLNSFEMLANENSNAIYSRLNILIEEVNGLGLTQISQPDVVRKILSVLPIDKYGHIVTVLHQMDISVTTPTQILGKINAHEMYMHINDKEESSSKIKDLALKANQERKGKAKVQIEEESSSDDDLDANITLMPKKNKFKGKKEDDIDDEKKEKRFFKRKDGKHKRFHKKKNGKAYIVGDWLTDIESSSGSSSSEEENDEKVAAIAGDFSSPPPSPSSTSHLCLMARGEWKVQNDIHITDDSDSDSDEEFASPSYDELADLLEEYNQIIRKSKAKCDKLKNENESLNAKYDIVMKANAKDKCDKLNEANRELKDRLVKIKEDYTKIKFDHDNLLVENELLSCNTHEAINPVVKIDVATSCDDLSQGEQTSLHDELTEKVEVLTLDNQKLKRYLTDATTRGKVAIENNDFNNELAVDNERLKNEVKKLKSENEHLATSVQKFNKGQYLQNELLMNTVMKNNNSGIGYNAFVQKKVTTQYKPKQTHRPIKCFECGKEGHFAHNCKSKPPTPLPKHSRPFAFNAHYVLRKVANGKVNYKTGGSHWVIDSGCTQHMTGNPRMFTSLDENVDGQDKITFGDNSKEKVQGLGKVAISNDLSISNVLLVAPLSFNLLSVGQLCDLGLQCLFTPIEVIVSKMDDESMVFKGFRYNNLYLVDFTSEDADLRTCLFTKASLGWLWHRRLAHVGMSTLKKVLKKDMVRGLKDVVFEKDKPCSACQAGKQVANTHLTKAFMPTSRPLELLHLDLFGPTNYKFAKKAQNEFDCKIKKIRTDNGKEFDNTNIHEYCDEIGIKHEVSATYTPQQNGVVERKNRTLFTLARTMIDEYNTPERFWAEAVNTACFASNRLFPHRLLAKTPYELLNGKKPDVSFRVFRCKCYIYKKRHHLGKFQRCCDIGFLLGYSLKSKAYRVFNHATGVVEETYDVEFDETNGSQGALENLDDVGDEPLREAMKNMPIGAIKPKEDEEEVQNIDMPSSSNVPQDDEKDERHANEDTFVSHEQARVLSHPGFRGTKTQART

SEQ ID NO: 10391 - protein, 1252 aa, Zea mays
  Clone ID: TF_ZM4900.C4.o1.fg.pep
MSGDHAKKMVIGGEKSATSHGKAPSNYNMWSDKMRHHLTSLHTSIWDVVEIGVQVPSPGDEDYDSDEVAQIRHFNSQATTILLASLSREEYNKVQGLKSAKEIWDVLKTAHEGDEVTKITKQETIEGELGRFRLRQGEEPQDMYNRLKTLVNQVRNLGSKKWDGHEMVKVILRSLVFLNPTQVQLIRGDPRYTLMSPEEVIGKFVSFELMIKGSKKIIEQDGPSTPEAQPVAFKATEEKKEESTSSRLPIDASKLDNEEMALIIKSFRQILKQRRGKDYKPRSKKVCYKCGKTGHFIAKCPLSSDSDRGDDKKGKRREKRRYYKKKGSDAHVCREWDSDESSSDEDAAHIAVTKGLLFPNVGHKCLMAKDGKRKKVKSRSFTKYASSSDEDHFSDEEDNLRILFANLNMQQKEKLNELISAIHEKDELLDSQEDFLIKENKKHVKVKDAYALEVEKCEKLSSELSKCHDIITNLRNKNASLIAKIDSNVCDNSISNLRDDNANLLARIEKLNDSLTSLRNENENENLITKAKDLDVCNVTISNLRSENDILHAKKMKKIKFARSILYSGRRPGIKDGIGFQRGDNVKVNAPPKRLSNFVKGKAPMAQDNEGYILYPVGYPEHKIRRIHSRKSHSGPNHAFMYKGETSSSRQSTRAKLPKRKTPIASNDSNISFKTFDASYVLTNKSGKVYAFGGSSWIIDSGCTNHMTGEKKMFSSYEKNQDPQRAITFGDGNQGVTVFRRSDDSIAFNGVLEGQLYLEKSHTQETLKGFLRQAQNEFGLRIKKIRSDNGTEFKNSQIEGFLEEKGIKHEFSSPYTPQQNGVVERKNRTLLDMARTMLDEYKTSDRFWAEAVNTACYAINRVFGSKCFILVKKGRKSKFAPKVVEGFLLGYDSNTRAYRVFNKSSGQVEVSCDIVFDETNDSQVEQVDLDEIGDEEAPCVALRNMSIGDVCPKESEEPPHAQDQPSSSMQASPPTQDEDEAQDNEGEDQEVEPPQEESNNQGGDAHDQDEEDEQAPRPPHPRVHQAIQQDHPVNTILGDIQKGVTTRSRVAHFCEHYSFVSSIEPHRVEEELQDSDWVVAMQEELNNFTRNEVCHLVPRPNQNVVGTKWVFRNKQDEHGVVTRNKARLVAKGDSQVKGLDFGETYAPVARLESIRILLAYATYHGFKLYQMDVKSAFLNGPIKEEVYVEQPPGFEDSEYPNYVYKLSKALYGLKQAPRAWYECLRDFLITNGFKVGKVDPTLFTKTLDNDLF

SEQ ID NO: 10392 - protein, 661 aa, Zea mays
  unsure (1)..(661): unsure at all Xaa locations
  Clone ID: TF_ZM4987.C1.o15.fg.pep
MVVNDKEKESFLNEPRDDKPTDSGSSHKKRDGKKKRRIKKIIYYDSDASSSSPHDDDDDSSSKKKPVNQNYSFDYSRIPYNSNAHLLSIPLGKPPHFDGEDYSFWSHKMRSHLFSLHPSIWEIVENGMHFDSINNAMFINEQIHKNAQATAVLLASLCRDEYNKVSGLDNAKQIWDTLKISHEGNDTTMITKMELVEGELGRFAMVRGEEPIQTYNRLKTLVNKIRSYGSTRWTDHDVVRLMLRSFTVIDPHLVNLIRENPRYTKMTPEEILGKFVSGRMMVKEARYVDDALNGPLSVYEPQPVALKATSSKEALPSKVAQVEAAGLNEDEMALIIKRFKTTFKERKEYPNKNKTRGKRSCFKCGKNGHFIAQCPDNENDQGQERHGMKEKKKSYRKAKGEAHLGKECDSDCSLSDSDDEGLAALAFDKSSFFPNERHTFLMAKEKKRKEMLSSELSVCHESVSSLKSLNDELNAKLEEVNKSSSCVEHVVICNRCKDFDVNSCDEHLISIAKLNDEVASLNAQLKTCKIDFDKLKFARDAYTIGRHPSIKDGLGFRKKAKNLTSXKAPIPNKEKGKAPMASSTQRNHAFIYNRKIASHSNYNRSYDHDAFDSHAMFASSSTFVHGLCIRGFKLDYRQRMHKPYDRGEEDVHLLRQEQGFL

SEQ ID NO: 10393 - protein, 431 aa, Zea mays
  unsure (1)..(431): unsure at all Xaa locations
  Clone ID: TF_ZmC4855_1.pep
MYKKVRRKSSLLKILLPIILCVLLLMLGALVWTCKSRGKRQKKRVQKRRMLEYLSSTDDAGDKNINFPFISFENIVTATDNFSESNLLGKGGFGKVYKGMLEGTKEVAVKRLSTGSGQGKEEFKNEVVLIAKLQHKNLVKLLGCCIHEDEKLLVYEYLPNKSLDYFLFGILKFQFLILLMMSNKXMSCVPADMPCFILFLLASARKSMLQWPTRFKIIQGVARGIMYLHHDSRLTVIHRDLKASNILLDKEMNPKISDFGMARIFSGDQLQANTNRVVGTYGYMSPEYAMKGAFSVKSDTYSFGVLILEIVSGLKISSPYLIMDFSNLITFAWNMWKDGKPEDFLDSSVTESCSLDEVSRCIHIGLLCAQDNPSCRPLMSTVVSMLENKATPLPTPKQPKDFALRDYNPGNEGVHRELSVNDTSLTMVEGR

SEQ ID NO: 10394 - protein, 168 aa, Zea mays
  unsure (1)..(168): unsure at all Xaa locations
  Clone ID: TF_6101958.pep
FHQGNGNKCFTCGNVGHYAKNCPRNQXRQMPAPNQDRGRKQKVQVRQGKLNFTTVEELPEGAPIMTGIFPVFNQPALILFDSSASHSFISXKFSIKCXLPFYHAKGSFLIATPGGKIATNQLNRNVPISLGSKIFKTTLLILGLEGMDIILGADWMTQHRVVLDVAAR

SEQ ID NO: 10395 - protein, 687 aa, Zea mays
  Clone ID: TF_ZmC14166_340.pep
MSGGHAKKEMVTGEKPATSHGKAPFGESGNKVKGSPSHDKSRQSGEKKKKMKKVVYYKTDSSSPSTSGSDTPSITYKRHERKKFSKIPLRYPHISKHTPLLSVPLGKPLIFDGEDYCMWSDKMRHHLTSLHASIWDIVEFGAHEPSVGDEGYDSDEVAQIQHFNSQATTILLASLSREEYNKVQGLKSTKEIWDVLKTAHEGDEVTKIIKREMIEAELGHFMLHQGEDPQAMYNRLKTLVNQVRNLGSTKWDDHEMVKVILRTLVFLNPTQVQLNRDPRYKLMSPEEVIGKFVSFELMIKCSKKIIEQGASSTPDVQPVAFKATEENKEDSTPSRVPIDASKLDNEEMTLIIKSFRQILKQRRGKDYKPRSKKVCYNCGKSGHFIAKCPLSSDSDRGDNKNGREKKRYYKKKGGDAHVCQEWDSDESSTDSSSDKDAANIAVTKGFLFPNVGHKCLMAKDGKKKKVHSRDTPKYTTSDDERSSNDNNDDLISLFANLTMDQKKKLNELIETINEKDDLLECQEDLLVKENKKFVKLKNAYALEVEKCENLSKELSICNDSISCLIDENASLNAKIEELNVCKPFPSIVEHVTICTRCRDINVVAIDDHLAMIKEQNDHIAKLNAKIVEHGLENENFKFAQSMLYNGRHPGIKDGIGFQQGSQSNTKLNAPKNKLSNFVKGKAPMVQD

SEQ ID NO: 10396 - protein, 1342 aa, Zea mays
  Clone ID: TF_ZmC74_151.pep
QYAQAFNDLCQYAGYHADSDEKKRDRFRRGLNTKLRERLNTVRADSFNELVNMAISQEDCIVAHWAEKKRKAPMAAPSAQAQRFRTVSHNQSRGFQQQAGRWVIRPPQQQQQLAPNRYPAPAPRNNQPPQQQQFRQGNGNKCFTCGNVGHYAKNCPRNQQRQMPAPNQDKGRKQKVQVRQGKLNFTALEEVPEGAPIMTGTFSVYNQPALILFDSGASHSFISQKFSANCKLPFSHSKGSFMIVTPGGKIATNQLNQSVPIQLGSHIVKTTLLVLGLENVDIILGANWMTLHQVVLDVASRTVEVNSPFCGNFTLILPSQGSSQSCAFSMTELPLKKIPVVCEYADVFPDELPGMPPDRDIEFAIELQPGTAPISKRPYRMPPAELAELKKQLQELLDKGFIRPSTSPWGCPALFVKKKDESLRLCIDYHPLNAVTIKNKYPLPRIDVLFDQLVGAKVFSKIDLRSGYHQIKIRASDIPKTAFSTRYGLYEFLVMSFGLTNAPAYFMYLMNSVFMPELDKFVVVFIDDILVYSKNEEEHAGHLHVVLQRLREHHLYAKLSKCDFWLKEIKFLGHTISQEGIVVDPDKVQEVMNWRPPTSVRQIRSFLGLAGYYRRFIPDFSRIAKPITELLKKEVKFAWSQKCEDAFHALRQHLTTAPVLAQPDSSKPFDVYCDASGTGLGCVLMQDNRVIAYASRALRPHEQNYPTHDLELAAVADLNMRQRRWLELIKDYDLEVHYHPGKANVVADALSRKLQCNCILMDSRVNTLCDELSKMQIEMIPSGSLSHISVEPALQDQIIMAQLSDKGVQIIKKNLHQKVEKYDCFRQDEKGVLWFKSRLVIPKDRDLKKKILDEAHLSKFSMHPGSTKMYHDLKLLYWWTRMKREIAQYVSECDTCQRVKASHLKSAGALRPLSVPSWKWDDISMDFIVGLPNTSRHHDLIWVIVDRLTKVAHFLPMHTTDKAQKYAELYIDRIVCLHGLPRTIVSDRGAQFVARFWEQLQESLGTKLIRSSAYHPQTNGQTERVNQILEDMLRACAIDCGKNWDKHLSLAEFAYNNSYQSSLKMAPFEALYGRRCRTPLNWSQPGEREVFGPDLVTEAERKVKLIRKNLEAAQARQKSYHDKRRKPLQFEVGSFVYLKVSPTKGVQRFGIKGKLAPRYIGPYEIVEACGPVAYKLKLPSKMSAIHSVFHVSQLKKCVRLPTEILAEPELEIEPDLSYQEYPSKILDCKERSTRAKSIKMFKVQWSNHSEEEATWETEEFLRSNFPDCLPKEAVVVESTYLARNLKKTIGKELKDCNLADGEYVLIPEQGPVQEEDQEQASEAAIEDLPAAPAVEGKPRFYA

SEQ ID NO: 10397 - protein, 1806 aa, Zea mays
  Clone ID: TF_ZmC74_196.pep
MNSPTPASGGDSRFSSDFLSRDGFPSILWEVLNSAGYPTPPMYTVQLYEEHRVPRCRVWLTLEAHPLQPGWRSLDSETIGLRTDDTVEAAAMKTLTTFCGYHPLEMVMHPLGLFPTEKKDDPMWCNRVSHVKDVWAMYPDLVGRVTVQCMSALYRLQALQSDAMTLLANTAQAAKLTLDSREDFVVDLSTELVEKDLQVERLSQRITTLEQQVEIRDNTIDVLENQLHDVQRELEEANDHLDMHHLEMEANEAGSEGEEAPEELGPAPGANGTTSAMPPSPMAARQRRGQNEQAPPPPPPAPTVQELMAQQNEILRQLLQRQPHQQHHGGGQHQRPPAMATYQEFLSTQPPLFTKAEDPLDADVWLRVVESKFPLLTGDCPDEAKARFAAQQLRGPARTWWDHFRAMLPADHEVSWEEFKTAFRGHHIPAGILDRKLNEFLALNQGTRTVLQYAQAFNDLCQYAGYHADSDEKKRDRFRRGLNTKLRERLNTVRANSFNELVNMAISQEDCIVAHRVEKKRKAPMAAPSAQAQRFRIVSHNQSRGFQQQAGRWVIRPPQQQQQPAPNRYPAPAPRNNQPLQQQQFRQGNGNKCFTCGNVGHYAKNCPRNQQRQMPAPNQDKGRKQKVQVRQGKLNFTALEEVPEGAPIMTGTFSVYNQPALILFDSGASHSFISQKFSANCKLPFSHSKGSFMIVTPGGKIATNQLNQSVPIQLGSHIVKTTLLVLGLENVDIILGANWMTLHQVVLDVASRTVEVNSPFCGNFTLILPSQGSSQSCAFSMTELPLKKIPVVCEYADVFPDELPGMPPDRDIEFAIELQPGTAPISKRPYRMPPAELAELKKQLQELLDKGFIRPSTSPWGCPALFVKKKDESLRLCIDYRPLNAVTIKNKYPLPRIDVLFDQLVGAKVFSKIDLRSGYHQIKIRASDIPKTAFSTRYGLYEFLVMSFGLTNAPAYFMYLMNSVFMLELDKFVVVFIDDILVYSKNEEEHAGHLHVVLQRLREHHLYAKLSKCDFWLKEIKFLGHTISQDGIAVDPDKVQEVMKWRPPTTVRQIRSFLGLAGYYRRFIPDFSRIAKPITELLKKEVKFVWSQKCEDAFHALRQHLTTAPVLAQPDSSKPFDVYCDASGTGLGCVLMQDNRVIAYASRALRPHEQNYPTHDLELAAVVHALKMWRHYLMGTHCNIFTDHKSLKYIFTQADLNMRQRRWLELIKDYDLEVHYHPGKANVVADALSRKLQCNCILMDSRVNTLCDELSKMQIEVIPSGSLSHISVEPALQDQIIMAQLSDKGVQIIKKNLHQKVEKYDCFRQDEKGVLWFKSRLVIPKDRDLKKKILDEAHLSKFSMHPGSTKMYHDLKLLYWWTRMKREIAQYVSECDTCQRVKASHLKSAGALRPLSVPSWKWDDISMDFIVGLPNTSRHHDSIWVIVDRLTKVAHFLPVHTTDKAQKYAELYIDRIVCLHGLPRTIVSDRGAQFVARFWEQLQESLGTKLIRSSAYHPQTDGQTERVNQILEDMLRACAIDCGKNWDKHLSLAEFAYNNSYQSSLKMAPFEALYGRRCRTPLNWSQPGEREVFGPDLVTEAERKVKLIRKNLEAAQARQKSYHDRRRKPLQFEVGSFVYLKVSPTKGVQRFGIKGKLAPRYIGPYEIIEACGPVAYKLKLPSKMSAIHSVFHVSQLKKCVRLPTEILAEPELEIEPDLSYQEYPSKILDCKERSTRAKSIKMFKVQWSNHSEEEATWETEEFLRSNFPDCLPKEAEDGIGTRALDTTKLGICLGFGQGDRPDFLAPYLLTGQPPFLSSGKRISARH

SEQ ID NO: 10398 - protein, 1448 aa, Zea mays
  Clone ID: TF_ZmC951_333.pep
MSGEHAKKEIMTGGDKSTSHRKAPSGESGNKMKGSPSHAKSHRSGDKKKKMKKVVYYETDSSSPSTSGSDTPSVTSKRHERKKFREEPQAMYNRIKTLVNQVRNLRSTKWDDHEMVKAILRSLVFCNPTQVQLIRGDPRYKLMCPEEVIGKFVSFELMIKGSKQIVEQGGTSTPEVQPVAFKVTEEKKEESTSSRLPIDASKLDNEEMALIIKSFCQILKQRKGRDYKPRSKKVCYKCGKTGHFIAKCPISSASDRGDDKKVRRKEKKKYYKKKGGDAHVCREWDSDESTTDSSSNEDAANIAVTKGLLFPNVGHKCLMAKDGKKKKVKSRASTKYTTSSDEGSSSEDEDDLLALFANLNMQQKEKLNELIGAIHEKDELLDSQEEFLIKENKKLVKVKNAYAQELEKCEKLISELSICHDTISNLRIENAKLIAKVEKLNVCDDSLVNLKNDNASLIAKIDKLNESISSLKIENDKLISKAKDLNVCNVSISNLRNENAMLHAKIDELNACKPSTSTVDHVSICMRCRDINVDAIYDHLALIKQQNDHITQLTSKINEHEIENEKFKFARSMLYNGRRPGINDGIGFQQGDNVKLNPPKILSNFVKGKDPMAQDNEGNILYPAGYPEHKIRRIHAKKTHSISHHAFMYKSEASSSRHSTHVKMPKKKSLVASNDHNISFKTFDASYVLTNKSGKIVAKYVGDKHKGCKTCVWVPKVYESKGSSWIIDSGCTNHMTGAKRMFSSYEKNEDAQRAITFGDGNQGLEKSQTQETLKGFLRRAQNEFGLRIKKIRSDNGTEFKNSQIEGFLEEEGIKHEFSSPYTPQQNGVVETKNRTLLDMVRTMLDEYKTPDRVFGSKCFILVKRGRKFKFAHKAVEGFLLGYDSNTRAYRVFNKSTGLVEVSCDIVFDETNGSQVEQASPPTQDEDQAQDDENEDQEDEPPQKEDNDQGGDNDDQDKEDGQEVQGQRPRHPRVHQAIQRDHPVNSILGDIHKGVTTRSRVAHFCEHYSFVSSIEPYRVEDTLRDSDWVLAMQEELNNFTRNELYQMDVKSAFLNGPIKEEVYVEQPPGFEDSEYPNHVYKLSKALYGLKQAPRAWYECLRDFLITNGFKVGKADPTLFTKTIANDLFVCQIYVDDIIFGSTNKSTCEEFSRIMIQKFEMSMMGELKYFLGFQVKQLQEGTFISQTKYIQDILTKFGMKDAKPIKTPMGTNVHLDLDTGGKSIDQKVYRSMIGSLLYLCASQPDIMLSVCMCARFQVDPKEVHLRAVKRILRYLVHTPKFGLWYPKGSTFDLIGYSDVDWAGCKIDRKSTSGTCQLLGRSLVSWASKKQNSVALSTVKAEYIAAGHYCAQLLWMRQTLRDYGYKLSKVPLLCDNESAICMVDNLVEHSRTKHIAIRYHFLRDHQQKGDIEIAYVSTKEQLADIFVKPLDEKTFTKLRNELNILDSRNFD

SEQ ID NO: 10399 - protein, 221 aa, Zea mays
  Clone ID: TF_ZM3970.C1.o1.fg.pep
MSGGHAKKEMVTGEKPATSHGKAPFGESGNKVKGSPSHDKSRQSGEKKKKMKKKIIEQGASSTPDVQPVAFKATEENKEDSTPSRVPIDASKLDNEEMTLIIKSFRQILKQRRGKDYKPRSKKVCYNCGKSGHFIAKCPLSSDSDRGDNKNGREKKRYYKKKGGDAHVCQEWDSDESSTDSSSDKDAANIAVTKGFLFPNVGHKCLMAKDGKKKKVVGDHN

SEQ ID NO: 10400 - protein, 833 aa, Zea mays
  Clone ID: TF_ZM4272.C5.o5.fg.pep
MKTLTTFCGYHPLEMVMHPLGLFPAEKKDDPMWCNCLTLDSREDFVVDLSSELVEKDLQVEKLSQRITTLEQQVEVRDNTIDVLENQLYDVQRELEEANDHLDMHHLEMEANEAGREGEEAPEELGPTPGANGTTSAMPPSPLLQRQPHPQQHGGGQHQRPPAVATYQEFLSTQPPLFTKVDDPLDADVWLRVVESKFPLLTGDCPDEAKSRFAAQQLRGPARTWWDHFRAMLPADREVSWEEFKTTFRGHHIPAGILDRKLNEFLALNQGTRTYAGYHADSDEKKRDRFRRGLNTKLRERLNTVRADSFNELVNLAISQEDCIVAHRTEKKRKAPMAAPSAQAQRFRIVSHNQSRGFQQQTGRWVIRPPQQQQPTPNRFLAPAPRNNQPPQQQQFRQGNGNKCFTCGNVGHYAKNCPRNQQRQMSAPSQDKGRKQKVQVRQGKLNFTTLEEVPEGAPIMTGIFSVYNQPALIMFDSGASHSFISQKFSAKCELPFSHSKGSFMIVTPGGKISTNQLNQSVPIQLGSHIVKTTLLVLGLENVDIILGANWMTLHQVVLDVASLTVEINSPFCGNFTLILLSQGSTQSCAFSMIELPLKKTPVVCEYADVFRDELPGMPPDRDIEFAMELQPGTTPISKRPYRMPPVELAELKKQLQELLDKGFIRPSTSPWGCPALFVKKKDESLRLCIDYRPLNAVTIKNKYPLPRIDVLFDQLVGAKVFSKIDLRSGYHQIKIRASDIPKTTFSTRYGLYEFLVMSFGLTNAPTYFMYLMNSVFMPELDKFIVVFIDDILVYSKNEEEHVGHLHVVLQRLREHHLYAKLSKCKTTESLLMP

SEQ ID NO: 10401 - protein, 1757 aa, Zea mays
  Clone ID: TF_ZM4326.C1.o11.fg.pep
MNSPTPASGGDSRFSSDFLSRDGFPSILWEVLNSAGYPTPPLYTVQLYEEHRVPRCRVWLTLEAHPLQPGWRSLDSETIGLRTDDTVEAAAMKTLTTFCGYHPLEMVMHPLGLFPAEKKDDPMWCNRVSHVKDVWAMYPDLVGRVTVQCMSALYRLQALQSDAMTLLANTAQAAKLTLDSREDFVVDLSTELVEKDLQVERLNQRITTLEQQVEIRDNTIDVLENQLHDVQRELEEANDHLDMHHLEMEANEAGSEGEEAPEELGPAPGANGTTSAMPPSPMAARQRRGQNEQAPPPPPPAPTVQELMAQQNEILRQLLQRQPHQQHHGGGQHQRPPAMATYQEFLSTQPPLFTKAEDPLDADVWLRVVESKFPLLTGDCPDEAKARFAAQQLRGPARTWWDHFRAMLPADHEVSWEEFKTAFRGHHIPAGILDRKLNEFLALNQGTRTVLQYAQAFNDLCQYAGYHADSDEKKRDRFRRGLNTKPRERLNTVRANSFNELVNMAISQEDCIVAHRAEKKRKAPMAAPSAQAQRFRIVSHNQSRGFQQQAGRWVIRPPQQQQQPAPNRYPAPAPRNNQPPQQQQFRQGNGNKCFTCGNVGHYAKNCPRNQQRQMPAPNQDKGRKQKVQVRQGKLNFTALEEVPEGAPIMTGTFSVYNQPALILFDSGASHSFISQKFSANCKLPFSHSKGSFMIVTPGGKIATNQLNQSVPIQLGSHIVKTTLLVLGLENVDIILGANWMTLHQVVLDVASRTVEVNSPFCGNFTLILPSQGSSQSCAFSMTELPLKKIPVVCEYADVFPDELPGMPPDRDIEFAIELQPGTTPISKRPYRMPPAELAELKKQLQELLDKGFIRPSTSPWGCPALFVKKKDESLRLCIDYRPLNAVTIKNKYPLPRIDVLFDQLVGAKVFSKIDLRSGYHQIKIRASDIPKTAFSTRYGLYEFLVMSFGLTNAPAYFMYLMNSVFMPELDKFVVVFIDDILVYSKNEEEHAGHLHVVLQRLREHHLYAKLSKCDFWLKEIKFLGHTISQDGIAVDPDKVQEMMNWKPPTTVRQIRSFLGLAGYYRRFIPDFSRIAKPITELLKKEVKFVWSQKCEDAFHALRQHLTTAPVLAQPDSSKPFDVYCDASGTGLGCVLMQDNRVIAYASRALRPHEQNYPTHDLELAAVVHALKMWRHYLMGTHCNIFTDHKSLKYIFTQADLNMRQRRWLELIKDYDLEVHYHPGKANVVADALSRKLQCNCILMDSRVNTLCDELSKMQIEVIPSGSLSHISVEPTLQDQIIMAQLSDKGVQIIKKNLHQKVEKYNCFRQDEKGVLWFKSRLVIPKDQDLKRKILDEAHLSKFSMHPGSTKMYHDLKPLYWWTRMKREIAQYVSECDTCQRVKASHLKSAGALRPLSVPSWKWDDISMDFIVGLPNTFRHHDSIWVIVDRLTKVAHFLPVHTTDKAQKYAELYIDRIVCLHGLPRTIVSDRGAQFVARFWEQLQESLGTKLIRSSAYHPQTDGQTERVNQILEDMLRACANDCGKNWDKHLSLAEFAYNNSYQSSLKMAPFEALYGRRCRTPLNWSQPGEREVFGPDLVTEAERKVKLIRKNLEAAQARQKSYHDRRRKPLQFEVGSFVYLKVSPTKGVQRFGIKGKLAPRYIGPYEIIEACGPVAYKLKLPSKMSAIHSVFHVSQLKKCVRLPTEILAEPELEIEPDLSYQEYPSKILDCKERSTRAKSIKMFKVQWSNHSEEEATWETEEFLRSNFPDCLPKEAGM

SEQ ID NO: 10402 - protein, 635 aa, Zea mays
  Clone ID: TF_ZM4326.C1.o12.fg.pep
MKTLTTFCGYHPLEMVMHPLGLFPAEKKDDPMWCNRVSHVKDVWAMYPDLVGRVTVQCMSALYRLQALQSDAMTLLANTAQAAKLTLDSREDFVVDLSTELVEKDLQVERLNQRITTLEQQVEIRDNTIDVLENQLHDMAARQRRGQNEQAPPPPPPAPTVQELMAQQNEILRQLLQRQPHQQHHGGGQHQRPPAMATYQEFLSTQPPLFTKAEDPLDADVWLRVVESKFPLLTGDCPDEAKARFAAQQLRGPARTWWDHFRAMLPADHEVSWEEFKTAFRGHHIPAGILDRKLNEFLALNQGTRTVLQYAQAFNDLCQYAGYHADSDEKKRDRFRRGLNTKLRERLNTVRANSFNELVNMAISQEDCIVAHRAEKKRKAPMAAPSAQAQRFRIVSHNQSRGFQQQAGRWVIRPPQQQQQPAPNRYPAPAPRNNQPPQQQHFRQGNGNKCFTCGNVGHYAKNCPRNQQRQMPAPNQDKGRKQKVQVRQGKLNFTALEEVPEGAPIMTGTFSVYNQPALILFDSGASHSFISQKFSANCKLPFSHSKGSFMIVTPGGKIATNQLNQSVPIQLGSHIVKTTLLVLGLENVDIILGANWMTLHQVVLDVASRTVESGFFSVVCFLYDGVAPEEDPSGL

SEQ ID NO: 10403 - protein, 1179 aa, Zea mays
  unsure (1)..(1179): unsure at all Xaa locations
  Clone ID: TF_ZM4448.C1.o5.fg.pep
MATYQEFLSTQPPLFTKAEDPLDADVWLRVVESKFPLLTGDCPDEAKARFAAQQLRDPARTWWDHFRAMLPADREVSWEEFKTAFRGHHIPAGILDRKLNEFLALNQGTRTVLQYAQAFNDLCQYAGYHADSDEKKRDRFRRGLNTKLRERLNTVRADSFNELVNMAISQEECIVAHRAEKKRKAPMAAPSTQAQSFQIVSHNQSRGFQQQAGRWVIRPPPQQQPAPNRFPAPAPRNNQPLQQQQFRQGNGNKCFTCGNVGHYAKNCPRNQQRQMPAPNQDKGRKQKVQVRQGKLNFTTLEEVPEGAPIMTGIFSVYNQPALILFDSGASHSFISQKFSAKCELPFSHSKGSFLIVTPGGKISTNQLNQSVPIQLGSHIVKTTLLVLGLENVDIILGANWMTLHQVVLDVASRTVEVNSLFCGNFTLILPSRGSTQSCAFSMTELPLKKIPVVCEYADVFPDELPGMPPDRDIEFAIELQPGTAPISKRPYRMPPAELAELKKQLQELLDKGFIRPSTSPWGCPALFLKKKDESLRLCIDYRPLNAVTIKNKYPLPRIDVLFDQLVGAKVFSKIDLRSGYHQIKIRASDIPKTAFSTRYGLYEFLVMSFGLTNAPAYFMYLMNSVFMPELDKFVVVFIDDILVYSKNEEEHVGHLHVVLQRMREHHLYAKLSKCDFWLKEIKFLGHTISQAGIVVDPDKVQEVMNWKPPTTVRQIQSFLGLAGYYRRFIPDFSRIAKPITELLKKEAKFVWSQKCEDAFHALRQHLTTALVLAQPDNSKPFDVYCDASGTGLGCVLMQDNRVIAYASRALRPHEQNYPTHDLELAAVVHALKMWRHYLMGTHCNIFTDHKSLKYIFTQADLNMRQRRWLELIKDYDLEVHYHPGKANVVADSLSRKLQCNCILMDSRINTLCDELSKMQIEVIPSGSLSHIFVEPALQDQIIMAQLSDKGVQFIKKNLHQKVEKYNCFRQDEKGVLGTKLIRSSAYHPQTDGQTERVNQILEDMLRACAIDCGKNWDEPLSLAEFAYNNSYQSSLRMAPFEALYGRRCRTPLNWSQPGERGVFGPDLVNEAERKVKLIRKNLEAAQARQKSYHDRRRKPLQFEVGSFVYLKPKKCVRLPTEIIAEPELEIEPDLXYQEYPSKILDSRERSTRAKSIKMYKVQWSNHSEEEATWETEEFL

SEQ ID NO: 10404 - protein, 1355 aa, Zea mays
  Clone ID: TF_ZM4550.C1.o14.fg.pep
MATYQEFLSTQPPLFTKAENPLNADVWLRIVESKFPLLTEDCPDEAKARFAAQQLRGSARTWWDHFCAMLPADREVSWEEFKTAFRGHHIPAGILDRKLNEFLVLNQGTRTVLQYAQAFNDLCQYVGYHADSDEKKRGRFRRGLNTKLRERLNTVRADSFNELVNMAISQEDCIVAHRAEKKRKAPMAAPSAQAQRFQIVSHNQSRGFQQQADRWVIRPPQQQQQPAPNRFPAPAPRNNQPPQQQQFRQGNGNKCFTCGNVGHYAKNCPRNQQRQMPAPNQDKGRKQKVQVRQGKLNFTTLEEVPEGAPIMIGIFSVYNQPALILFDSGASHSFISQKFSARCKLPFSHSKGSFMIVTPGAIHIVEVNSPFCGNFTLVLPSQGSTQSCAFSMTELPLKKIPVVCEYADVFPDELPGMPPDRDIEFTIELQPGTAPISKRPYRMPPAELAELKKQLQELLDKGFIRPSTSPWGCPALFVKKKDESLRLCIDYRPLNAVTIKNKYPLPRIDVLFGQLVGAKIKIRASDIPKTTFSTRYGLYEFLVMSFGLTNAPAYFMYLMNSVFMPELDKFVVVFIDDILVYSKNEQEHAGHLHVVLQRLREHHLYAKLSKCDFWLKEIKFLGHTISQAGIAVDPDKVQEVMNWKPPTTVRQIQSFLGLAGYYRRFIPDFSRIAKPITELLKKEVKFVWSQKCEDAFHALRQHLTTAPVLAQPDNSKPFDVYCDASGTGLGCVLMQDNRVIAYASRALRPHEQNYPTHDLELAAVVHALKMWRHYLMGTHCNIFTDHKSLKYIFTQADLNMRQRRWLELIKNYDLEVHYHPGKANVVADALSRKLQCNCILIYSRINTLCDELSKMQIEVIPSGSLSHISVEPALQDQIIMAQLSDKGVQIIKKNLHQKVEKYNCFRQDEKGVLWFKSRLVIPKDQDLKRKILDEAHLSKFSMHPGSTKMYHDLKPLYWWTRMKREIAQYVSECDTCQRINASHLKSAGALQPLSIPSWKWDDISMDFIVGLPNTSRHHDSIWVIVDRLTKVAHFLPVHTTDKAQKYAELYIDRIVCLHGLPRTIVSDRGAQFVARFWEQLQESLGTKLIRSSVYHPQTDGQTERVNQILEDMLRACAIDCGKNWDKHLSLAEFAYNNSYQSSLKMAPFEALYGRRCRTPLNWSQPGEREVFGPDLVTEAERKVKLIRKNLEAAQARQKSYHDRRRKPLQFEVGSFVYLKVSPTKGVQRFGIKCKLAPRYIGPYEIIEACGPVAYKLKLPSKMSAIHSVFHVSQLKKCVRLPTEIIAEPELEIEPDLSYQEYPSKILDCKERSTRAKSIKMYKVQWSNHSEEEATWETEEFLRSNFPDCLPREAGT

SEQ ID NO: 10405 - protein, 947 aa, Zea mays
  Clone ID: TF_ZM4641.C1.o4.fg.pep
MGNQKFAKSMMRRSYTFEVVISKSTYHIMHISYALHSLDCNLADGEYVLIPEQGPVQEEDQEQASEAAIEDLPAAPAIEGKPRYGGYKCGHCTAAAGVSGAVYAKAMNSPTPASGGDSRFSSDFLSRDGFPSILWEVLNSAGYPTPPLYTVQLYEEHRVPRCRVWLTLEAHPLQPGWRSLDSETIGLRTDDTVEAAAMKTLTTFCGYHPLEMVMHPLGLFPAEKKDDPMWCNRVSHVKDVWAMYPDLVGRVTVQCMSALYRLQALQSDAMTLLANTAQTAKLTLDSREDFVVDLSTELVEKDLQVERLSQRITTLEQQVEIRDNTIDVLENQLHDVQRELEEANDHLDMHHLEMEANEAGSEGEEAPEELGPAPGANGTTSAMPPSPMAARQRRGQNEQVPPPPPPAPTVQELMAQQNEILRQLLQRQPHPQQHGGGQHQRPPAMATYQEFLSTQPPLFTKAEDPLDADVWLRVVESKFPLLTGDCPDEAKARFAAQQLRGPTRTWWDHFRAMLPADREVSWEEFKTAFRGHHIPAGILDRKLNEFLALNQGTRTVLQYAQAFNDLCQYAGYHADFDEKKRDRFRRGLNTKLRERLNTVRANSFNELVNMAISQEDCIVAHRAEKKRKAPMAAPSAQAQRFRIVSHNQSRGFQQQAGRWVIRPPQQQQQPAPNRYPAPAPRNSQPLQQQFRQGNGNKCFTCGNVGHYAKNCPRNQQRQMPAPNQDKGRKQKVQVRQGKLNFTALEEVPEGAPIMTGTFSVYNQPALILFDSGASHSFISQKFSAKCKLPFSHSKGSFMIVTPGGKIATNQLNQSVPIQLGSHIVKTTLLVLGLENVDIILGANWMTLHQVVLDIASRTVEVNSPFCGNFTLILPSQGSTQSCAFSMTELPLKKIPVANTKPEGDLAVPANEAQAVISMRPTEEMKRINLGFADARRAAIINSSLDDK

SEQ ID NO: 10406 - protein, 405 aa, Zea mays
  Clone ID: TF_ZM4714.C6.o4.fg.pep
MSGGHAKKEMVTGEKPATSHGKAPFGESGNKVKGSPSHDKSRQSGEKKKKMKKVVYYKTDSSSPSTSGSDTPSITYKRHERKKFSYDSDEVAQIQHFNSQATTILLASLSREEYNKVQGLKSTKEIWDVLKTAHEGDEVTKIIKREMIEAELGHFMLHQGEDPQAMYNRLKTLVNQVRNLGSTKWDDHEMVKVILRTLVFLNPTQVQLNRDPRYKLMSPEEVIGKFVSFELMIKCSKKIIEQGASSTPDVQPVAFKATEENKEDSTPSRVPIDASKLDNEEMTLIIKSFRQILKQRRGKDYKPRSKKVCYNCGKSGHFIAKCPLSSDSDRGDNKNGREKKRYYKKKGGDAHVCQEWDSDESSTDSSSDKDAANIAVTKGFLFPNVGHKCLMAKDGKKKKVVGDHN

SEQ ID NO: 10407 - protein, 1662 aa, Zea mays
  Clone ID: TF_ZM5061.C1.o2.fg.pep
MKTLTTFYGYHPLEMVMHPLGLFPAKKKDDPMWCNRVSQVKDVWAMYPDLVGRVTVQCMSALYRLQALQSDAMALLANTAQTAKLTLDNREDFVVDLSTELVEKDLQVERLSQRITTLEQQVEIRDNTIDVLENQLHDVQRELEEANDHLDTHHLEMEANEAGSEGEEAPEELGPAPGAHGTTSAMPPSPEFLSTQPPLFTKAEDPLDADVWLRIVESKFPLLTGDCPDEAKARFAAQQLRGPARTWWDHFRAMLPADREVSWEEFKTAFRGHHIPAGILDRKLNEFLALNQGTRTVLQYAQAFNDLCQYAGYHADSDEKKRDRFRWGLNTKLQERLNTVRADSFNELVNMAISQEDCIVAHRAEKKRKAPMAAPSAQAQRFWIVSHNQSRGFQQQAGRWVIRPPQQQQPAPNRFPAPAPGNNQPPQQQQFRQGNGNKCFTCGNVGHYAKNCPRNQQRQMPAPNQDKGRKQKVQVRQGKLNFTTLEEVPEGAPIMTGIFSVYNQPALILFDSGASHSFISQKLSDKCELPFSHSKGVPIQLGSHIVKTTLLVLGLENVDIILGANWMTLHQVVLDVASRTVEVNSPFYGNFTLILPSQGSTQSCAFSMTELPLKKIPVVCEYADVFPDELPGMPPDRDIEFATELQPGTTPISKRPYRMPPVELAELKKQLQELLDKGFIRPSTSPWGCPALFVKKKDESLRLCIDYRPLNAVTIKNKYPLPRIDVLFDQLVEAKVFSKIDLRSGYHQIKIRASDIPKTTFSTRYGLYEFLVMSFGLTNAPAYFMYLMNSVFMPELDKFVVVFIDDILVYSKNEEEHAGHLHVVLQRLREHHLYAKLSKCDFWLKEIKFLGHTISQVGIAVDPDKVQEVMNWKPPPTVRQIRSFLGLAGYYRRFIPDFPRIAKPITELLKKEAKFVWRQKCKDAFHALRQHLTTAPVLAQPDNSKPFDVYCDASGTGLGCVLMQDNRVIAYASRALRPHEQNYPTHDLELAAVVHALKMWRHYLMGTHCNIFTDHTGLKYIFTQADLNMRQRRWLELIKDYDLEVHYHPRKANVVADALSRKLQCNCILMDSRINTLCDELSKMQIEVIPSGSLSHISVEPALQDQIIMAQLSDKGVQIIKKNLHQKVEKYNCFRQDEKGVLWFKSRLVIPKDQDLKRKILDEAHLSKFSMHPGSTKMYHDLKPLYWWTRMKREIAQYVLECDICQRIKASHLKSAGALQPLSIPSWKWDDISMDFIVGLPNTSRHHDSIWVIVDRLTKVAHFLPVHTTDKAQKYAELYIDRIVCLHGLPRTIVSDRGAQFVARFWEQLQESLGTKLIRSSAYHPQTDGQTERVNQILEDMLRACAIDCGKNWDKHLSLAEFAYNNSYQSSLRMAPFEALYGRRCRTPLNWSQPGEREVFGPDLVTKAERKVKLIRKNLEAAQARQKSYHDRRRKPLQFEVGSFVYLKVSPTKGVQRFGIKGKLAPRYIGPYEILEACGPVAYKLTLPSKMSTIHSVFHVSQLKKCVRLPTEIIAEPELEIEPDLSYQEYPSKILDCKERSTRAKSIKMYKVQWSNHSEEEATWETEEFLRSNFLDCLPKETVAKRMTFEEQFYLNNNNNHPFPISLTLRFTLGGLWPKSRDKIPLRGEGCDTSVSPRVSLKMPNQGPSFYVNQIKHEHQLT

SEQ ID NO: 10408 - protein, 879 aa, Zea mays
  Clone ID: TF_ZM5066.C9.o8.fg.pep
MKAINPVVKIDVATSCDDLSQGEQTSLHDELTEKVEVLTLDNQKLKRCLTDATTRGKVAIEKNDFNNELAADNERLKNESGIGYNAFVQKKTTTQYKPKQTHMPIKCFECGKEGHFAHNCKAKPPTPLPKHSRPFAFNAHYVLRKVANGKVNYKTDGSHWVIDSGCTQHMTGNPRMFTSLDENVDGQDKITFGDNSKGKVQGLGKVAISNDLSISNVLLVAPLSFNLLSVGQLCDLGLQCLFTPTEVIVSKWMMNQWRLAHVGMSTLKKVLKKDMVRGLKDVVFEKDKPCSACQAGKQVANTHPTKAFMSTSRPLELLHMDLFGPTNYVSVGGNHYYLVIVDDFSRYTWVFFLHDKSEVASIFKKFAKKAQNEFDCKIKKIRSDNGKEFDNTNIHEYCDEIGIKHEVSATYTPQQNGVVERKNRTLITLARTMIDEYNTPERFWAEADNTAWYASNRLFPHRLLAKTPYELLNGKKPDVSFRSKAYRVFNHATGVVEETYDVEFDEANGSQGAIENLDDVGDEPLREAMKNMPIGAIKPKEDEEEVQNIDRPSSSNVPQDDDKDERHANEDTFVSHEQARTLEKPPQDARIIGTKWVFRNKQDDQGLIVRNNARLVAKGFSQVEGLDFGETFAPVARLEAIHILLAYASCYDIKLYQMDVKSAFLNSFINELVYVEQPPGFEDPRYPNHAYRLSKALYGLKQAPRAWYERLRDFLIEKGFKIGTVDTTLFTKKHNSDIFICQVYVDDIIFGSTNDYHCKEFGELMSKEFEMSMIGELTYFLGFQVKQMKDGNFLSQEKYTKDLLKRFNMEKCKPIKTPMPTNGNLDLDEGGNPVNQTLYRSMIGSLLYLTASRPDIMFSVCMCARFQSNPKKAHLRAVK

SEQ ID NO: 10409 - protein, 204 aa, Zea mays
  Clone ID: TF_ZmC2309_2.pep
MATAAAMADDDDFASPPLAPRAREEGGGRGVYQVGGVPVEFPYKPYGTQLAFMGRVIATLDRARRQGRSHALLESPTGTGKSLSLLCSALAWQRHYPLRSPPASRYERGRDYGGGRAPRGGGGGGGGDRFKCGKPGHFARECPSGDGGRGDRYGGRDDRYGGGGGGGGGRYGSDRGGDRYSGRSRDGGSYGGGDRYSRDRSGPY

SEQ ID NO: 10410 - protein, 1727 aa, Zea mays
  Clone ID: TF_ZmC36592_155.pep
MTSHGSSNDGNALTHTDGLAREGFPRILWEVLQGAGYTTPPQYAVQQFEKHRVPRCRVWMTLEPHPLQPGWRSLDSESFGYRAEDTIEAIALHGLTTFCGFHPLELATHPIGLFPAEREDDPMWKDRVEHAKDIWAIYPGQTAHLTVRCMNALYHLQVMRGEAMSHLMALLEATKITLDNREELVVDLSQEMVEKDLQVEQLSTDIQELEELVGTRENTIEVLEDQLINTQQQLAEANEHLDMHHQEIQDQEANEDVDIEGGDEPASSVDTADVVLSMYMVFQMAGRQRRGQNERVPPPPPPPPTLQELMAQQNEILRQLAQRQPPPQHYGGGDHQRHPAAATYQEFLSTQPPLFTRAEDPLDADVWLRVVESKFPLLHGVCSEVTKVRFATQQLRGPARTWWDHFLAMQPEDREVEWREFKAAFRGHHIPAGIMDRKLNEFLALTQGNRTVLQYAQAFNDLCQYAGYHADTDEKKRDRFRRGLITKLRDRLNTVRANSYNELVNMAISQEDCITARQAEKKRKTPVAGPSAQPQRFRIVSDTQGRGPQQQQGRWVIRPQQQQQQAPNRTQFPAQRGNQQQQQYRQANDKRCFTCGNTGHYAKNCPRNQQRQGQNVNQNQGKRQKVQVRQGRLNFTTMADIPEGAPVMTGIFTVLNFPAIVLFDSGASHSFISAKFSAKCQFPFHHTDGGITISTPGGRVATYQINRQVPIKFGSLVIRTTLLILGLDSVDIILGTDWLTRHQAVLDIAARAIEIHSPAYGETVLYLPDQGCTRSCAFVMIESPVEKIPVVCDYPDVFPDELPGMPPDRDIEFAIELQPGTAPISKRPYRMPPAELAELKKQLQELLDKGFIRPSTSPWGCPALFVKKKDESLRMCVDYRPLNAVTIKNKYPLPRIDDLFDQLQGAKYFSKIDLRSGYHQLRIKEADIQKTAFVTRYGQYEFTVMPFGLTNAPAFFMNLMNKVFMEELDKFVVVFIDDILIYSKNREDHKRHLRIVLGKLRAHQLYAKLSKCEFWLEKIAFLGHILTAEGIEVDPSKVEAVSKWRQPTNVSEVRSFLGMAGYYRRFIKGFSSIARPMIELLKKDHKFVWTPKCEESFQIIKKKLTTAPVLSLPDIHQDFVVFCDASRQGLGCVLMQNERVIAYASRLLKPHEQNYPTHDLELAAIVHALKIWRHYLIGNKCHIFTDHKSLRYIFTQPDLNLLQRRWLELIKDYDLEIHYHPGKANVVADALSRKPFGIKGTNFLEDWKEESAQLNACLGNNDSLEVKPMLEDIICKAQHLDPETARLVEKARKEQLPDLRTDDQGVLWFKHRLCVPKGEAREVLLKEAHDSAYSIHPGTTKMYLDLKTRYWWKGMKKEIAQYVARCDICQRTKAEHQKPAGLLQPLPIPEWKWEEIGMDFVTGLPRTQKGNDSIWVIIDRLTKVAHFIPVKTTFGGATLARIYLKEIVRLHGIPRKIVSDRGTQFTSKFWTSLQKAMGTKLDFSTAYHPQIDGQTERVNKVLEDLLRACVLAFDRSWESSLPYAEFSYNNSYQSSIKMSPFEALYGRKCQTPLMWSNVGEKALEGPAFVKEAEEKVALIRRRLLEAQSRQKSYADNRRRELRFEEGDFVYLKVSPMRGVRRFQVKGKLAPRFVGPYPIIGKVGPAAYRLELPESMSDIHNVFHLSQLRKCLQAPESHLEEETVQIQKDLQYREKPVKILDSAVRKTRTSEVKLCKVQWSREGEEEAT

SEQ ID NO: 10411 - protein, 1980 aa, Zea mays
  Clone ID: TF_ZmC24054_2.pep
MRSRSRAALRRRSLALGRRSSSAATRQPSRPAVLPTAPAPAPSSGGIAAAATPVLTIASTSGLEAGEGNYHSFPLTVSPTKGDFCLQEQIKDALPHVFHSRRDKVPSDLDLQKHAATANGTSLLAASASAPKSTRKFYSETSSIGDPVDLLAPARIPVLEKRKWAVGSSPVFPPDCNEVDFNFNASNATSHQLAVDGGHDLRSYGRLHFGQHKADAPVLEEGGWSVVRPKFWWRKTVENLKRSPTQQQHDTKGTSTFKTKLQGKCYNCLSPDHFAFRCSALTRCWQCLHFGHRARACPGIYYRSRHNSTPPQPEPVQHSMQYTSNVNSRHQQHQRQLNSLLKEQKQAPEPVLNFSPVQHNKSYLRAAQEGQNMEARYPGDPRARPSRAFCAVSATGSIRRRRDDLISKAVVCSFDGNSHEVDTIVAGDMLREKFNLCHGQYQLVKHFPEQFFIIFPDARTKQWAIDRRSVSYRGREFHFGDWSEESYARKTSWEFRVKVRVEGIPVHCWGEEVASRALGRSCTIHYVQERSRRRERTRSFDLWAWCSDPCEIPKEVWLTVSEPDPELPPISTPLPLVGAHHAEPTDLKKGHVYTLRNHIEVVEDLCFIHGRNTRGGPMNRKPRREFVWSYGVSDSAGEKRERSEEFRGRETMRRDWDHDDDEDFHQHRHQGTRRQRSLSGWARSSRCRGGVEDCYSSSGRYRPSTPFRRRGMGMGQPGRWTPKIKNKKVSFADPVITAIWPTDVSKGHISAENSISLGGMDLGTQAMEEYQCSAHPKVSVPIASYSVNALIHSWSTRGTDSAPVPIISGSHLANETIQGDLCIQNVQVESNFSNSEPNSQRNVVANEDRQCILPTNEVPPIGHESSTHSTPRPLENQLNSNDRLQIFIESITNTPEPPLILSPPNSNTLATSPVLGGSDNLDANVTINAGTPAIQYQGSSASISNNHVNSFEQIEGLFSRPLNKDQMEWRNGYYPMNTNCCIFSWNVRGLNDPAKRESVRQTILSTHATLVCLQETKIMNWTNDLLKDTVGYKLAKQTAHLPSIGASGGILIACDEDFFDITPVTYASTYSLSVRLLELDLIGKKFTWSNEQDDPTMSRIDRLMATTEWHGLYPAANLQALCSMTSDHSPLLMQGHSPCNFYKGFRFESYWVHIDGFKDVVQQAWTTTVNSSDAILRLHVKMVRTAKALKAWRRRTVGNIKVQLAIIKIVLTMLEKAQENRTLSSEELDFRRRLKIKILGLAGIQLSIARQHSRQTWVRLGDANTNFFHLMANHRKRKNFIRSLNCGDCLLTSQEDKLREAHRHFLEILGTRGGRTSVVRWENLGYSPFELSELDTMINDDEIRNAVMGMHSEKAPGPDGFIGLFYKECFEVIREDLSKAINDFYHHKCKSLHLVNEANIVLLPKRENPDRIDLFRPISLINSCMKIITKIMATRLAPRMNEIVSTTQNAFIQKRSIHDNFLYVQKVIKKLHKSKQAALFVKLDISKAFDSLNWAYLLDVLKALGFTQKWRDWIATILGSSSSKIIINGQQTKEIKHMRGVRQGDPLSPFLFILAMDPLQRMIERAAHEGLLGQVLPNGAKFRCSLYADDAGVFVRADKLDLKVLKRILEAFEWCSGLKINFEKTEIFPIRYPESLWSNLMEVFPGKYSNFPGKYLGLPLHFRNIKRIEFQPLIEKINKRLAGWKDVDLFNASTIVTIGDGKMADFWRSSWIQGQAPKNIAPTLFMKAKRKNISVCQALTNNRWMHFCSPYTHEDEIKEFISLWQGSRVPCQSTGLRPDLNRGENGRKQPKAAVYFRTWRGHLQNLLGYALSVYCVYKMLKSLQSAVFKKSGSVDPVTITITIFLRHFDIGIDVALLSQYISLMFIGMLVVISVRGFLANVMKFFFASSRVGSRSTTNVVLVLSEIMARYFISSILLIRKSLANEYRYSGDHYCGVLGGDIQFDFYHRWFDAIFLASAFLSLLLISAQYTTRQTDKHPID

SEQ ID NO: 10412 - protein, 1766 aa, Zea mays
  Clone ID: TF_ZmC36592_119.pep
MTSHGSSDDGNALTHTDRLAREGFPRILWEVLQGAGYATPPQYAVQQFEKHRVPRCRVRMTLEPHPLQPGWRSLDSESFGYRAEDTIEAIALHGLTTFCGFHPLELATHPIGLFPAEKEDDPMWKDRVEHAKDIWAIYPGQTAHLTVRCMNALYRLQVMRGEAMSHLMALLEATKITLDNREELVVDLSQEMVEKDLQVEQLSTDIQELEELVGTRENTIEVLEDQLINTQRQLVEANEHLDMHHQEIQDQEANEDVDIEGGDEPASSVDTAGSGRPPSPESSMAERQRRGQNERVPPPPPPPPTLQELIAQQNEILRQLAQRQPPPQHYGGGDHQRHPAAATYQEFLSTQPPLFTRAEDPLDADVWLRVVESKFPLLHGACSEVTKVRFATQQLRGPARTWWDHFLAMQPEDREVEWREFKAAFRGHHIPAGIMDRKLNEFLALTQGNRTVLQYAQAFNDLCQYAGYHADTDEKKRDRFRRGLSTKLRDRLNTVRANSYNELVNLAISQEDCITARQAEKKRKTPVAGPSAQPQRFRIVSDTQGRGPQQQQGRWVIRPQQQQQAPNRTQFPAQRGNQQQQQYRQANDNRCFTCGNTGHYAKNCPRNQQRQGQNANQNQGKRQKVQVRQGRLNFTTMADIPEGAPVMTGIFTVSNFPAIVLFDSGASHSFISAKFSAKCQLPFHHTDGGITISTPGGRVATYQINRQVPIKFGSLVIRTTLLILGLDSVDIILGTDWLTRHQAVLDIAARAIEIHSPAYGETVLYLPDQGCTRSCAFVMIESPVEKIPVVCDYPDVFPDELPGMPPDRDIEFAIELQPGTAPISKRPYRMPPAELAELKKQLQELLDKGFIRPSTSPWGCPALFVKKKDESLRMCVDYRPLNAVTIKNKYPLPRIDVLFDQLVGAKVFSKIDLRSGYHQIKIRASDIPKTAFSTRYGLYEFLVMSFGLTNAPAYFMYLMNSVFMPELDKFVLVFIDDILVYSKNEDEHTEHLHIVLQRLREHHLYAKLSKCEFWLKEIKFLGHTISQDGISVDPEKVQEVMDWKPPTTVKQIRSFLGLAGYYRRFIPDFSRMAKPMTKLLKKGVKFEWSQKCEDAFHALRQHLTTAPVLAQPDSTKPFEVYCDASGTGLGCVLMQENRVIAYASRALRPHEQNYPTHDLELAAVVHALKIWRHYLMGAHCNIYTDHKSLKYIFTQADLNMRQRRWLELIKDYDLEVHYHPGKANVVADALSRKVQCNCMSMDVGVTTLCDELCKLNLEVVSSGDLSYISMEPTLQEQIVRAHVGDKGVQDPELRKKILDEAHLSKFSMHPGSNKMYHDLRSLYWWTRMKREIAKYISECDTCQRIKASHLKAAGPLQPLPIPSWKWEDICMDFIVGLPNTSRHHDSIWVIVDRLTKTAHFLPVHTTHRAEKYAEIYVDQIIRLHGIPKTIISDRGAPFVARFWEQLQESLGTHVIRSSAYHPQTDGQTERVNQILEDMLRACALHYGKDWDKCLSLAEFSYNNSYQSSLKMAPFEALYGRRCRTPLNWSQAGEREIFGPDLVLEAEAKVRVITKNLEAAQARQRSYHDKRRKPLQFEVGDHVYLKVSPTKGVQRFGIKGKLAPRYIGPYEIKASCGPVAYQLELPPHMSSVHNVFHVSQLRKCVRLPTEVLPEPAIEIEPDLSYQEYPVKVLDQKERSTRARSVRMYKVQWSHHSAEEATWETEDFLRSRFPDFLPKGVDCNLADGEYILVPEQGAAQEVAPDPAPEPAPEDLPATALEGKPRFYA

SEQ ID NO: 10413 - protein, 1517 aa, Zea mays
  Clone ID: TF_ZmC36592_137.pep
MAGRQRRGQNEHVPPPPPPPPTLQELMAQQNEILRQLAQRQPPPQHYGGGDHQRHPAAATYQEFLSTQPPLFTRAEDPLDADVWLRVVESKFPLLHGACSEVTKVRFATQQLRGPARTWWDHFLAMQPEDREVEWREFKAAFRGHHIPAGIMDRKLNEFLALTQGNKTVLQYAQAFNDLCQYAGYHADTDEKKRDRFGRGLSTKLRDRLNTVRANSYNELVNMAISQEDCITARQAEKKRKTPVAGPSAQPQRFRIVSDTQGRGPQQQQGRWVIRPQQQQQQAPNRNQFPAQRNNQQQQYRQANDNRCFTCGNTGHYAKNCPRNQQRQGQNANQNQGKRQRVQVRQGRLNFTTMADIPEGAPVMTCIFTILNYPAIVLFDSGASHSFISAKFSAKCQLPFHHTDGGITISTPGGRVATYQINRQVPIKFGSLVIRTTLLILGLDSVDIILGADWLTRHQAVLDIAARAIEIHSPAYGETVLYLPNQGCTRSCAFVMLESPVKEIPVVCAYPDVFPEELPGMPPDRDIEFAIELQPGTAPISKRPYRMPPVELAELKKQLQELFDKGFIRPSTSPWGCPALFVKKKDESLRMCVDYRPLNAVTIKNKYPLPRIDVLFDQLVGAKVFSKIDLRSGYHQIKIRASDIPKTAFSTRYGLYEFLVMSFGLTNAPAYFMYLMNSVFMPELDKFVVVFIDDILVYSKNEAEHTKHLHTVLQRLRDHQLYAKLSKCEFWLKEIKFLGHTISQDGISVDPEKVQEVMDWKPPTTVKQIRSFLGLAGYYRRFIPDFSRIAKPMTELLKKGVKFEWSRKCEDAFHTLRQHLTTAPVLAQPDNTKPFEVYCDASGTGLGCVLMQESRVIAYASRALRPHEQNYPTHDLELAAVVHALKIWRHYLMGAHCNIYTDHKSLKYIFTQADLNMRQRRWLELIKDYDLEVHYHPGKANVVADALSRKAQCNCMSMDVGVTTLCDELCKLNLEVVSSGNLSYISVEPTLQEQIVRAQVEDKGVQVIKDMIKQKTEKYKCFRQDSKGILWFGDRLVVPKDPELRKQILDGAHLSKFSMHPGSNKMYHDLRSLYWWTRMKREIAKYISECDTCQRIKASHLKAAGHLQPLPIPSWKWEDICMDFIVGLPNTSRHHDSIWVIVDRLTKTAHFLPVHTTHRAEKYAEIYVDQIVRLHGIPKTIISDRGAPFVARFWEQLQESLGTHVIRSSAYHPQTDGQTERVNQILEDMLRACALHYGKDWDKCLSLAEFSYNNSYQSSLKMAPFEALYGRRCRTPLNWSQAGEREIFGPDLVLEAEAKVRIIKKNLEAAQARQRSYHDKRWKPLQFEVGDHVYLKVSPTKGVQRFGIKGKLAPRYIGPYEIKEACGLIAYQVELPPHLSAVHNVFHVSQLRKCVRLPTEVLPEPDIEIEPDLSYQEYPVKVVDQKERSTRARSVRMYKVQWSHHSAEEATWETEDFLRSRFPDFLPKGVDCNLADGEYILVPEQGAAQEVAPDPAPESAPEDPPATALEGKPRFYA

SEQ ID NO: 10414 - protein, 1677 aa, Zea mays
  Clone ID: TF_ZmC36592_140.pep
MTSHGSSDDGNALSHTDGLAREGFPRILWEVLQGAGYMTPPQYAVQQFEKHRVPRCRVRMTLEPHPLQSGWRSLDSESFGYRAEDTIEAIALHGLTTFCGFHPLELATHPIGLFPTEREDDPMWKDRVEHAKDIWAIYPGQTAHLTVRCMNALYRLQVMRGEAMSHLMALLEATKITLDNREELVVDLSTEMVEKDLQVEQLSTDIQELEELVGTRENTIEVLEDQLINTQQQLAEANEHLDMHHQEIQDMEANEDVDIEGGEEPASSVDTAGSGRPPSPESNGREAASGQNERVPPPPPPPPTLQELMAQQNEILRQLAQRQPPPQHYGGGDHQRHPAAATYQEFLSTQPPLFTRAEDPLDADVWLRVVESKFPLLHGACSEVTKVRFVTQQLRGPTRTWWDHFLAMQPEDREVEWREFKAAFRGHHIPAGIMDRKLNEFLALTQGNRTVLQYAQAFNDLCQYAGYHADTDEKKRDRFRRGLSTKLHDRLNTVRANSYNELVNMAIFQEDCITARQAEKKRKTPVAGPSAQPQRFRIVSDTQNRGPQQQQGRWVIRPQQQQQQAPNRTQFPAQRTNQQQQQYRQANDNRCFTCGNTGHYAKNCPRNQQRQGQNVNQNQGKRQKVQVRQGRLNFTTMADIPEGAPVMTGIFTVLNYPAIILFDSGASHSFISAKFSAKCQLPFHHTDGGITISTPGGRVATYQINRQVPIKFGSLVIRTTLLILGLDNVDIILGADWLTRHQAVLDIAARAIEIHSPAYGETVLYLPGQGCTRSCAFVMIESPVEKIPVVRDYPDVFPDELPGMPPDRDIEFAIELQPEIAPISKRPYRMPPVELAELKKQLQELLDKGFIRPSTSPWGCPALFVKKKDESLRMCVDYRPLNAVTIKNKYPLPRIDVLFDQLVGAKVFSKIDLRSGYHQIKIRASDIPKTTFSTRYGLYEFLVMSFGLTNAPAYFMYLMNSVFMPELDKFVVVFIDDILVYSKNEAEHTKHLHTVLQRLRDHQLYAKLSKCEFWLKEIKFLGHTISQDGISVDPEKVQEVMDWKPPATVRQIRSFLGLAGIAKPMTELLKKGVKYEWSQKCEDAFHTLRQHLTTAPVLAQPDNTKPFEVYCDASGTGLGCVLMQENRVIAYASRALRPHEQNYPTHDLELAAVVHALKIWRHYLMGAHCNIYTDHKSLKCFEQKGPVQLYEHGCGSYHPIVRAQVEDKGVQVIKDMIKQKAEKYKCFRQDSKGILWFGDRLVVPKDPELRKKILDEAHLSKFSMHPGSNKMYHDLRSLYWWTRMKREIAEYISECDTCQRIKASHLKVAGPLQPLPIPSWKWEDICMDFIVGLPNTSRHHDSIWVIVDRLTKTAHFLPVHTTHKTEKYAEIYIDQIVRLHGIPKTIISDRGALFVARFCEKLQESLGTQVIRSSAYHPQTDGQTERVNQILEDMLRACALHYGKDWDKCLSLAEFSYNNSYQSSLKMAPFEALYGRRCRTPLNWSQAGEREIFGPDLVLEAEEKVRVITKNLEAAQARQKSYHDKRRKPLQFEVGDHVYLKVSPTKGVQRFGIKGKLAPRYIGPYEIKASCGPVAYQLELPPHMSAVHNVFHVSQLRKCVRLPTEVLPEPDLEIEPDLSYQEYPDKVLDQKERSTRARSVRMYKVQWSHHSAEEATWETKDFLRSHFPDFLPKGVGM

SEQ ID NO: 10415 - protein, 1708 aa, Zea mays
  Clone ID: TF_ZmC36592_141.pep
MTSHGSSDDGNALTHTDGLAREGFPRILWEVLQGAGYTTPPQYAVQQFEKHRVPRCRVRMTLEPHPLQPGWRSLDSESFGYRAEDTIEAIALHGLTTFCGFHPLELATHPIGLFPADKEDDPMWKDRVEHAKDIWAIYPGQTAHLTVRCMNALYRLQVMRGEAMSHLMALLEATKITLDNREELVVDLSQEMVEKDLQVEQLSTDIQELEELVGTRENTIEVLEDQLINTQQQLAEANEHLDMHHQEIQDQEANEDVDIEGGDEPASKDPLDADVWLRVVESKFPLLHGVCSEITKVRFATQQLRGPARTWWDHFLAMQPEDREVEWREFKAAFRGYHIPAGIMDRKLNEFLALTQGNRTVLQYAQAFNDLCQYAGYHADTDEKKRDRFRRGLSTKLRDRLNTVRANSYNELVNMAISQEDCITARQAEKKRKTPVAGPSAQPQRFRIVSDTQGRGPQQQQGRWVIRPQQQQQAPNRNQFPAQRNNQQQQYRQANDNRCFTCGNTGHYAKNCPRNQQRQGQNANQNQGKRQKVQVRQGRLNFTTMADIPEGAPVMTGIFTVLNYPAIILFDSGASHSFISAKFSAKCQLPFHHTNGGITISTPGGRVATYQINKNVPIKFGSLIIKTNLLILGLESVDIILGTDWLTRNQAVIDIAARAIEVHSPTCGGTTLYLPDQGCTRSCAFVMIESPVEKIPVVRDYPDVFPDELPGMPPDRDIEFAIELQPGTAPISKRPYRMPPAELAELKKQLQELLDKGFIRPSTSPWGCPASFVKKKDESLRMCVDYRPLNAVTIKNKYPLPRIDVLFDQLVGAKVFSKIDLRSGYHQIKIRASDIPKTAFSTRYGLYEFLVMSFGLTNAPAYFMYLMNSVFMPELDKFVVVFIDDILVYSKNEDEHTEHLHIVLQRLRDHHLYAKLSKCEFWLREIKFLGHTISQDGISVDPEKVQEVMDWKPPTTVKQIRSFLGLAGYYRRFIPDFSRIAKPMTELLKKGVKFEWSQKCEGAFHTLRQHLTTAPVLAQHDNTKPFEVYCDASGTGLGCVLMQENRVIAYASRALRPHEQNYPTHDLELAAVVHALKIWRHYLMGAHCNIYTDHKSLKYIFTQADLNMRQRRWLELIKDYDLEVHYHPGKANVVADALSRKAQCNCVSMDVGVTTLCDKLCKLSLEVVYSGNLSYISVEPTLQELIVMAQVEDKGVQVIKVMIRQKAEKYKCFRQDSKGILWFGDRLVVPKDPELRKKILDEAHLSKFSMHPGSTKMYHDLRSLYWWTRMKREIAKYISECDTCQRIKASHLKAAGPLQPLPIPSWKWEDICMDFIVGLPNTSRHHDSIWVIVDRLTKTAHFLPVHTTHKTEKYAEIYVDQIVRLHGIPKTIISDRGALFVARFWEKLQESLGTQVIRSSAYHPQTDGQTERVNQILEDMLRACALHYGKDWDKCLSLAEFSYNNSYQSSLKMAPFEALYGRRCRTPLNWSQAGEREIFGPDLVLEAEAKVRVITKNLEAAQARQRSYHDRRRKPLQFVVGDHVYLKVSPTKGVQRFGIKGKLAPRYIGPYEIKASCGPVAYQVELPPHMSAVHNVFHVSQLRKCVRLPTEVLPEPDIEIEPDLSYQEYPVKVLDQKERSTRARSVRMYKVQWSHHSAEEATWETEDFLRSRFPDFLPKGVDCNLADGEYILVPEQGAAKEVAPDPAPGPAPEDLPATALEGKPRFYA

SEQ ID NO: 10416 - protein, 1754 aa, Zea mays
  Clone ID: TF_ZmC36592_144.pep
MTSHGSSDDGNALTHTDGLAREGFPRILWEVLQGAGYTTPPQYAVQQFEKHRVPRCRVRMTLEPHPLQPGWRSLDSESFGYRAEDTIEAIALHGLTTFCGFHPLELATHPIGLFPAEREDDPMWKDRVEHAKDIWAIYPGQTAHLTVRCMNALYRLQVMRGEAMSHLMALLEATKITLDNREELMVDLSQEMVEKDLQVEQLSTDIQELEELVGTRENTIEVLEDQLINTQQQLAEANEHLDMHHQEIQDQEANEDVDIEGGDEPASSVDTAGSGRPPSPESSMAGRQRRGQNERVPPPPPPPPTLQELMAQQNEILRQLAQRQPPPQHYGGGDHQRHPAAATYQEFLSTQPPLFTRAEDPLDADVWLRVVESKFSLLHGACSEVTKVRFATQQLRGPARTWWDHFLAMQPEDREVEWREFKAAFRGHHIPAGIMDRKLNEFLALTQGNRTVLQYAQAFSDLCQYAGYHADTDEKKRDRFRRGLSTKLRDRLNTVRANRYNELVNMAISQEDCITARQAEKKRKTPVAGPSAQPQRFRIVSDTQGRGPQQQQGRCVIRPQQQQAPNRTQFPAQRNNQQQQQYRQANDNRCFTCGNTGHYAKNCPRNQQRQGQNVNQTQGKRQKVQVRQGRLNFTTMADIPEGAPVMTGIFTVLSYPAIILFDSSASHSFISAKFSAKCQLPFHHTNGGITISTPGGRVATYQINRQVPIKFGSLVIRTTLLILGLDSVDIILGADWLTRHQAVLDIAARAIEIHSPAYGETVLYLPNQGCTRSCAFVMLESPVEKIPVVCDYPDVFPDELPGMPPDRDIEFAIEWQPGTAPISKRPYRMPPAELAELKKQLQELLNKGFIRPSTSPWGCPALFVKKKDESLRMCVDYRPLNAVTIKNKYPLPRIDVLFDQLVGAKVFSKIDLRSGYHQIRIRASDIPKTAFSTRYGLYEFLVMSFGLTNAPAYFMYLMNSVFMPELDKFMVVFIDDILVYSKNEAEHTKHLHTVLQRLRDHQLYAKLSKCEFWLKEIKFLGHTISQDGISVDPEKVQEVTDWEPPTTVKQIRSFLGLAGYYRRFILDFSKIAKPMTELLKKGVKFEWGQKCEDAFHTLRQHLTTAPVLAQPDNTKPFEVYCDASGTGLGCVLMQENRVIAYASRALRPHEQNYPTHDLELAAVVHALKIWRHYLMGAHCNIYTDHKSLKYIFTQADLNMRQRRWLELIKDYDLEVHYHPGKANVVADALSRKAQCNCMSMDVGVTTLCDELCRLNLEVVSSGDLSYISVEPTLQEQIVRAQVEDKGVQVIKDMIKQKAEKYKCFRQDSKGILWFGDRLVVPKDPELRKQILDEAHLSKFSMHPGSNKMYHDLRSLYWWTRMKREIAKYVSECDTCQRIKASHLKAAGPLQPLPIPSWKWEGICMDFIVGLPNTSRHHDSIWVIVDRLTKTAHFLPVHTTHKIEKYAEIYVDQIVRLHGIPKTIISDRGALFVARFWEKLQESLGTQVIRSSAYHPQTDGQTERVNQILEDMLRACALHYGKDWDKCLSLAEFSYNNSYQSSLKMAPFEALYGRRCRTPLNWSQAGEMEIFGPDLVLEAEAKVRVITKNLEAAQARQRSYHDKRRKPLRFEVGDHVYLKVSPTKGVQRFGIKGKLAPCYIGPYKIKASCGPVAYQLELPPHMSAVHNVFHVSQLRKCVRLPTEVLPEPDIEIEPDLSYQEYPVKVLDQKERSTRARSVRMYKVQWSHHSAEEATWETEDFLRSRFPDFLPKGVGM

SEQ ID NO: 10417 - protein, 377 aa, Zea mays
  Clone ID: TF_ZmC36592_146.pep
MRTSTLREEMSLPPVWTLLAREDHLPPSRVLLRSLTRCPGFGTVVLSKYVVFQMAGRQRRGQNERVPPPPPPPPTLQELMAQQNEILRQLAQCQPPPQHYGGGDHQRHPAAATYQEFLSTQPPLFTRAEDPLDADVWLRVVESKFPLLHRACSEVTKVRFAAQQLRGPARTWWDHFLAMQPEDREVEWREFKAAFRGHHIPAGIMDRKLNEFLALTQGNRTVLQYAQAFNDLCQYAGYHADTDEKKRDRFRRGLSTKLRDRLNTVRANSYNELVNMAISQEDCITARQAEKKRKTPVAGPSAQPQRFRIVSDTQGRGPQQQQGRWVIRPPQQQQAPNRNQFPAQRNNQQQQYRQANDNRCFTCGNTGHYAKNCPRNQ

SEQ ID NO: 10418 - protein, 1595 aa, Zea mays
  Clone ID: TF_ZM4508.C4.o1.fg.pep
MAISQEDCITARQAEKKRKTPVAGPSAQPQRFRIVSDTQGRGPQQQQGRWVIRPQQQQQAPNRNQFPAQRNNQQQQYRQANDNRCFTCGNTGHYAKNCPRNQQRQGQNANQNQGKRQKVQVRQGRLNFTTMADIPEGAPVMTGIFTVLNFPAIVLFDSGASHSFISAKFSAKCQLPFHHTDGGITISTPGGRVATYQINRHVPIKFGSLIIKTTLLILGLDSVDIILGTDWLTRHRAVIDIAARAIEVHSPTCGETTLYLPDQGCTRSCAFVMIDSPVERIPVVCDYPDVFPDELPGMPPDRDIEFAIELQPGAAPISKRPYRMPPAELAELKKQLQELLDKGFIRPSTSPWGCPALFVKKKDESLRMCVDYRPLNAVTIKNKYPLPRIDVLFDQLVGAKVFSKIDLRSGYHQIKIRASDIPKTAFSTRYGLYEFLVMSFGLTNAPAYFMYLMNSVFMPELDKFVVVFIDDILVYSKNEDEHTEHLHIVLQRLRDHHLYAKLSKCEFWLKEIKFLGHTISQDGISVDPEKVQEVMDWKPPTTVKQIRSFLGLAGYYRRFIPDFSRIAKPMTELLKKGVKFEWSQKCEDAFHTLRQHLTTAPVLAQPDNTKPFEVYCDASGTGLGCVLMQESRVIAYASRALRPHEQNYPTHDLELAAVVHALKIWRHYLMGAHCNIYTDHKSLKYIFTQADLNMRQRRWLELIKDYDLEVHYHPGKANVVADALSRKTQCNCMGMDVGVTTLCDELCKLNLEVVSSGNLSYISVEPTLQEQIIRAQVEDKGVQVIKDMIKQKAEKYKCFRQDSKGILWFGDRLVVPKDPELRKKILDEAHLSKFSMHPGSTKMYHDLRSLYWWTRMKREIAKYISECDTCQRIKASHLKAAGPLQPLPIPSWKWEDICMDFIVGLPNTSRHHDSIWVIVDRLTKTAHFLPVHTTHRAEKYAEIYVDQIVRLHGIPKTIISDRGAPFVARFWEQLQESLGTHVIRSSAYHPQTDGQTERVNQILEDMLRACALHYGKDWDKCLSLAEFSYNNSYQSSLKMAPFEALYGRRCRTPLNWSQAGEREIFGPDLVLEAEAKVRVITKNLEAAQARQRSYHDKRRKPLQFEVGDHVYLKVSPTKGVQRFGIKGKLAPRYIGPYEIKEACGPVAYQVELPPHMSAVHNVFHVSQLRKCVRLPTEELPEPDLEIEPDLSYQEYPVKVLDQKERSTRARSVRMYKVQWGHHSAEEATWETEDFLRSRFPDFLPKGVDCNLADGEYILVPEQGAAQEWTLPLTRPETRSLIPVMVGTSAVTARRPVGVSEALYAKAMTSHGSSDDGNALTHTDGLAREGFPRILWEVLQGAGYTTPPQYAVQQFEKHRVPRCRVRMTLEPHPLQPGWRSLDSESFGYRAEDTIEAIALHGLTTFCGFHPLELATHPIGLFPAEKEDDPMWKDRVEHAKDIWAIYPGQTAHLTVRCMNALYRLQVMRGEAMSHLMALLEATKIMLDNREELVVDLSQEMVEKDLQVEQLSTDIQELEELVGTRENTIEVLEDQLLNTQQQLAEANEHLDMHHQEIQDQEDNEDVDIEGGDEPASSVDTAGSGRPPSPESSVASFAH

SEQ ID NO: 10419 - protein, 328 aa, Zea mays
  Clone ID: TF_ZM4508.C4.o2.fg.pep
MAGRQRRGQNERVPPPPPPPPTLQELMAQQNEILRQLAQRQPPPQHYGGGDHQRHPAVATYQEFLSTQPPLFTRAEDPLDADVWLRVVESKFPLLHGVCSEVTKVRFATQQLRGPARTWWDHFLAMQPEDREVEWREFKAAFRGHHIPAGIMDRKLNEFLALTQGNRTMLQYAQAFNDLCQYAGYHADTDEKKRDRFRRGLSTKLRDRLNTVRANSYNELVNMAFFPKRTALKLDKQRRRGRPPWGPQQQQGRWVIRPQQQQQAPNRNQFPAQRNNQQQQYRQANDNRCFTCGNTGHYAKNCPRNQQRQGQNANQNQGKRQKVQVRQI

SEQ ID NO: 10420 - protein, 741 aa, Zea mays
  Clone ID: TF_ZM4508.C5.o1.fg.pep
LSTQPPLFTRAEDPLDADVWLRVVESKFPLLHGVCSEVTKVRFATQQLRGPARTWWDHFLAMQPEDREVEWREFKAAFRGHHIPAGIMDRKLNEFLALTQGNRTVLQYAQAFNDLCQYAGYHADTDEKKRDRFRRGLSTKLRDRLNTVRANSYNELVNMAISQEDCIKARQAEKKRKTPVVGPSAQPQRFRIVSDTQGRGPQQQQGRWVIRPQQQQQAPNRNQFPAQRNNQQQQYRQANDNRCFTCGNTGHYAKNCPRNQQRQGQNANQNQGKRQKVQVRQGRLNFTTMADIPEGAPVMTGIFTVLNFPAIVLFDSGASHSFISAKFSAKCQLPFHHTDGGITISTPGGRVATYQINRHVPIKFGSLIIKTTLLILGLDSVDIILGTDWLTRHRAVIDIAARAIEVHSPTCGETTLYLPDQGCTRSCAFVMIDSPVERILVVCDYPDVFLDELPGMPPDRDIEFAIELQPGAAPISKRPYRMPPAELAELKKQLQELLDKALFVKKKDESLRMCVDYRPLNAVTIKNKYPLPRIDVLFDQLVGAKVFSKIDLRSGYHQIKIRASDIPKTAFSTRYGLYEFLVMSFGLTNAPAYFMYLMNSVFMPELDKFVVVFIDDILVYSKNEDEHTEHLHIVLQRLRDHHLYAKLSKCEFWLKEIKFLGHTISQDGISVDPEKVQEVMDWKPPTTVKQIRSFLGLAGYYRRFIPDFSRIAKPMTELLKKGVKFELSQKCVKDFHSRGSL

SEQ ID NO: 10421 - protein, 1444 aa, Zea mays
  Clone ID: TF_ZM4589.C1.o8.fg.pep
MAGRQRRGQNERVPPPPPPPPTLQELMAQQNEILRQLAQRQPPPQHYGGGDHQRHPAAATYQEFLSTQPPLFTRAEDPLDADVWLRVVESKFPLLHGVCSEITKVRFATQQLRGPARTWWDHFLAMQPEDREVEWREFKAAFRGHHIPAGIMDRKLNEFLALTQGNRTVLQYAQAFNDLCQYAGYHADTDEKKRDRFRRGLSTKLRDRLNTVRANSYNELVNMAISQEDCITARQAEKKRKTPVAGPSAQPQRFRIVSDTQGRGPQQQQGRWVIRPQQQQQQAPNRNQFPAQRNNQQQQYRQANDNRCFTCGNTGHYAKNCPRNQQRQGQNANQNQGKRQKVQVRQGRLNFTTMADIPEGAPILTGIFTVLNYPAIVLFDSGASHSFISTKFCAKCQLPFHHTNGGITISTPGGRVASYQICRHVPIKLGSLIFKTTLMIMGLDSVDIILGADWLTRHQAVMDIAARAIEVHSPTCGETTLYLRDRGCTRPCAFVMLESPVEKIPVVYDYPDVFPDELPGMPPDRDIEFAIELQPGTAPISKRPYRMPPAELAELKKQLQELLDKGFIRPSTSPWGCPALFVKKKDESLRMCVDYRPLNAVTIKNKYPLPRIDVLFDQLVGAKVFSKIDLRSGYHQIKIRASDIPKTAFSTIYGLYEFLVMSFGLTNAPAYFMYLMNSVFMPELDKFVVVFIDDILRLRDHQLYAKLSKCEFWLKEIKFLGHTISQDGISVDPEKVQEVMDWKPPTTVKQIRSFLGLAGYYRRFIPDFSRIAKPMTELLKKGVKFEWSQKCEGAFHTLRQHLTTAPVLAQPDNTKPFEVYCDASGTGLGCVLMQENRVIAYASRALRPHEQNYPTHDLELAAVVHALKIWRHYLMGAHCNIYTDHKSLKYIFTQADLNMRQRRWLELIKDYDLEVHYHPGKANVVADALSRKAQCNCVSMDVGVTTLCDELCKLNLEVVYSGNLSYISVEPTLQELIVRAQVEDKGVQVIKDMIKQKAEKYKCFRQDNKGILWFGDRLVVPKDPELRKKILDEAHLSKFSMHPGSNKMYHDLRSLYWWTRMKREIAKYISECDTCQRIKASHLKAAGPLQPLPIPSWKWEDICMDFIVGLPNTSRHHDSIWVIVDRLTKTAHFLPVHTTHKTEKYAEIYVDQIVRLHGIPKTIISDRGALFVARFWEKLQESLGTQVIRSSAYHPQTDGQTERVNQILEDMLRACALHYGKDWDKCLSLAEFSYNNSYQSSLKMAPFEALYGRRCRTPLNWSQAGEREIFGPDLVLEAEAKVRVLTKNLEAAQARQRSYHDRRRKPLQFVVGDHVYLKVSPTKGVQRFGIKGKLAPRYIGPYEIKASCGPVAYQVELPPHMSAVHNVFHVSQLRKCVRLPTEVLPELDIEIEPDLSYQEYPVKVLDQKERSTRARSVRMYKVQWSHHSAEEATWETEDFLLIVA

SEQ ID NO: 10422 - protein, 1547 aa, Zea mays
  Clone ID: TF_ZM4783.C4.o3.fg.pep
MTSHGSSDDENALTHTDGLAREGFPRILWEVLQGAGYTTPPQYAVQQFEKHRVPRCRVRMTLEPHPLQPGWRSLDSESFGYRAEDTIEAIALHGLTTFCGFHPLELATHPIGLFPAEKEDDPMWKDRVEHAKDIWAIYPGQTAHLTVRCMNALYRLQVMRGEAMSHLMALLEATKITLDNREELVVDLSQEMVEKDLQVEQLSTDIQELEELVGTRENTIEVLEDQLINTQQQLAEANEHLDMHHQEIQDQEANEDVDIEGGDEPASSVDTAGSGRPPSPESNGRKAAFRGHHIPAGIMYRKLNEFLALTQGNRTVLQYAQAFNDLCQYAGYHADTDEKKRDRFRRGLSTKLRDRLNTIRANSYNELVNMAISQEDCITARQAEKKRKTPVAGPSAQPQRFRIVSDTQGRGPQQQQGRWVIRPQQQQQQGPNRTQFPAQRGNQQQQQYRQANDNRCFTCGNTGHYAKNCPRNQQRQGQNVNQNQGKRQKVQVRQGRLNFTTMADIPEGAPVMTGIFTVLNYPAIVLFNSGASHSFISAKFSAKCQLPFHHTDGGITISTPGGRVATYQINRQVPIKFGSLVIRTTLLVLGLDSVDIILGADWLTRHQAVLDIATRAIEIHSPAYGKTVLYLPNQGCTRSCAFVMIESPVEKIPVVCDYPDVFPDELPGMPPDRDIEFAIELQPGTAPISKRPYRMPPAELAELKKQLQELLDKGFIRPSTSPWGCPALFVKKKDESLRMCVDYRPLNAVTIKNKYPLPRIDVLFDQLVGAKVFSKIDLRSGYHQIKIRASDIPKTAFSTRYGLYEFLVMSFGLTNAPAYFMYLMNSVFMPELDKFVVVFIDDILVYSKNEAEHTKHLHTVLQRLRDHQLYAKLSKCEFWLKEIKFLGHTISQDGISVDPEKVQEVMEWKPPATVKQIRSFLGLAGYYRRFIPDFSRIAKPMTELLKKGVKFEWSQKCEDAFHTLRQHLTIAPVLAQPDNTKPFEVYCDASGTGLGCVLMQESRVIAYASRALRPHEQNYPTHDLELAVVVHALKIWRHYLMGAHCNIYTSHKSLKYIFTQADLNMRQRRWLELIKDYDLEVHYHPGKANVVADALSRKAQCNCMSMDVGVTTLCDELCKLNLEVVSSGKLSYISVEPTLQEQIVRAQVGDKGVQVIKDMIKQKAEKYKCFRQDSKGILWFGDRLVVPKDPELRKKILDEAHLSKFSMHPGSNKMYHDLRSLYWWTRMKREIAKYISECDTCQRIKASHLKAAGPLQPLPIPSWKWEDICMDFIVGLPNTSRHHDSIWVIVDRLTKTAHFLPVHTTHRAEKYAEIYVDQIVRLHGIPKTIISDRGAPFVARFWEQLQESLGTHVIRSSAYHPQTDGQTERVNQILEDMLRACALHYGKDWDKCLSLAEFSYNNSYQSSLKMAPFEALYGRRCRTPLNWSQAGEREIFGPDLVLEAEAKVRVITKNLEAAQARQRSYHDKRRKPLQFEVGDHVYLKVSPTKGVQRFGIKGKLAPRYIGPYEIKEACGPVAYQVELPPHMSAVHNVFHVSQLRKCVRLPT

SEQ ID NO: 10423 - protein, 349 aa, Zea mays
  Clone ID: TF_ZM4853.C2.o5.fg.pep
MAGRQRRGQNERVPPPPPPPPTLQELMAQQNEILRQLAQRQPPPQHYGGGDHQRHPAAATYQEFLSTQPPLFTRAEDPLDADVWLRVVESKFPLLHGVCSEVTKVRFATQQLRGPARTWWDHFLAMQPEDREVEWREFKAAFRGHHIPAGIMDRKLNEFLALTQGNRTVLQYAQAFNDLCQYAGYHADTDEKKRDRFRRGLSTKLRDRLNTVRANNYNELVNMAISQEDCITARQAEKKRKTPVAGPSAQPQRFRIVSDTQGRGPQQQQGRWVIRPQQQQQAPNRIQFLAQRGNQQQQQYRQANDNRCFTCGNTGHYAKNCPRNQQRQGQNANQNQGKRQKVQFYQYQI

SEQ ID NO: 10424 - protein, 1470 aa, Zea mays
  unsure (1)..(1470): unsure at all Xaa locations
  Clone ID: TF_ZM4906.C5.o3.fg.pep
MTSHGSSDDGNALSHTDRLAREGFPRILWEVLQGAGYTTPPQYAVQQFEKHRVPRCRVRMTLEPHPLQPGWRSLDSESFGYRAEDTIEAIALHGLTTFCGFHPLELSTHPIGLFPVEREDDPMWKDRVEHAKDIWAIYPGQTAHLTVRCMNALYRLQVMRGEAMSHLMALLEATKITLDNRKELVVDLSTEMVEKDLQVEQLSNEIQELEELVGTRENTIEVLEDQLINTQQQLAEANEHLDMHRQEIQDMEANEDVDIEGGEEPASSLDTAGSGRPPSPESSMAGRARRGQNERVPPPPPPPPTLQELMAQQNEILRQLAQRQPPPQHYGGGDHQRHPAAATYQEFLSTQPPLFTRAEDPLDADVWLRVVESKFPLLHGVCSEVTKVRFATQQLHGPARTWWDHFLAMQPDDREGNRTVLQYAQAFNDLCQYAGYHADTDEKKRDRFRRGLSTKLCDRLNTVRANSYNELVNMAISQEDCITARQAEKKRKTPVAGPSAQPQRFRIVSDTQSRGPQQQQGRWVIRPEQQQQQAPNRTQFPAQGNNQQQQYRQANDNRCFTCGNTGHYAKNCPRNQQRQGQNVNQNQGKIQKVQVRQGRLNFTTMADIPEGAPVMTGLDSVDIILGADWLTRHQAVLDIAARAIEIHSPAYGETVLYLPDQGCTRSCAFVMIESPVEKIPVRPYRMPPAELAELKKQLQELLDKGFIRPSTSPWGCPALFVKKKDESLRMCVDYRPLNAVTIKNKYPLPRIDVLFDQLVGAKVFSKIDLRSGYHQIKIRASDIPKTAFSTRYGLYEFLVMSFGLTNAPAYFMYLMNSVFMPELDKFVVVFIDDILVYSKNGDEHTEHLHIVLQRLRDHRLYTKLSKCEFWLKEIKFLGHTISQDGISVDPEKVQEVMDWKPPTTVRIAKPMTELLKKGVKYDWSQKCEDAFHTLRQHLTTAPVLAQPDNTKPFEVYCDASGTGLGCVLMQDDKVIAYASRALRPHEQNYPTHDLELAAVVHALKIWRHYLMGAHCNIYTDHKSLKYIFTQADLNMRQRIWLELIKDYDLEVHYHPGKANVVADALSRKAQCNCMSIDARVTTLCDELCKLNLEVVSSGALSYISVEPTLQEQIVRAQIKDKGVQVIKDMIKQKAEKYKCFRQDNKGILWFGDRLVVPKDPELRKKILDEAHLSKFYMHPGSNKMYHDLRSLYWWTRMKREIAKYISECDTCQRIKASHLKAACPLQPLPIPSWKWEDICMDFIVGLPNTSRHHDSIWVIVDNLTKTTHFLPVHTTHRTEKYAEIYIDQIVRLHGIPRTIVSDRGAPFVARFWEQLQESLRTYVIRSSAYHPQTDGQTERVNQILEDMLRACVLHYGKDWDKCLSLAEFSYNNSYQSSLKMALFEALYGRRCRTPLNWSQAGEREIFGPDLVLEAEAKVRVIKKNLEAAQARQKSYHDKRRKPLQFEVGDHVYLKVSPTKGVQRFXIKGKL

SEQ ID NO: 10425 - protein, 1421 aa, Zea mays
  Clone ID: TF_ZM4995.C3.o8.fg.pep
MDPKGKGMVVNDKEKESIFNEPRDDKPTDSGSSHKKKDGKKKRRIKKIIYYDSDASSSSPKDDDDEDSSSKKKTVNQNYSFDYSRMLYNSNAHLLSIPLGKPPHFDGEDYSFWSHKMCSYLFSLHPSIWEIVENGMHFDNTDNAVFINEQIHKNAQATTVLLASLCRDEYNKVSGLDNAKQIWDTLEISHEGNDATMITKMELVEGELGRFTMIRAEEPTQTYNRLKALVNKIRSYGSTRWTDHDVVRLMLRSFTVIDPHLVNLIRENPRYTKMTPEEILGKFVSGRMMVKEARYVDDALNGTLPVYELQPVALKATSSREALPSKVAQVEAAGLNEDEMALIIKRFKTALKGRKEYPNKNKTRGKRSCFQCGKTGHFIANCPDNDSDQGQEKSEKKEKKKNYRKAKGEAHLGKEWDSDCSSFDSDDEGLAASAFNKSSLFPNERHTCLMAKEKKVCVRDTPKYTSSSDEESSDDEVDYSSLFKDKLLEKQEDILYEEHDKFISVQKSLALEIKRNEMLSSELSACHESVSSLRSLNDDLNAKLEEVNKSSSCVEHAVICNRCKDFDVDAYNEHIVSITKSSNEVASLNAQLKTCKDDFNKLKFVRDAYTIGRHPSIKDGLGFRKETKNLTSQKDHVLNKEKGKAPMVYASGGSSWIIDSRCTNHMTGEKKMFTSYVKNKDSQDTIIFGDGNQGKVKGLGKIAITNEHSISNVFLVGSLGYNLLYGGHVLGLTNVCFDKDRPCAACQAGKHVGSTHHSKNMMTTSRPLELLHMDLFGPVAYLSIGGSKYGLVIIDDFSRFTWVFFLQDKSETQGTLKRFLRRAQNEFELKVKKIRSDNGSEFKNLQVEEYLEEEGVKHEFSAPYTPQQNGVVDRKNTTLIHMARTMLGEFKMPERFWSEAVNTACHAINRLYLHHLLKKTSYELLTGNKPNISNFRVFGSKCYILVKKGRHSKFAPKAVEGFLLGYDSNTKAYRVFNKSSGLVEVSSDVVFDETNGSPREQVDLDDIDEDDVPKAAMRMMAIGDVRPQEQQEQDQPSSSTMVHPPTQDGKQEELNNFKRNEVWSLVPRPKQNIVGTKWVFHNKQDEHGVVTRNKARLMAKCYAQVAGLDFEETFAPVARLESIQILLSYVAHHSFRLFQMDVKSAFLNGPIKEEVYVEQPPGFEDDRYPDYVFKLSKALYGLKQAPRAWYECLRDFLIVNAFKVGKADPTLFTKTCDGDLSVCQIYVDDIIFGSTNQKSCEEFSRVMTQKFEMSMMGELTYFLGFQVKQLKDDTFISQTKYTQDLLKRFGMKDAKPVKTPMGTDGHVDLNKGGKSVDQKAYRSMIGSLLYLCASRPDIMLSVCMCARCKSDPKECHLVAVKRILRYLVSTPCFGIWYPKGSTFDLIGYSDSDYAGFKVDRKSTSGTCQFLGKSLVSWSSKK

SEQ ID NO: 10426 - protein, 341 aa, Zea mays
  Clone ID: TF_ZM4997.C1.o9.fg.pep
MWKDRVEHAKDIWAIYPGQTAHLTVRCMNALYHLQVMRGEAMSHLMALLEATKITLDNREELVVDLSQEMVEKDLQVEQLSTDIQELEELVGTRENTIEVVEDQLLNTQQQLAEANEHLDMHHQEIQDQEANEDVDIEGGDEPASNTDEKKRDRFRRGLSTKLRDRLNTVRANNYNELVNMAISQEDCITARQAEKKRKTPVAGPSAQPQRFRIVSDTQGRGPQQQQGRWVIRPQEQQQAPNRTQFPAQRSNQQQQQYRQANDNRCFTCGNTGHYAKNCPRNQQRQGQNVNQNQGKRQKVQVRQGRLNFTTMTDIPEGAPVMTGIFTVLNYPAIILFDSGA

SEQ ID NO: 10427 - protein, 214 aa, Zea mays
  Clone ID: TF_20507166.pep
SKFQRWDDNASGSSSGGTVHSYKEALLSSSSATSLELEVRTSTIARPKLCDKERRLCRREDLVPVDKEDGWQVVKSRKQSRCASARRGTSVNLRGRCFNCLSPNHLVASCRCPPRCFRCFKLGHQASRCPAIQAGPLQLKTPGRLRDRLEFDRSYPVGKRSVWHRLEEPGKRLSVFKRLSSHKVPPPAVQSWECCSSKEEEVSLGAYLSRTPNI

SEQ ID NO: 10428 - protein, 1763 aa, Zea mays
  Clone ID: TF_ZM5054.C12.o3.fg.pep
MDPKGKGIVINDKEKESFVNEPRDDKSNDSGSGHRRKDGKKKTRHIKEIVYYDSDESTSSQKDDDHNEYERKKPVNSNFSFDYSRIPQSTNAHLLSIPLGKPPHFDGEYYGFWSHKMRSHLFSLHPSIWEIVESGMHFDSTDSPMFINEQIHKNAQATTVLLASLCRDEYHKVSGLDNAKQIWDTLKISHEGNDVTLLTKMELVEGELGRFAMIRGEEPTQTYNRLKTLINKIRSYGSTRWTDHDVVRLMLRSFTVLDPHLVNNIRENPRYTKMSPEEVLGKFVSGRMMIKEARYVDDALNGPIHEPQPIALKATRSKEALPSKVAQVEAVGLNNEEMALIIKRFKTALKGRKGQTSKTKTKEKRSCFKCGKIGHFIAKCPDNESDQEKGNKREKKKHYKKAKGEAHIGKEWDSDCSSSDSDNEGLAATAFSKSSLFPNERHTCLMAREKKVSTHDTSTYASSSEDESSDDDEIDYSCLFKGLDRSKINKINELIDALNDKNRLLEKQEDLLYEEHDKFVSAQNSLALEIKRNEMLSSELSTCHESISKLKSVNDDLNAKLEIASKSTSCVEIVETCNRCKDFDIDACSEHLVSISKLNDELASLNAQLKTSKSNFDKLKFARDAYTIGRHPSIKDGLGYKKEAKNFTSHKAPISAKEKGKAPMASSEQKNHAFMYHDRRQSRNAYRRCNAYDAFDSHDMFASSSSYVHDRNVGYASGGSSWIIDSGCTNHMTGEKKMFTSYVKNKDSQDSIIFGDGNQGKVKGLVESLGYNLLSVSQLCNMGYNCLFTNVDVSVFRRSDGSLAFKGVLDGKLYLVDFAKEEAGLDACLIAKTSMGWLWHRRLAHVGMKNLHKLLKGEHVIGLTNVQFEKDRPCAACQAGKQVGGAHHSKNVMTTSRPLELLHMDLFGPVAYLSIGGCKYGLVIVDDFSRFTWVFFLQDKSETQGTLKRFLRRAQNEFELKVKKIRSDNGSEFKNLQVEEFLEEEGIKHEFSTPYTPQQNGVVERKNRTLIDMARTMLGEFKTPERFWSEAVNTACHAINRVYLHRLLKKTSYELLTGNKPNVSYFRVFGSRCYILVKKGRNSKFAPKAVEGFLLGYDSNTKAYRVFNKSSGLVEVSSDVVFDETNGSPREQVVDCDDVDEEDVPTAAIRTMAIGEVRPQEQDERDQPSSSTTVHPPTQDDEQVHQKEACDQGGAQDDHVMEEEAQPAPPTQVRAVIQRDHPVDQILGDISKGVTTRSRLVNFCEHYSFVSSIEPFRVEEALLDPDWVLAMQEELNNFKRNEVWTLVPRPKQNVVGTKWVFRNKQDEHGVVTRNKARLVAKGYAQVAGLDFEETFAPVARLESIHILLAYVAHHSFRLYQMDVKSAFLNGPIKEEVYVEQPLGFEDERYPDHVCKLSKALYGLKQAPRAWYECLRDFLIANAFKVGKADPTLFTKTCDGDLFVCQIYVDDIIFGSTNQKSCEEFSRVMMQKFEMSMMGELNYFLGFQVKQLKDGTFISQTKYTQDLLKRFGMKDAKPAKTPMGTDGHTDLNKGGKSVDQKAYRSMIGSLLYLCASRPDIMLSVCKCARFQSDPNECHLVAVKRILRYLVATPCFGLWYLKGSTFDLVGYSDSDYAGCKVDRKSTSGTCQFLGRSLVSWNSKKQTSVALSTAEAEYVAAGQCCAQLLWMRQTLRDFGYNLSKVPLLCDNESAIRMAENPVEHSRTKHIDIRHHFLRDHQQKGDIEVFHVSTENQLADIFTKPLDEKTFCRLRSELNVLDSRNLD

SEQ ID NO: 10429 - protein, 1259 aa, Zea mays
  Clone ID: TF_ZmC19623_3.pep
MRSSSSSGAEPESEPWGRAKRSSSSSGAEPESEPWVGQSGVRRLPGLSPSPSPGSGEAELPMALEDGLGCCQPHSAEWRSSRSGAGSAVLLSGRCFTCGNTGHYAKNCPRNQQRQGPNANQNQGNRQKVQVRQGRLNFTTMADISEGAPIMTGIFSVLNYPAIILFDSGASHSFISAKFSAKCQLPFHHTNRGITISTPGGRVATYQINKNVPIKFGSLIIKTNLLILGLDSVDIILGTDWLTKHQATMDIAARAIEVHSPTCGETTLYLPDQGCTRSCAFVMIGSPVERIPVVCDYPDVFSNELPWMPPDRDIEFAIELQPGTAPISKRPYRMPPAELAELKKQLQELLDKGFIRPSTSPWGCPALFVKKKDESLRMCVDYRPLNAVTIKNKYPPPRIDVLFDQLVGAKVFSKIDLRSGYHQIKIRASDIPKTAFSTRYGLYEFLVMSFGLTNAPAYFMYLMNSVFMPELDKFVVVFIDDILVYSKNEDEHTEHLHIVLQRLRDHHLYAKLSKCEFWLTEIKFLGHTISQDGISVDPEKVQEVMDWKPPTTVRQIRSFLGLAGYYRRFIPDFSRIAKPMTELLKKGVKFEWSQKCEDAFHTLRQHLTTAPVLAQPDNTKPFEVYCDASGTGLGCVLMQENRVIAYASRALRPHEQNYPTHDLELAAVVHALKIWRHYLMGAHCNIYTDHKSLKYIFTQADLNMRQRRWLELIKDYDLEVHYHPGKANVVADALSRKAQCNCMSMDVGVTTLCDELCKLNLEVVSSGDLSYISVEPTLQEQIVRAQVEDKGVQVIKDMIKQKAEKYKCFRQDSKGILWFGDRLVVPKDPELRKKILDEAHLSKFSMHPGSNKMYHDLRSLYWWTRMKREIAKYISECDTCQRIKASHLKAAGPLQPLPIPSWKWEDICMDFIVGLPNTSRHHDSIWVIVDRLTKTAHFLPVHTTHKTEKYAEIYVDQIVRLHGIPKTIISDRGALFVARFWEKLQESLGTHVIRSSAYHPQTDGQTERVNQILEDMLRACALHYGKDWDKCLSLAEFSYNNSYQSSLKMAPFEALYGRRCRTPLNWSQAGEREIFGPDLVLEAEAKVRVITKNLEAAQARQRSYHDKRRKPLQFEVGDHVYLKVSPTKGVQRFGIKGKLAPRYIGPYEIKATCGPVAYQLELPPHMSAVHNVFHVSQLRKCVRLPTEVLPEPDIEIEPDLSYQEYPVKVLDQKERSTRARSIRMYKVQWSHHSAEEATWETEDFLRSRFPDFLPKGVGM

SEQ ID NO: 10430 - protein, 685 aa, Zea mays
  Clone ID: TF_ZmC951_442.pep
MTMSSQEVTLELLLGDGSNYKSWSVSIYNAFMHIDPDLRQIFSRSIFPSNISKNPSNTELRCLSLNHHACNILVDSLSRGAYFAIMSSDSDLFVDAHDLWTRIKIKYSESNCTTSTPYVACGTNLSKGEEKRWQPNDESTSPTGLSSTSYKCLIANNDSGDESDDEEEYEDDSEDESSSPQGTFSCIASTNNNDRENETGDAEEEEIRRFYTNLNKEDKVLLVKLLSRNKEQGETLLRLEETLIKTNDSLEKMTKEHEELKCSHDNLVQRYESILFEQRNNHDVLSDVAQLKIENSMLRNKVELLSHDNLALTQKYDLLSCYHDNLLDRHIMLEVAHEVVITNLNSCELHSCTSTHSDISSPCANPCLSKESQCLNKHQAAGSQKKLCGNKKAKQLRRRRIAQPPQDIHGRMVKKLETGETAASVKLHKKDAPKAINEEINMNKEKGKNSISHVVCTDHLSMSSKSKKGRGKRRCFKCKELGHFIASCPHKDKDEGMRRCFGCNDKDHMITSCPLMKNQRRAPSKMTLTKQKDKQQVSSQVERRFCYMCGKHGHLPKSQGGKGKMSKKWSDQDLGTSTSRVIATRKGQDKGSDISVKELRLLRWKVHHNMVKIFMWFWRFKIGILMVNSETIDQAKDGGKKRFEVPSAREKVKETRIPKPGVKKKTCKVKVDRVKKSYGASRITT

SEQ ID NO: 10431 - protein, 183 aa, Zea mays
  unsure (1)..(183): unsure at all Xaa locations
  Clone ID: TF_LIB5117-011-Q1-PF1-F3.pep
RHAQFPAPAPNNRNTREAFAEEESRPAPRRCGWASILGHQPPPAPTTVAAAPPGATPVVCFNCGEEGHCQVECKQPPTCFKCKRMDHPTLLCPDQSTEXELMLFGYALDDLGFLQMDLSEPAATPSLTALVSALGGKTASPAIIMDELRHLFRPDWDWEVTPISDHDFTAVYPDLVSLRYHTH

SEQ ID NO: 10432 - protein, 935 aa, Zea mays
  Clone ID: TF_ZmC363_1.pep
MNPKGKGTVVNDKDKESFLNEPREDKPTDSGSNHKKKDGKKKRRIKKIVYYDSDESSSSQRDDDDEKKKSVNSNFSFDYSRIPFNSNAHLLSIPLGKPPHFDGEDYSFWSHKMCSHLFSLHPSIWEIVENEMLFDSTDNPVFINEQIHKNAQATTVLLASLCRDEYHKVSGLDNAKQIWDTLKISHEGNDATMITKMELVEGELGRFAMIRGEEPTQMYNRLKTLVNKIRSLGSTRWTDHDIVRLMLRSFTVLDPHLVNSIRENPRYTKMTPEEILGKFVSGRMMIKEARYIDEALNGPMPIYEPQTVALKATSSMEALPSKVAQVEAAGLNEDEMALIIKRFKIALKGRKEYSNKNKAKGKCSCFKCGKTGHFIAQCPDNENDQEDERHGKREKKKAYKKAKGEAHLGKEWESDCSSSDSDDEGLAASAFNKSSLFPNERHTCLMAKEKKVNARETPKYSTSSDEDSSDDEVDYTSLFKGLDRAKVEKINELIDALNEKDRLLERQEDILYEEHDKFVSVQKSLALEIKRNELLSSELSICNESISSLKILNDDLNAKLEVVNKSSPCVEHVVICNRCKDFNIDACVEHLNSIAKLNDEVESINAQLKTCKDDFDKLKLARDAYTIGRHPSIKDGLGFRREAKNLTSQRAPILNKEKGKAPMDSSSQKNHAFIYDRKFSRNAHYNRSYNAYDSHAMIVSSSSFVHSRNMPRNNVVHHVPRKMQNESATVFHACNTDFVLSCKNKKVVARKLGAKCKGDKTCIWVPKAIVTNLVGPNKSWVYASEGSSWIVDCGCTNQMTEEKKMFTSYVKNKDSKDSIIFGGGNQGKDKTETQGTLKRFLRRAQNEFELKVKTIRSDNGSEFKNLQVEEYLEEEGIKHDFSTPYTPQQNVKKGRNSKFAPKAVEGFLLDYDPSKMIGDTLKGIIVRDDSTILYS

SEQ ID NO: 10433 - protein, 1314 aa, Zea mays
  unsure (1)..(1314): unsure at all Xaa locations
  Clone ID: TF_ZM4793.C2.o5.fg.pep
MELVEGELGRFAMIRGEEPTQTYNRFKTLVNKIRSYGSTRWTDHDVVRLMLRSFNVIDPHLVNLIRENLKYIKMTPEEILGKFVSGSMMVKEARYVDDALNGPLPVYEPQPVALKATSSREALPSKVAQVEAVGLNEDEMALIIKRFKTALKGRKEYPNKSKAKGKCSCFKCGKTGHFIAQCPDNNNDQEQEKHGKREKKKAYKKAKGEAHLGKEWDLDCSSSDSDEEELAASAFNKSSLFPNERHTCLMAKEKKVSVRETPKYTTSSDDDSSDDEVDYTDSFKGLDRAKVDKINELIDALNEKDRLLEKQEGILYEEHDKFVSVQKSLALETKRNKMLSSELSVCHESISSLKILNNDLNVKLEVANKSSSCVEHVAISNRCKDFDVDACVEHLTSITKLNDKVASLNTQLKTCKNDFDKLKFARDAYTIGRHHSIKDGLGFRKEAKNLTSQKAPILAKEKGKGPMASSVQKNHAFLYNRKIASHXIGDMIMMLVYASGGSSWIIDSGCTNHMTGEKKMFTSYVKNKDSQDTIIFGDGNQGKVKEGAMADLDACLISKTSMGWLWHRRLAHVGMKNVHKLLKGEHVLGLTNVCFEKDRPSSGEQNGVVERKNRTLIDMARTMLGEXQTPERFWSEVVNTACHAINRLYLHRLLKKTSYELLTGNKPNVSYFRVFGSKCYILVKKCRHSKFAPKVVEGFLLGYDSNTRAYRVFNKSSGLVEVSSDIVFDENNGSPREQVDLDDIDEDDVPTAAMRAMAIGDVRPQEQQKQDQPSTSMMVQPXTQDDEQVPQEEACDQGGAQEEQXPFRVEEALQDPDWVLAMQEELNNFERNEVWSLVPRPKQNFVGTKWVFRNKQDEHGVVTRNKARLVAKGYAQVAGLEFEETFAPVARLESIRILLAYVAHHSFRLFQMDVKSAFLNGPIKEEVYVEQPPGFEDDRYPDHVFKLSKALYGLKQAPRAWYECLRDFLIANAFKVGKANPTLFTKTCDSDLFVCQIYVDDIIFGSTNQKSCEEFSRVMTQKFEMSMMGELTYFLGFQVKQLKDGTFLSQTKYTQDLLKRFGMKDAKPAKTTMGTDGHVDLKKGGKSVDQKAYRSMIGSLLYVCASRPDIMLSVCMCARFQSDPRECHLVAVKRILRYLVATPCFGIWYPKGSTFDLIGYSDSDYAGCKVDRKSTSGTCQFLGRSLVSWSSKKQTSVALSTTEAEYVAAGQCCAQLLWMRQTLSDFGYNLSKVPLICDNESAICMADNPVEHSRTKHIDIRHHFLRHHQQKGDIKVFYISTENQLADIFTKLLDEKTFCRLRSELNVLDLRNLD

SEQ ID NO: 10434 - protein, 1560 aa, Zea mays
  Clone ID: TF_ZM5106.C2.o13.fg.pep
MDPKGKGMVVNDKEKESVFNEPRDDKPTDSGSSHMKKDEKKKRDEYHKVSGLYNAKQIWDTLKISHEGNDATMITKMELVEGELGRSFTILDPHLVNSIRENPRYTKMTPEEILGKFVSGRIMIKEARYIDEALNATSSREALPSKVAQVEAAGLNKDEMALIIKRFKTALKGCKEYSNKNKAKGKCSCFKCGKTGHFIAQCPDNENDQGDERHGKRENKKVYKKAKGEAHLGKEWDSDCSSSDSDDEGLAASAFNKSSLFPNERHTCLMAKEKKVNAQETPKYSTSSDDDSSDDEVDYTSLFKGLDRAKVEKINELIDALNEKDRLLERQEDILYEEHDKFVSVQKSLALEIKRNELLSSELSICNESISSLKILNDDLNAKLEVVNKSSPCVEHVVICNRCKDFNVDVCDEHLISISKLNDEVASLNAQLKTCKSDFDKLKFARDAYTVGRHPSIKDGLGFKREAKNLTSQRAPIFNKEKGKAPMASNSQKNHAFIYDRKFSRNAHHNRSYNAYDSHAMIVSSSSFVHSRNMTRNNVVHHVPKKMQNKSATVFHACNTDFVLSCKNKKVVARKLGAKCKGDKTCIWVPKTIVTNLVGPNKSWVYASGGSSWIIDSGCTNHMTGEKKMFTSYVKNKDSQDSIIFGDGNQGKVKGLGKIAISSEHSISNVFLVESLGYNLLSVSQLCNTGYNCLFTNVDVSVFRRSDGSLAFKGVLDDKLYLVDFSKEEAGLDACLIAKTSIGWLWHRRLAHIGMKNLHKLLKGEHVLGLTNVTFKKDRPCAACQAGKQVGSSHHSKNVMTASRPLELLHMDLFGPVAYLSIGGSKYGLVIVDDFSRFTWVFFLQDKTETQGTLKRFLRRDQNEFELKVKKIRSDNGSEFKNLQVEEYLEEEGIKHEFFAPYTPQQNGVVERKNRTLIDMARTMLGEFKTPERFWSEAVNTACHAINRVYLHRLLKKTSYELLTGNKPNVSYFRVFGSKCYILVKKVRNSKFAPKAVEGFLLGYDSNTKAYRVFNKSSGLVEVSSDVVFDETNGSPREQVDLDDVEEDDVPTAAIRTMAIGDVRPQEQKEQDQPSSSTMVHPPTQDDEQIQAKQDLRIRTFATGRLGLASPPGWLVAARLPLAVWDWLSYSFVSFIEPFRVEEALLDPDWVLAMQEELNNFKRNEVWTLVPHPKQNIVGTKWVFRNKQDEHRVVTRNKARLVAKGYAQVAGLDFEETFAPVARLESIRILLAYVAHHSFRLFQMDVKSAFLNGPIKEEVHVEQPPSFEDERYPDHVCKLSKALYGLKQAPRAWYECLRDFLIANAFKVGKADPTLFTKTCDGDLFVCQIYVDDIIFGSTNQKSCEEFSRVMTQKFEMSMMGELNYFLGFQVKQLKDDTFISQTKYTQDLLKRFGMKDAKPAKTPMGTDGHVDLNKGGKSVDQKTYRSMIGSLLYLCASRPDIMLSVCMCARFQSDPRECHLVAVKRILRYLVATPCFGIWYPKGSTFDLIGYSDSDYARCKVDRKSTSGTCQFLGRSLVSWSSKKQTSVALSTAEAEYVAAGQCCAQLLWMRQTLRDFGY

SEQ ID NO: 10435 - protein, 1544 aa, Zea mays
  Clone ID: TF_ZmC951_321.pep
MSEELAKKEMETGDKPTTSHGKASSEESRNKEKRKEKKKENKTSSHKSHRSGDKIKKMRKVVYYETDTSSPSTSGSDAPSITSKRHERKKFSKIPLHYPRTYRHTPLLSVPLGKPPTFDGEDYARWSDLMKFHLTSLHKSIWNVVEFGVQVPSIGDEDYDSDEVAQIHHFNSQATTILLASLSREEYNKVQGLKSAKEIWDVLKTAHEGDEVTKITKRETIEGELGRFMLHQGEDPQAMYNRLKTLVNQVRNFGSEKWDDHEMVKVILRSLVFLNPTQVQLIRGDPRYKLMSPEEVIGKFESFELMIKGSKKIIEQGTSSTPEAQPVAFKATEEKKEESTSSRQPIDASKLDNEEMALVIKSFRQILKQRKGKDYKSRSKKVCYTCGKPGHFIAKCPISSDSDRGDDKKGRRKEKKKYYKKRGGDAHVCREWDSDESSSDSSDDEDAANIAVTKGLLFPNVGHKCLMAKDGKKKKVKSKSSTRYESSSDENASDEEDNLHTLFANLNMQQKEKLNELISAIHEKDDLLDSQEDFLIKENKKHVKVKNAYALEVEKCEKISSELSTCHETIDNLRNENANLLAKVDSNACNVSIPNLRNDNDDLLAKIEELNLSLVSLRNENEKLIATAKDFDVCNATISNLRSENDILHAKVVELKSCKPSTSIVEHVSICTRCKDVDINAIHDHMSLIKQQNDHIAKLDAKIAEHNLENEKIKFARSMLYNGRRPGIKDGIGFQRGDNVKLSAPPKRLSNFVKGKAPMPQDNEGYILYPAGYPESKIRRIHSRKSHSGPNHAFMYKGETSSSRQPTRAKLPKKRTPNASNDHDISFKTFNASYALTNKSSNVVAKFVGGKHKGSKTCVWVPKVLVSNAKGPKTVWEKSQTQETLKGFLRRAQNEFGLRIKKIRSDNGTEFKNSQIEGFLEEEGIKHEFSSPYTPQQNGVVERKNITLLDMARTMLDEYKTSDRFWAEAVNTACYAINRLYLHRILKKTSYELLTGKKPNISYFRVFGSKCFILVKRGRKSKFAPKTVEGFLLGYDSNTRAYRVFNKSSGQVEVSCDVVFDETNGSQVEQVDLDEIGIEEALCIALRNMSIGDVCPKESEEPPNAQDQPSSSTQASPPTQNEDEAQVDEVEDQANEPPQDDGNDQGGDANDQDKEDEEQRPPHPRVHQAIQRDHPVDTILGDIHKGVTTRSRVAHFCEHYSFVSSIEAHRVEEALQDSDWVVAMQEELNNFTRNEVWHLVPRPNQNVVGTKWVFRNKQDEHGVVTRNKARLVANGYSQVEGLDFGETYAPVARLESIRILLAYATYHGFKLYQMDVKSAFLNGPIKEEVYVEQPPGFEDSEYPNHVYKLSKALYGLKQAPRAWYECLRDFLITNGFKVGKAGPTLFTKTLENDLFVCQIYVDDIIFGSTNESTCEEFSRIMTQKFEMSMMGELKYFLGFQVKQLQEGTFLSQTKYTQDILSKFGMKDAKPIKTPMGTNGHLDLDEGGKSVDQKKEHIGDLPVLGKVLGVLGFKEAKFRSSFYRRSRVYCRRTFLRATTLDEANP

SEQ ID NO: 10436 - protein, 534 aa, Zea mays
  Clone ID: TF_ZmC14166_298.pep
MGIWWLRAINIPQPPQLQASKFSEVLIQYKNHAKREIVTGDKLASSGRTLSRESDNKHKEESSSSIKSHQRGDKKKEMKKVVYYKSTKYSKMPLRYPCISKRAPLLSVPLGKPPYFDGEDYSMWSDKMRHHLTSLHESIWNIVEFGAQVPMVGNEGYDSDEVAQIRHFNSQATTILLASLCRDEYNKVQGLKSVKEIWDVLKTAHEGDEVTKITKRKTIKGELGRFILNKGEEPQAMYNRLKTLVNQVRNLGSTKWDGHEMVKVILRTLVFRNPTQVQLIRGDPRYKQMSPDKLPPNPQAKRGKDYKPRSKRVCYKCGKPSHFIAKCPNSSDSDRGDDKKRKKKEKKRYYKKKGGDAHVCREWDFDESSTDPSADEDAANIAVNKGLLFPNVDHKCFMAKDGKKKKHGTKGKKLNELIEAIHEKDDLLESQEDFLIKENKKHVKLKNAYAQEVEKCENLTKELSVCHNSITSLRNENANLNAKIDELNICNESISSLRTENASLVSKVKELNVCNDSISCLRNENTILHAKIED

SEQ ID NO: 10437 - protein, 619 aa, Zea mays
  Clone ID: TF_ZmC4916_442.pep
MDPKGKGIVINDKEKESFINEPKDDKPTDSGSGHKCKDGKKKKTRRIKEIVYYDDSDESTSSQKDNDDNDYERRKPVNSNFSFDYSRIPQSTNAHLLSIPLGKPPHFDGEDYGFWSHKMRSHLFYLHPSIWEIVESGMKFDSSDSPMFINEQIHRNAQATTVLLASLCRDEYHKVSGLDNAKQIWDTLRISHEGNDVTLLTKMELVEGELGRFAMIRGEEPTQTYNRLKTLINKIRSYGSTQWTDHDIVRLMLRSFTVLDPHLVNNIRENPRYTKMSPEEVLGKFVSGRMMIKEARYVNDALNGPIHEPQPIALKATRSKEALPSKVAQVEAAGLNDEEMALIIKRFNTALKGRKGQPSKTKTKGKCSCFKCGKVGHFIANCPDNDSDQEQENKREKKKNYNKAKGEAHLGKEWDSDCSLSDSDNEGLAATAFNKSSLFPNEHHTCLMAREKKVSTHNTSTYASSSDEESSDDEVDYSCLFEGLDRTKVDKINELIDALNDKNRLLEKQEDLLYEEHDKFVEAQKSLALEIKGNEMLSCELSTCHDSISSLKSINDDLTAKLEIGNKSTSCVEHVAICNRCKDFNVDACSEHLVSISNLNDEVASLNAQLKTSKSVFTN

SEQ ID NO: 10438 - protein, 886 aa, Zea mays
  Clone ID: TF_ZM4578.C2.o8.fg.pep
MEWIRKTENFIDRAFALSRGTDVRCPCSMCRVCRCQDKRTLSGHLCKYGYMPNYEVWVYHSEELPRENVFEAHNNDDVEYDRMEEMLQDLREDPDFVFPPHSKELPPDVKKFFDLLKAAEEPLHEHTKVSILAFVTRLMAIKSKYVFSNNCYNELLILISEVFPPNHKMPKDVYQCRKLLSGLDGVETEEGRQVGNVDDEVETEEGRQVGDDDEVETEEGRQVGDDDEVETEEAETWWGCHDTGGFGHDSHSGWREWPEDASGWPRDGGSGVGGASGSREGEACGFGSGGVGGAWVDSSFTGTGRRRQVKKVLGNICRMKWPGLVIEDGKEVPVTRWDQYALAINAQHGNAQAAVWHDFWKHYKLPEGDTHTEHAHSVFHRNAASVVGDMMYYARIQHSIPWIAVNDAAWHALCRYWASVEFKAKSVRHSSNRGTESYHRYGGDDHFRLAKRMEASTGAVPSDVQIYLRGHRGPDPANPDVLYSQKATDRVAAYGEAMTSQHGPDYDWRTSPIDPQAVYASGGKAHGRYTMFANVIDSSQTPPATLPTHEQEDRLDFVDTLLNSGGIDGDRRPHLVNSCHKKVVEINKVQKKRKHPQTHASTKNKQRKETTGKISYAVTGTIPYDDAVIFGTLVIHTTIAIVLYDPRTTHSFISSQFATKYGIFKCPLRSRKTISTPEGKTLVNYICPKVSVKINGIDFPADLLVIETMGKDVILGKNWLQRTKAMMNPNGNEVNDADDNIPTLTTRNEKNESQRYLMNGMKNNKRNRKMFGYMISSSQPQAKAPKHMDTQTEESSQTQLHEIQTPNQPSPPVGQAKLTRKELKARGGCYYCKNEGHLIRECPKKRLDRIKKKAAKHDLSNNSEDPPFYKYDDEGRLVSIHFGAEK

SEQ ID NO: 10439 - protein, 1002 aa, Zea mays
  Clone ID: TF_ZM4622.C5.o3.fg.pep
MDPKGKGMVVDNNEKESIFNEPKDDKPTDSGSGHKRKDGKKKKTRRIKEIVYYDNDESSSSQKDDDDYEKKKTVNSNFSFDYSRIPQSTNAHLLSIPLGKPPHFDGEDYGFWSHKMCSHLFSLHPSIWEIVESGMHFDSTDSPMFINEQIHKNARATTVLLASLCRDEYHKVSGLDNAKQIWDTLKISHEGNDVTMLTKMELVEGELGRFAMIRGEEPTQTYNRLKTLVNKIRSYGSTRWTDHDVVRLMLRSFTVLDPHLVNNIRENPRYTKMTPEEILGKFVSGRMMIKEARYMDDALNGPINEPQPLALKATRSKETLPNKVAQIEAAGLNDEEMALIIKRFKTTLKGRKGQPSKTKTKGKRSCFKCGKLGHFIASCPDNDSDQDQGNKREKKKNYKKAKGKAHLGKEWDSDCSSSDSDNEGLAATAFNKSSLFPNERHTCLMAREKKVCTRNSTYASSSEDESSDEDEIDYSCLFKGLDRTKVDKINELIDALNDKNRLLEKQEDLLYEEHDKFVEAQKSHALEVKRNEMLSCELSSCHETISNLRNINDDLNAKLEIASKLTSCVEIVATCNRCKDFDIDACSEHLVSISKLNDELASLNAQLKTSKSEFDKLKFARDAYTIGRHPSIKDGLGFKREANNLTIHKVPIPAKEKGKAPMASSTKKNHAFMYHNTRHARNDYRSYDSHAMFASSSSYMHDRDMSRRYVHHVPRKNIVHVSRKVMDGPSTIYHALNASFTICRKDRKIVARKLGAKCKGDKTCIWVPKTIVTNLVGPNKSWGYASGGSSWIIDSGCTNHMTGEKKMFTSYVKNKDSQDSIIFGDGNQGKVKGLGKTAISNEHSISNVFLVESLGYNLLSVSQLCNMGYNCLFTNVDVSVFRRSDGSLAFKGVLDGKLYLVDFAKEEAGLDACLIAKTSMGWLWHRRLAHVGMKNFHKLLKGEHVIGLTNVQFEKDRPCAACQAGKQVGGAHHSKNVMTTSRPLELLHMDLFGPVAYLSIGG

SEQ ID NO: 10440 - protein, 215 aa, Zea mays
  Clone ID: TF_ZM4895.C2.o1.fg.pep
MDPKGKGIVINDKEKESFVNEPKDDKPTDSGSGHRRKEGKKKKTRRIKEIVYYDDSDESSSSQKDNDDNDYDKQKTATRSKEALPSKVAQIEAAGLNDEEMALIIKRFKTALKGRKGQPSKTKTKGKRSCFKCGRLGHFIANCPDNDSDQEHGSKREKKKYYKKAKGEAHIGKEWDSDCSSSDFDNEGLAATAFNKSSLFPNECHTCLMAREKKV

SEQ ID NO: 10441 - protein, 1703 aa, Zea mays
  Clone ID: TF_ZmC951_398.pep
MSGDHAKKEMETGEKPTTSYGSTSSEESRTKRREKKKSSSNKGKEKKSSSHHKEKKEKSSSHKPHRKGDKHKRMRKVVYYETDTSSTSTSDSDAPSVTSKRQERKKYSKIPLRYPRISKHTPLLSVPLGKPPTFDGEDYARWSDLMRFHLISLHKSIWDVVEFGAQVPSVGDENYDEDEVAQIEHFNSQATTILLASLSKEEYNKVQGLKNAKEIWDVLKTAHEGDELTKITKRETIEGELGRFRLQKGEEPQHMYNRLKTLVNQVRNLGSKKWDDHEVVNVILRSLIFLNPTQVQLIRGNPRYTKMTPEEVIGHFVSFECMIEGSRKINELGDPSEAQPVAFKATEEKKEEATPSRQPIDASKLDNEEMALVIKSFRQILKQRRGKDYKSRSKKVCYRCGKPGHYIAKCPISSDSDRGDDKKGRRKEKKRYYKKKGGDAHVCREWDSDESSSDSSDDEDAANIAVTKGLLFPNVGHKCLMAKDGKKKVKSKSSTKYESSSDDNASDEEDNLRSLFANLNIAQKEKLNELVSAIHEKDDLLDSQEDCLIKENKKHVKVKKAYALEVEKCEKLSSELSTCREIIDNLRNENAILNAKVDSHACDVSIFTPRDNNDDLITRIEELNISLTSLRIENEKLLAKAKDFDVCNTTISDLRTKNDILHAKVVELKSCKPSTSTIEHVSICTRCRDVDINAIHDHMVLIKQQNDHIAKLDAKIAEHNLENEKFKFARSMLYNGRRPGIKDGIGFQRGDNVKLNAPPKNLSNFVKGKALMPQDNEGYILYPASYPESKIRKIHSRKSHSGPNHAFMYKGETSRSRQPTHAKLPRKKTTNASNDHAISFKTFDASYVLTSKSGKVYASGGSSWILDSGCTNHMTGEKRMFSSYEKNKDPQRAITFGDGNQGLVKGVTVFRRSDDSIAFKGVLEGQLYLVDFDRAELDTCLIAKTNMGWLWHRRLAHVGMKNLHKLLKGEHILGLTNVHFEKDRICSACQAGKQVGTHHPHKNIMTTDRPLELLHMDLFGPIAYISIGGSKYCLVIVDDYSRFTWVFFLQEKSQTQETLKGFLRRAQNEFGLRIKKIRSDNGTEFKNSQIESFLEEEGIKHEFSSPYTPQQNGVVERKNRTLLDMARTMLDEYKTPDRFWAEAVNTACYAINRLYLHRILKKTSYELLTEGFLLGYDSNTRAYRVFNKSTGLVEVSCDVVFDETNGSQVEQVDLDEIGEEQAPCIALRNMSIGDVCPKESEEPPSTQDQPSSSMQASPPTQNEDEAQNDEEQNQEDEPPQDDSNDQGGDTNDQEKEDEEEPRPPHPRVHQAIQRDHPVDTILGDIHKGVTTRSRVAHFCEHYSFVSSIEPHRVEEALQDSDWVVAMQEELNNFTRNEVWHLVPRPNQNVVGTKWVFRNKQDEHGVVTRNKARLVAKGYSQVEGLDFGETYAPVARLESIRILLAYATYHGFKLYQMDVKSAFLNGPIKEEVYVEQPPGFEDSEYPNHVYRLSKALYGLKQAPRAWYECLRDFLIANGFKVGKADPTLFTKTLENDLFVCQIYVDDIIFGSTNESTCEEFSRIMTQKFEMSMMGELKYFLGFQVKQLQEGTFISQTKYTRDILAKFGMKDAKPIKTPMGTNGHLDLDTGGKSVDQKFISNQVIGILKGNWSLRRRQRLPLRNSYFAITPSNSLVFGGEMSIKEKDFILGGESKSSNAKGTSSLV

SEQ ID NO: 10442 - protein, 1664 aa, Zea mays
  Clone ID: TF_ZM4685.C3.o1.fg.pep
MDPKGKGMVVNNNEKESIFNEPKDDKPTDSGSGHKRKDGKKKKTRRIKEIVYYDSDESSSSQKDDDDYEKKKTVNSNFSFDYSRIPQSTNAHLLSIPLGKPPHFDGEDYRFWSHKMRSHLFSLHPSIWEIVESGMHFDSTDSPMFINEQIHKNAQATTVLLASLCRDEYHKVSGLDNAKQIWDTLKISHEGNDVTMLTKMELVEGELGRFAMIRGEEPTQTYTKMTPEEILGKFVSGRMMIKEARYVDDALNGPINEPQPLALKATRSKETLPSKVAQIEAAGLNDEEMALIIKRFKTTLKGRKGQPSKTKTKGKRSCFKCGKLGHFIVNCPDNDSDQDQGNKREKKKNYKKAKGEAHLGKEWDSDCSSSDSDNEGLVATAFNKSSLFPNERHTCLMAREKKVCTRNTTYASSSEDESSDEDEIDYSCLFKGLDRTKVDKINELIDALNDKNKLLEKQEDLLYEEHDKFIEAQKSHALEVKRNEMLSCELSSCHETISNLRSINDDLNAKLEIASKSTSCVENDVICNRCKDFDIDACSEHIASIAKLNDEIASLNAQLKTSKSEFDKLKFARDAYTIGRHPSIKDGLGFKREVKNLTSHKASISTKEKGKAPMARNAKKNHAFMYHDRKFSRNVHDDRSCNAYNAFDSHAMFASSSSYMHGRNVFRRNVVHHMHRRNVPRKVNEPSTIYHACDASFAICRKDRKDPTRDGYLSPKPKFALQVYASGGSSWIIDSGCTNHMTGEKKMFTSYVKNKNSQDSIIFGDGNQGKLSPLDIIYYLRSDGSLAFKGVLDGKLYLVDFAKEEAGLDACLIAKTSMGWLWHRRLAHVGMKNLHKLLKGEHVIGLTNVQFEKDRPCAACQAGKQVGGAHHNKNVMTTSRPLELLHMDLFEPVAYLSIGGSKYGLVIVDDFSRFTWVFFLQDKSETQGTLKRFLRRAQNEFELKVKKIRSDNGSEFKNLQVEEYLEEEGIKHEFSAPYTPQQNGVVERKNRTLIDMARMMLGEFKTPERFWSKAVNTACHAINRVYLHRLLKKTSYELLTGNKPNVSYFRVFGSKCYILVKKGRNSKFAPKAVEGFLLGYDSNTKAYRVFNKSSGLVEVSSDVVFDETNGSPREQVVDLDDVDEEDVPTATIRTMAIGEVRPQEQKEQDQPSSSTMVHPPTQDDEQIHQQEVCDQGGAQDDHVMEEEAQPAPPTQVRAMIQRDHPVDQILGDISKGVTTRSRLVNFCEHYSFVSSIEPFRVEEALLDPDWVLAMQEELNNFKRNEVWTLVPRPKQNVVGTKWVFRNKQDEHGVVTRNKARLVAKGYAQVAGLDFEETFAPVARLESIRILLAYAAHHSFRLFQMDVKSAFLNGPIKEEVYVEQPPGFEDERYPDHVCKLSKALYGLKQVKQLKDGTFISQMKYTQDLLKRFGMKDAKPANTPMGTDGHTDLNKGGKSVDQKAYRSMIPLAYRPCASRPDIMLSVCMCARFQSDPKECHLVAVKRILRYLVATPCFGLWYPKGSTFDLIGYSDSDYAGCKVDRKSTSGTCQFLGRSLVSWNSKKQTSVALSTAEAEYVAAGQCCAQLLWMRQTLRDFGYNLSKVPLLCDNESAIRMAENPVEHSRTKHIDIRHHFLRDHQQKGDIEVFHVSTENQLADIFTKPLDEKTFCRLRSELNVLDSQNLD

SEQ ID NO: 10443 - protein, 489 aa, Zea mays
  Clone ID: TF_ZM4548.C3.o10.fg.pep
MSGDHAKKEMETGEKPTTSHRSTSSEESRTKRKEKKDSSKGKEKKKDSSKGKEKKSSSHKEKKEKSSSHKPQRSGDKKKRMRKVVYYETDSSSTSTSGSDAASVTSKRQERKKYSKIPLCYPRISKHTPLLSVPLGKPPTFDGEDYARWSDLMRFHLTSLHKSIWDVVEFGAQVPSVGDEDYDEDEVAQIEHFNSQATTILLASLSREEYNKVQGLKNAKEIWDLLKTAHEGDELTKITKRETIEGELGRFRLRQGEEPQDMYNRLKTLVNQMCNLGSKKWDDHEVVKVILRSLIFLNPTQVQLIRGNPRYTLMTPEEVIENFVSFECMIKGSKKINELDDPSTSEAQPVAFKATEEKKEESTPSRQPIDASKLDNEEMALIIKSFRQILKQRKGKDYKSRSKKVCYKCGKSGHFIAKCPLSSDSDRDNDKKGKRREKKRYHKKRGGDAHVCREWDSDESSTDSSDDEDAANIVVTKGLLFPNVGHKCL

SEQ ID NO: 10444 - protein, 1386 aa, Zea mays
  unsure (1)..(1386): unsure at all Xaa locations
  Clone ID: TF_ZM4639.C2.o6.fg.pep
MTGGDKSASLGRTHSRESGHKHKEESSSSIKSQRRGDKKKKMKKVVYYETDSSSPSTSGSESASITSKRHERKQYSKMPLRYPCISKRTPLLSVPQGKPPFFDGEDYCMWSDKMRHHLTSLHKAYGTLLSMERRYKLMSHEEVIRKFVSFELMIKGSKQIVEQGGTSTPEVQPVAFKATEEKKEESTSSRLPIDASKLDNEEMALIIKSFRQILKQRRGKDYKPRSKKVCYKCGKSGHFIAKCPLSSDSDRGDDKKGERKEKKSSTDSSFDEDVANIAVNKGLLFPNVGHKCLMAKDGKRKNVKSRASIKYTTSSDEGSSSEDEDDLLTLFANLNMQQKEKLNELIGVIHEKDELLDSQEEFLIKENKKHVKVKNAYAQEVEKCENLTNELSICHDTVSNLRNENASLIAKVEKSNVCNDSIINLRNENANLIVKIDKLNESLSSLKNENDSLILKAKDLIVCNDSISCLRDKNVMLKSKIDELKSCKPSTSTVDHVSICMRCRDINVDAIHDHLALIKEQNDHIAQLTAKINEHKIENENFKFARSMLYNGRRPGINDGIGFQQGSNVKLNVPKRLSNFVKGKAPMAQDNKGYILYPAGYPEHKIRRIHARKSHSVSHHAFMYKNEASISRHSTHVKMPKKKTPTASNEPNVSFKTLDALYVLTNKSGKVVAKYVGGKHKGSKTCVWVPKVYASGGSSWIIDSGCTNHMTGEKRMFSCYEKNDDPQIAITFGDGNQGLEKSQTQETLKGFFRRAQNEFGLRIKKIRSDNETEFKNSQIEGFLEEEGIKHEFSSPYTPQQNGVVERKNRTLLDMARTMLDEYKSPDRFWAEAINTACYSINRLYLYRILKKTSYELLTGKKPNVSYFRVFDSKCFILIKRGRKSKFAPKVVEGFLLGYDSNTRAYRVFNKSTRLVEVSCDIVFDETNGSQVEQVDLDELDDEEALCVALRNMSIGXNVCPKESEEPPQAQDQPSSSMQASPPTQDEDQAQDNEEEDQEDESPQEEGNDQXGGDDNDQDKEDDQEVQGPRPPHPRVHQVIQRDHPVNSILGDIHKGPYMVEDALRDSDWVLAMQEELNNFIRNEWVFRNKQDEHGVVIRNKAQLVAKGYSQVEGLDFGETYALVARLESIHILLAYATYHGFKLYQMDVKSAFLNGPIKEEVYVEQPPGFEDSEYPNHVYKLSKAFYGLKQAPRACQTKYIQDLLTKFGMKDAKPIKTPMGTNGHLDLDTGGYSDADWAGCKIDRKSTSGTCQFLGRSLVSWASKKQNSVALSTAEAEYIVACHCCAQLLWMRQTLRDYGYKFSKVPLLCDNESAIRMADNPIEHNRTKHIAIRYHFLRDHQQRGDIEIAYVSTKEQLADIFTKPLDEKIFTKLRNELNNLDSRNFD

SEQ ID NO: 10445 - protein, 1445 aa, Zea mays
  Clone ID: TF_ZM4981.C1.o3.fg.pep
MYNRLKTLVNQVRNLGSKKWDDHEMVKVILISLVFLNPTQVQLIRGNPRYTLMSPKEVIGNFVSFELMIKGSRKINELDGPSMFEAQPVIFKATEEKKEESTSSRQPIDASKLDNEEMALIIKSFRQILKQRRGKDYKSRSKKVCYKCGKSGHFIAKCPLSSDSDRGDDKKGRRKEKKRYYKKKGGDAHICREWDSDESSTDSSSDEDAANIAVTKGILFPNVGHKCLMAKDGKRKKVKSRSSTKYETSSDEDNASDEEDNLRTLFANLNMQQKEKLNKLISDIHEKDDLLDSQEDFLIKENKKHVKVKNAYALEVEKCEKLSSELSTCHDVITNLRNENANLIAKVDSNVCDASIPNLTNDNVDLLAKIEELNISLASLRIKNEKLLAKAKELDVCNASTSNLRSENDILHAKIVELKTCKPSTSTVEHVSICTRCRDVDIDAIRDHMVLIKQQNDHIAKLDAKIAEHELENEKFKFARSMLYSGRRPGIKDGIGFQKGDNVKINAPPKRLSNFVKGKAPMPQDNEGYILYPAGYPESKIRRIHSRKSHSSPNHAFMYKGETSSSRQSTRAKLLRNKNPIASNDHNISFKVFDASYVLTNKSGKVYASGGSSWIIDSGCTNHMTGEKKMFSSYEKNHDPQRAITFGDGNQDSLDYNLLSVSQLCKMGYNCLFTDIGVTVFRRSDDSIAFKRVLEGQLYLVDFDRAELDTCLIAKTNMGWLWHRRLAHVGMKNLHKLLKGEHILGLTNVHFEKDRICSACQAGKQVGVHHPHKNIMTTDRPLELLHMDLFGPIAYISIGGSKYCLVIVDDYSRFTWVLFLQEKSHTQETLKGFLRRAQNEFGLRIKKIRSDNGTEFKNSQIEGFLEEEGIKHEFSSPYTPQQNGVVERKNRTLLDMARTVLNEYKTSDRFWAEAVNTACYAINRLYLHRILKKTSYELLTSKKPNISYFRVFGSKCFILVKRGRKSKFAPKTVEGFLLGYDSNTRAYRVFNKSSGQVEVSCDVVFDETNGSQVEQVDLDEIGDQEAPCIALRNMSNGDVCPKESKEPPNAQDQPSSSTQASPPTQDEDKAQNDDGEDQEIEPPQDDENDQGGDANDQDKEDEVPRPPHPRVHQAIQRDHPVDTIIGDIHKGVTTRSRVAHFCEHYSFVSSIEPHRVEEALQDSDWVVAMQEELNNFTRNEVWHLVPRPNQNVVGTKWVFRNKQDEHGVVTRNKARLVAKGYSQVEGLDFGETYAPVARLESIRILLAYATYHGFKLYQMDVKSAFLNGPIKEEVYVEQPPSFEDSEYPNHVYKLSKALYGLKQAPRAWSTNESTCEEFSRIMTQKFEMSMMGELKYFLGFQVKQLQEATFIRQTKYIQDILNKFGMKDAKPIKTPMGTNGHLDLDTGGKSVDQKKEHIGDLPVLGKILGVLGFKEAKFCSSFYRRSRVYCRMPLLRATTLDEANP

SEQ ID NO: 10446 - protein, 1071 aa, Zea mays
  Clone ID: TF_ZM4544.C6.o6.fg.pep
MDPKGKGMVVNDKEKDSIFNEPRDDKPTDSGSSHKKRDGKRKRRIKKIIYYDSDASSSSLRDDDNDDDSSSKRKTMELVEGELGRFMMIRGEEPTQTYNRLKTLVNKIRSYGSTRWTDHDVVQLMLRSFTVIDPHLVNLICENPRYTKMTPEEVLGKFVSRRMMVKEARYMDDALNGPLSIYESQPVALKATSSKEALPSKVAQVEAAVLNKDEMALIIKRFKTALKGRKEYSNKNKTRGNRSCFKCGKTDHFIAQCPDNDNDQGQEKSGKREKKNYRNAKGEAHLGKEWDSDCSSSDSNDEGLAASAFDKSSLFPNERHTCLMAKEKKVHIRDTPKYTSSSDEESSDDEVDYSDLFKGLDRAKVEKINELIDALNEKDRLLEKQEDILYEEHDKFVSVQKSLALEIKRNEMLSSELCACHESVSSLKNSNDELKAKLEEVNKTSSCVEHVFICNRCKDFDVDACDEHLASIAKLNDEVASLNAQFMTCKVEFDKLKFARDAYTVGRHPSIKDGLSFRKETKNLTSQRAPVLNKEKGKAPMASSSQKNHAYIYDRKYPRNAYNDKCYNHAAYNDSHAMFASSSTFAHGRSRPRRNYATSHASRKVCNGPTTVYHACDTSFVLSCKNTKVVARKLGSKCKGDKTCIWVPKAIVTNLVGPNTSWVYASRGSSWIIDSGCTNHMTGEKKMFTSYVKNKDSQDTFIFGDGNQGKVKGLGRIAITNEHSISNVFLVESLRRSDGSLAFKGVLDIKLYLVDFSRENAGLDACLIAKTNMGWLWHRRLAHVGMKNLHKLLKGDHVLGLTDVCFEKDRPCVACQEGKQDKSETQGTLKRFLRRAQNEFELKTPQQNGMVERKNRTLIDMARTMLREFKTPERFWSEAVNTACRAINRLYLHRLLKKTSYKLLTGNKPNLSYFHVFGSKCYIMVKKGRHSKFAPKTVEGFLLGYDSNTKAYRVFNKSSRLVEVSSDVVFDETNGSPREQVDLDDIDEDEVPTATMRTMAIGDVRPQELQEQDQPSSSTLVYPPTQDDVQVPQEEGQNQGGAQKEQVMEEEAPRVPPTQVQATIQRHHPVD

SEQ ID NO: 10447 - protein, 664 aa, Zea mays
  unsure (1)..(664): unsure at all Xaa locations
  Clone ID: TF_ZM4679.C2.o8.fg.pep
MTIEQMFMMQTQAVQAISQTLAVMQQVQQQPPPPQPPVQVQMPQVPRDKRAELMRGHPPXFAHSADPMDAEDWLXRGAAQSWWESYLATHANPEAINWEEFRDNFHRYHVPEGLMIVRKEVFLAPKQGPLSVSEYRDKFLQLSRYAPEDINTYAKRQYRFLRGLHLIDRAIMTERKRREMEDRKHKIGGPQAGSSSHPRYSGNSPQQFKQVHQHPRQHQPQYQRQFPQQQQQQYRQNTQPGGNQYQRQNNQAARLPAPATNQSSQAAPAQVGGRACFYCGEQNHWAKNCPKKAAQQPPTVNAPARQGAPHQAPGVRGQAYNREKVNHLEVKAIQDAQDVAVGMFPVKSDPTKVLFDTGATHSFVSASWVESHNIPIEPMIPPLRVNSVGGKVQSDRICPNLRIEIRGIDFPASLVVMGTQGFDVILGMNWLHRNQAIVSCDKRTVKLVSPSGKEVVTKLYLPELEEGACHHLSVDDNESNPIEAIRIVSEFPDVFPEELPGMPPKRKVEFAIELISGTAPISKKDYRVSGPELVELKKQIDELLEKGYIRPSTSPWAAPVLFVEKKDGTKRMCIDYRALNEVTVKNKYPLPRIEDLFDQLRGASVFSKIDLRSGYHQLKIRPADISKTAFITKYGLYEFMVMSFGLMNVKGKCALGPFLKYFGD

SEQ ID NO: 10448 - protein, 449 aa, Zea mays
  unsure (1)..(449): unsure at all Xaa locations
  Clone ID: TF_ZmC119_1217.pep
RSLTGRTRDVLCYXCKGYGHVQRDCPNQRVLVVKDDGGYSSASDLDEATLALLAADDAGTKEPPEEQIGADDAEHYESLIVQRVLSAQMEKAEQNQRHTLLQTKCVIKERSCRLIIDGGSCNNLASSDMVEKLALTTKPHPHPYHIQWLNNSGKVKVTKLVRINFAIGSYRDVGDCDVVPMDACNILLGRPWQFDSDCMNHGRSNQYSLIHHDKKIILLPMSPEAIVRDDVAKATKTKTENNKNIKVVGNNKDGIKLKGHCLLATKTDVNELFASTSVAYALVCKDALISIQDMQHSLSPVVTNILQEYSDVFPCEILEGLPPIRGIEHQIDLIPGASLPNRASYRTNPEETKEIQRQVQELLDKGYVRESLSPCVVPVILVPKKDGTWRMCVDCRAINNITIRYXHPIPRLDDMLDELSGAIVFSKVDLRSGYHQIRMKLGDEWKTAF

SEQ ID NO: 10449 - protein, 995 aa, Zea mays
  Clone ID: TF_ZM4945.C1.o3.fg.pep
MAQPKRMQEWEAERLICGDPVSALRPALEWAVQVKYFGCYTERPPATVTYQEFLSTQPPLLIKAEDPLDTDVWLHVVESKFPLLTGDYPDDTKTRFAAQQLRRPARTWWDHLCAMLPAGHEVSWEEFKTAFKGHHIPARILDHKLNDFLALNQGTHTVLQYAQAFNDLCQYTGYHVDSDEKKKDRFCRGLNTKLRERLNNVRADSFNELVNLAISQEDCIIAHRAEKKRKAPMNNQPQQHQQFRQGNGNKCFTCGSVGHYAKNCLKNQQRQMPAPNQDRGRKQKVQVRQGKLNLTTLEELPEGAHIMTSIFLVFNQPALILFDSGASHSFISQKFGAKCQLHFYHTKASFMIATLGGKIATNQLNRNVTISLGSKIIKTTLLILGLEGMDIILEADWMTQHRVVLDVAARTLEIRSPTFGDLALYLPSQDSTRSYAFAMIELPLKKILVVCEYADVFPDNLPGMPPDREIEFIIELQPGTTSISKRPYRMPPAELAELKKQLQELLDKGFIRPSTSPWGCPALLVKKKDEILRLCTDYHPLNAVTIKNKYHLPRIDVLFDQLVGAKMFSKINLRSGYHQIKIRASDILKTVFSTRYGLYEYLVMSFGLTNMPAYFMYLMNSIFMPELDKFVVVFIDDILVYTKNEEEHTGHLHIVLQRLREHRLYAKLLKNHKSLKYIFTQADLNMRQRRWLELIKDYDLEVHYHPVKANVVADALSRKSKCNYVMMDSRINTLCDELSKMKIEVIPSGALSHISVEPTLQDRIIMAQLSDKGVQIIKENLHQKPEKYKCFRQDGKGILWFGRRLVVRKNKDLKKKILDEAHLSKFSMHLGSTKMYHDLKPLYWWTGMKREIARYVSECDTCQRIKASHLKLAGALQPLSIPSWKWDDISMDFIVGLPNTSRHHDSIWVIVDRLTKVANFLPVHTTDKAQKYTELYIDQIVCLHGLPQTIVSDRGTQFVARFFDQLQESLGTKLMRSSAYHPQADCGGTSRIILA

SEQ ID NO: 10450 - protein, 219 aa, Zea mays
  Clone ID: TF_ZmC1373_22.pep
VLDSCQQLTVCGNYLRRIREVELKRDWKNKCYRCGESGHIERNCQNSPRNLRRDKSYSRSPSPRGGRGRSRSYSRSRSYSRSRSPSGSPRGGRRERDERRSRSLSYSRSASPRRSVSPAKEKERSRTPNGSRSPRSPSPRAEVSPPLKDNGARNGSDHEGNPGGGENSKRSRSPSDGYRSPVANGRSPSPRDDRSPSPKGNNEDDERRGSPRGSQSPLN

SEQ ID NO: 10451 - protein, 630 aa, Zea mays
  unsure (1)..(630): unsure at all Xaa locations
  Clone ID: TF_ZM3612.C3.o1.fg.pep
MDPKGKGIVINDKEKESFVNETKDDKPTDSGSGHKQKDGKKKTRHIKEIVYYDDSDESSSSQKDDDNDYEKKKTVNSNFSFDYSRIPHSSNAHLLSIPLGKPPHFDGEDYGFWSHKMCSHLFSLHPSIWDIVESGMKFDSSDSPLFINEQIHKNAQATTVLLASLCRDEYHKVSGLDNAKQIWDTLKISHEGNDVTMLTKMELVEGKLGRFAMIRGEEPTQTYNRLKTLVNKIRSYGSTRWTDHDVVRLMLRSFTVLDPHLVNNIRENPRYTKMSPEEILGKFVSRRMMIKEARYVDDALNGPIHEPQTVALKATRSKEALPSKVAQVEAAGLNEEEMALIIKRFKTALKGRKEHPNKNKTKGKCSCFKCGKIGHFIANCPDNDSDREKKSGKWEEKKNYKKAKGEAHLGKEWDSDCSSSDSDNEGLAATAFNKSSLFPNEHHTCLMAKEKKDLLYEEHDKFVSAQNSLALEVKRNEMLSCELSICHETISTLKGVNDDLNAKLEVANKSNSCVEHVMICNRCKDFNVDACSEHLVCIAKLNDEVASLNAQLKTSKSELDKLKFARDAYTIGRHPSIKDGLGFKREVQNLTSHKASIYAKEKGKAPMASSAQKNYAFMYHDRRHXRNGYR

SEQ ID NO: 10452 - protein, 1506 aa, Zea mays
  unsure (1)..(1506): unsure at all Xaa locations
  Clone ID: TF_ZM4913.C5.o4.fg.pep
MDPKGKGMMVNDKEKESFVIDPKDDKPTDSGTSHKRKDGKKKKTRRIKEIVYYDDSDESSSSQKNDDNDYEKKKMVNSNFSFDYSRIPQSSNTHLFSIPLVYGRVENGMHFDSTDSPMFINEQIHKNAQATTVLLASLCREEYNKVSGLDNAKQIWDTLKISHEGNDVTMLTKMELVEGEHGRFAMIRGEEPTQTYNRLKTLINKIRSYGSTRWTDHDVVRLLLRSFTVLDPHLVNNICENPRYTKMSPEEVLGKLVSGRMMIKEARYVDDALNGPIHEPQTMALKATRSKEALPSKVAQVEAVGLNEEEMSLIIKRFKTALKGRKEHPNKNKTKGKCSCFKCGKIGHFIANCPDNNSDQEQDKKREKKKAYKKAKGEAHLGKEWDSDCSSSDSDNEGLAASAFNKSSLFPNERHTCLMAKEKKVCTRNNTIYASSSDDESSDDDEIDYSSLFKGLDRNKIDKINELIDALNDKNRLLEKQEDILYEEHDKFVEAQKSLALEVKRNEMLSCELYTCHESISNLKSINDDLNAKLEVANRSNSCVEHVVICNRCKDFNVDACSEHLVSITKLNGEVASLNAQLKTSKDEFDKLKFARDAYTIGRHSSIKDGLGFKREAKNLTSHKAPIPAKEKGKAPMTNSCQKNHAFMYHDRKFSKNVHYDRSCNAYNSNAMIASSSSIMHNRNLTRKNVMPRRNVVHVPRKVNNEPSTIYHACNAAFAICRKDRKLIARKLGAKCKGDKTCIWVPKDIVTNLVGPNKSWVYASGGSSWIIDSGCTNHMTGEKKMFTSYVKNKDSQDSIIFDVSVFRRSDGSLAFKGVLDGKLYLVDFAKEEVDLVQLVKQDKSETQGTLKRFLRRAQNEFELKQNGVVERKNRTLIDMARTMLGEFKTPERFWSEAVNTACHAINRVYLHRLLKKTSYELLTGNKPNVSYFRVFGSKCYILVKKGRNSKFAPKAVEGFLLGYDSNTKAYRVFNKSSGLVEVSSDVVFDETNGSPREQVVDLDDVEEEEVPTAIIRTMAIGEVRPREQKEQDQPSSSTMVHPPTQDDEQPFRVEEALLDPDWVLAMQEELNNFKRNEVWTLVPRPKQNVVGTKWVFCNKQDEHGVVTRNKARLVAKGYAQVAGLDFEETFAPVARLESIRILLAYVTHHSFRLFQMDVKSAFLNGPIKEEVYVEQPPGFEDERYPDHVGKADPTLFTKTCDGDLFVCQIYVDDIIFGSTNQKSCEEFSRXVMTQKFEMSMMGELNYFLGFQVKQLKEXTFISQTKYTQDLLKWFGMKDAKPAKTPMGTDGHVNLNKRSRPDIMLSVCMCARFQSDPRECHLVAVKRILRYLVATRCFGIWYPKESTFDLIGYSDFDYAGCKVDRKSTSGTCQFLGRSLVSWSSKKQTSVALSTAEAEYVAAGQCCAQLLWMRQTLRDFGYNLSKVPLLCDNESAIRMADNPVEHSRTKHIDIRHHFLRDHKQKGDIEVFYVSTENQLADIFTKPLDESTFCRLRSELNVLDSRNLD

SEQ ID NO: 10453 - protein, 765 aa, Zea mays
  Clone ID: TF_ZmC31816_8.pep
MDQTSFMSGASAKREIGTGEKPATSHGKAPSGESANKVKGSPSHNKSRRSGDKKKKMKKVVYYETDSSSPSTSGSDTPSVTSKRHERKKFSEDPQAMYNRLKTLVNQVRNLGSAKWDDHEMVKVILRSLVFLNPTQVQLIRGDPRYTLMSPEEVIGKFVSFELMIKGSKKIIEQGDSSTPEAQTVAFKATEEKKEDSTPSRIPIDASKLDNEEMALIIKSFRQILKQRKGKDYKPRSKKVCYKCGKLGHFIAKCPLSSDSDRGDDKKGKRREKKRYYKKKGGDAHVCREWDSDESSIDSSSDEDAANIAVTKGLLFPNVGHKCLMAKDGKRKKVKSKSSTKYASSSDEDNSSDEEDNLRTLFANLNMQQKEKLNELISAIHEKDELLDSQEDFLIKENKKHVKVKNAYALEVEKCEKLSSELSTCHDIIANLRNENAKLIAKVDSNVKDDSNSNLRDDNVSLLAKIEELNVSLASLKNENEKLIAKANDLDVCNVTISNLRSENDILHAKIVELKSCKPSTSTVEHVSICTRCRDINVDAIHVHLALIKKQNDHIAQLNAKINEHDLENEKFKFARSMLYNGRHPGIKDGIGFQKGDNVKLNAPPKRLSNFVKVKAPMPQDNEGYILYPVGYPEHKIRRIHSRKSHSGPNHAFMYKGETSSSRQSTRAKLPKKKTPIASNDSNISFKTFDASYVLTNKSGKVYASGGSSWIIDSGCTNHMTGEKKMFSSYEKNQDPQRAITFRDGNQDIGFTVFRRSDDSIAFKG

SEQ ID NO: 10454 - protein, 1171 aa, Zea mays
  Clone ID: TF_ZM4892.C1.o13.fg.pep
MTPEKVIGNFVSFELMIKGSKKINELDGPSMSEAQPIVFKATEEKKEESTPSRTPIDASKLDNEEMALIIKSFRQILKQRRGKDYKPRSKKVCYKCGKLGHFIAKCPLSSDSDRGDDKKGRRKEKKRYYKKKGGDAHVCREWDSDESSTDSSDEDAANIAVTKGLLFPNVGHKCLMAKDGKKKKVKSRSSTKYETSSDEDDASNEEDNLRILFANLNMQQKEKLNELISAIHEKDDLLDTQEDFLIKENNKHVKVKNAYALEVEKCEKLSSELSTCHDTIANLRNENAQLISKAKDFDGCNVTIFNLRSENDILHAKVIELKSCKPSTSTVEHVSICTRCRDVDIDAIHDHMVLIKQQNDHIAKLDAKIAEHELENEKFKFARSMLYSGRRPGIKDGIGFQKGDNVKLNAPPKKLSNFVKGKSPMPQDNEGYILYPTGYPESKIRRVHSRKSHSGPNHAFMYKGETSSSRQSTHAKLPKKKTPNASNDHSISFKTFDASYVLTNKSGKVYASGGSSWIIDSGCTNHMTGEKKMFSSYKKNQDPQRAITFGDGNQGLVKGVTVFRRSDDSIAFKGVLEGQLYLVDFDKAELDTCLIAKTNMGWLWHRRLAHVGIKNLHKLLKGEHILGLTNVHFEKDRICSACQARKQVGVHHPHKNIMTTDRSLELLHMDLFGPIAYISIGGSKYCLVIVDDYSRFTWVFFLQEKSHTQETLKGFLRWAQNEFGLRIKKIRSDNGTEFKNSQIEGFLEEEGIKHELSSPYTPQQNGVVERKNKTLLDMARTMLDEYKTSDRFWVEAVNTACYAINRLYLHRILKKTSYELLTGKKPNISYFRVFGSKYFILVKRGRKTKFAPKTVEGFLLGYDSNTRAYRVFNKSFGQVEVSCDVVFDETNGSQVEQVDLDEIGDEEAPCIALRNMSIGDVCPKESGEPPSAQDQPSSSTQPSPPTQNEDEAQVDEEEDQRDEPPQDDGNDQGGDANDQDKEDEEPRPPHPRVHQAIQRDHPVDTILGDIYKGVTTRSRVAHFCEHYSFVSSIEPHKECQNVVGTKWVFRNKQDEHGVVTRNKARLVAKGYSQVEGLDFGETYAPVARLESIRILLAYATYHGFKLYQMDMKSAFLNGPIKEEVYVEQPPGFEDSEYPNHVYRLSKALYGLKQAPRAWYECLRDFLIANGF

SEQ ID NO: 10455 - protein, 935 aa, Zea mays
  Clone ID: TF_ZM5039.C1.o1.fg.pep
MSGDHAKKEMENGEKPTTSHGSTSSEESRTKRKEKKDSSKGKEKKKDSSKGKEKKSSSHKEKKEKSSSHKPQRSGDKKKRMRKVVYYETDSSATSTSGSDAASVTSKRQERKKYSKIPLRYPRISKHTPLLSVPLGKPPTFDGEDYARWSDLMRFHLTSLHKSIWDVVEFGAQVPSIGDEDYDEDEVAQIEHFNSQATTILLASLSREEYNKVQVLKSAKEVWDVLKTAHEGDELTKITKWETIEGELGRFRLRKGEEPQNMYNRLKTLVNQVRNLGSKKWDDHEVVKVILRSLIFLNPTQVQLIRGNPRYTLLTPEEVIGNFVSFECMIEGSRKINELDDPSTSEAQPVAFKATEEKKEESTPSRQPIDASKLDNEEMALVIKSFRQILKQRRGKDYKSRSKKVCYKCGKLGHFIAKCPLSSDSDRDNDKKGKRREKRRYHKKRGGDAHVCREWDSDESSTDSSDDEDAANIAVTKGLLFPNVGHKCLMAKDGKKKKVKSKSSTKYESSSDDNASDEEDNLRTLFANLNMEQKEKLNELISAIHEKDDLLDSQEDFLIKENKKHVKVKNAYALEVEKCENLSSDLSTCHETIDNLRNENANLLAKVDSHVCNVSITNSRNNDDDLLARIEELNISLASLRIENEKLLAKAKNFDVCNATISDLRTKNDMLHAKVVELKSCKPSTSIVEHVSICTRCRDVDINAIHDHMALIKQQNDHIAKLDAKIVEHNLENEKFKFARSMLYNGRRPGIKDGIGFQRGDNVKLNAPPKRLSNFVKGKAPMPQDNEGYILYPAGYPGSKIRRIHSRKSHSGPNHAFIYKGETSSSRQPTRAKLPKKKTPSASNDHDISFKTFDASYVLTNKFGKVYASGGSSWILDSGCTNHMTGEKRMFSSYEKNQDPQRAITFGDGNQGVTVFRRSDDSIAFKGVLEGQLYL

SEQ ID NO: 10456 - protein, 1201 aa, Zea mays
  Clone ID: TF_ZmC13633_1.pep
KELQGRQQQRSSTFAPRQPPAPAKASSSSGVRTSTSSTVPSGVAAKPATTTSSTGRSSDIKCHRCQGLGHIQRDCPSKRAYIATGDGGYVSASDVEDEDTVGANIAETYDGDEEVLGTTATETYKALIMQRALSTTASDDDNRQLRNLFNMFLIVKDCRVHTIIDGGSCNNLVNVEGKKIVLLPMTPTEIVHFEHEKKTNAKQKGVLNSENQQPIKLKTPTLLATKSDLDELHASLGLCYALVCKNAFYSIDDTSIVLPPAIANLLQEYMDVFPSEIPPGLPPVRGIEHKIDLIPGASLPNRAAYRTNPEETKEIQRQVQDLLDRGYIRESLSPCSVPILLVPKKDGTWRMCVDCRAINNITIRYRYPIPRLDDMLDELSGSIVFSIIDLRSGYHQIRMSLGDEWKTAFKTKFSLYEWLVMSFGLTNAPSTSMRLMNEVLRAFIGKFVVGIEMDEAKIVAITSWPLPTTVTQVQSFLGLAGFYRRFVRDFSTIAAPLHELTKNGVSFRWGPSQQQAFDALKSKLTQAPLLQLPDFDKTFELGEAHGDGLMGHFGVKKTEDVLFTHFYWPRMRRDVERYVSRCTTCNKAKSRLNPHGLYLPLPVPRAPWEDISMDFVLGLPRTKRGSDSVFVIVDRFSKMTHFIPCQKTDNASHIADLFFTEIVRLHGVPNTIVSDRDAKFLSHFWRTLWFKLGTKLLFSTTCHPQTDGQTEVVNHTLSTMLRAILKDNLRLWEECLPHIEFAYNRSIHSTTKLSPFMVVYGFNPRALIDLLPLPPSEIVNLDATQRSEFILELHETTKLQIEKMNEKYCIAANKGRKEMKLEPGDLVWVHLRKDRFPDLRKSKLMPRAAGPYKVLAKINDNAYTLELPPDFGVSSTFNISDLKPYMGDEDEAESRKTPIQEEEDDEDITSIYTMNGPITRSPARQLNLQVPWRGPTRTWERDKPSWRGHSCVTGDNQRSRGVVIARNRSLGALDHQRRDLHSIKLSYLTEDRAASTISVPRWGASVVDSLDSQRGATSCLAMVAPPPSPAARKATGQTQMLFFRHGGKTSSIPPPSGGLMATIIAVARWRKEYHVVVAVKGHELETPETEQRPGLKRLLETTHLELDGKLFVNTQQSPTWRANYRRFDPGGSLDRRRGRSEPKVGRGGDSSEVEIEAEPWAQARRRPSSEVEVEAEPWGRVRRRPSSEVEAGAEPWGRARR

SEQ ID NO: 10457 - protein, 1478 aa, Zea mays
  Clone ID: TF_ZmC13633_2.pep
MDVLMIRYLGEDQQGLGKGQGVEEEQQGRPQQNRYSFAITPTLVGQSHWSPFATCSAGPKNQMDKDKGPKLNDDECVSQMELKEMMRAMTEGFKKYQDSASTSYEQLDRRVAELVTRMDVLEARPPPPTPAPAHSPVDDDDDDDDVYAPLRQRLARNRQGMGGNGRRRHHNPEPDHDPFAKIKFSIPPFMGSYDAEAYLDWEMTVEQKFNSHLVPEQHRGDMSVQEYYQELQKEKELQGRQQRRSSTFAPRQPPAPAKASSSSGVRTSTSSTVPSGVAAKPATTTSSTGRSSDIKCHRCQGLGHIQRDCPSKRAYIATGDGGYVSAYDVEDEDTVGANIAETYDGDEEVLGTTATETYKALIVQRALSTTASDDDNRQRHNLFNMFLIVKDCRVHTIIDGGSCNNLVNVEVVKKLGLTTREHPHHYHIQWFNNNGKFKVTKTTRVHFSIGSYHDFADFDVVTMDACSLLLGRPWEFDTDAIHHGRSNKYTFMHKGKKIVLLPMTPTEIVHFEHEKKTNPKQKGVLNSENQQPIKLKTPTLLATKSDLDELHASLGLCYALVCKNAFYSIDDTSIVLPPAIANLLQEYMDVFPSEIPPGLPPVRGIEHKIDLIPGASLPNRAAYRTNPEETKEIQRQVQDLLDRGYIRESLSPCSVPVLLVPKKDGTWRMCVDCRAINNITIRYRYPIPRLDDMLDELSGSIVFSKIDLHSGYHQIRMSLGDEWKTAFKTKFGLYEWLVMPFGLTNAPSTFMRLMNEVLRAFIGKFVVVYFDDILIYSKSHDDHIEHLRAVFDVLRDARLFGNLEKCTFSTDRVSFLGYVVTSQGIEMDEAKIVAITSWPLPTTVTQVQSFLGLAGFYMRFVRDFSTIAAPLHELTKNGVSFHWGPSQQQAFDALKSKLTQAPLLQLPDFDKTFELECDASGIGIGGVLIQGGKPVAFFSEKLNGPTLNYSTYDKELYALVRVLQTWQHYLWSKEFVIHSDHESLKYLKGQSNLNKRHAKWIEFIESFPYIIKHKKGKDNVIADALSRRYTMLSQLNHKIFGLETIKELYAADLDFKDAFENCREGRTWQKFMLREGLLYRANKLCVPASSVRLLLLQEAHGGGLMGHFGVKKTEDVLFTHFYWPRMRRDVERYVSRCTTCNKAKSRLNPHGLYLPLPVPRAPWEDISMDFVLRLPRTKRGSDSVFVIVDRFSKMAHFIPCHKTDNASHIADLFFTEIVRLHGVPNTIVSDRDAKFLSHFWRTLWCKLGTKLLFSTTCHPQTDGKTEVVNHTLSTMLRAILKDNLRLWEECLPHIEFAYNRSIHSTTKLSPFMVVYGFNPRAPIDLLPLPPSEIVNLDATQRSEFILKLHETTKLQIEKMNEKYRIASNKGRKEMKLEPGDLVWVHLRKDRFPDLRKSKLMPRATGPYKVLAKINDNAYTLELPPDIGVSPTFNISDLKPYMGDEDETESRTTPIQEEEEDEDITSIHTMNGPITRSRA

SEQ ID NO: 10458 - protein, 165 aa, Zea mays
  Clone ID: TF_ZM4628.C6.o10.fg.pep
MTNSSTGRSSNIKCHRCQGLGHIQRDCPSKRAYIATGDGGYVSASYVEDEDTVGANIAETYDGDEEVLGTTATETYKALIVQRALSATASDDDNRQCHNLFNMFLIVKDCRVHTIIDGGSCNNLVNIEVVKKLGLTTRQHPHPYHIQWFNNNGTLERTIKDLGKA

SEQ ID NO: 10459 - protein, 97 aa, Zea mays
  Clone ID: TF_LIB3079-025-Q1-K1-D3.pep
VDFSDSASLAAALKLDQKVVKERPVRIRCAVPKKDDQKVNDNGNSDHLKSETRTCYECGTPGHSSSSCPNKKDSEARKSYECGTPVHLSCACPNNND

SEQ ID NO: 10460 - protein, 590 aa, Zea mays
  unsure (1)..(590): unsure at all Xaa locations
  Clone ID: TF_ZmC29741_64.pep
MELVEGELGRFAMIRGEEPTQTYNRLKTLVNKIRSYGSTRWTDHDVVRLMLRSFTVIDPHLVNLIHENPRYTKMTPEEILGKFVSGRMMVKEARYVDDALNGPLPVYEPQPVALKATSSREALPSKVAQVVVAGLNEDEMSLIIKHFKTTLKGRKEYPNKNNAKGKHSCFKCGKTGHFIANCPDNSSDQEQGKGGKKEKKKSYKKAKGEAHIGKEWDSDCSSSDSDDEGLTASAFNKSSLFPNERHTCLMAKEKKVSIRETPKYTTSSDDDSSDDEVYHTDLFKGLDRAKVDKINELIDALNEKDRLLEKQEDILYKDFNVDACDEHLVSISKLNDEVASLNAQLKTCKSDFDKLKFARDAYTVGRHPSIKDGLGFRKEAKNLTSQRDPIPVKDKGKAPMANSAQRNHAFIYSYRKFSRNAHRSYAYDSHAMIASSSSFVYASGGSSWIIDSGCTNHMTGEKKMFTSXSRTRIPRKAPFTKLMLRSSISWNSKNWITWSPTLXILIPRSSETDRNLVGPNMSWVYASGGSSWIIDSGCTNHMTGEKKMFTSSCSQRRPAVLRIGTNSSGERAGSGGWAARARGGGWASVR

SEQ ID NO: 10461 - protein, 1392 aa, Zea mays
  Clone ID: TF_ZM4707.C6.o5.fg.pep
MSGDHAKKEMETGDKPATSHGKASSKESRNKEKRKDKKKEKITSSHKSHRSGDKIKKMRKVVYYETDTSSPSTSGSDTPSITSKRHERKKFSKIPLRYPRITKHTPLVSVPLGKPPTFDGEDYARWSDLMKFHLTSLHKSIWNVVEFGAQVPSVGDEDYDEDEVAQIEHFNSQATTILLASLSREEYNKVQGLKSAKEVWDVLKTAHEGDELTKITKREMIEGELGRFRLRQGEEPQDMYNRLKTLVNQVRNLGSKKWDDHEVVKVILRSLIFLNPTQVQLIRGNPRYTLMTPEEVIGNFVSFEFMIKGSRKINELDGPSTSEAQPVAFKATEEKKEESTPSRQPIDASKLDNEEMTLVIKSFRQILKQRRGKDYKPRSKKVCYKCGKLGHFIAKCPISSDSDRGDDKKGRRKEKKRYYKKKGGDAHVCREWDSDESSSDSSDDEDAANIAVTKGLLFPNVGHKCLMAKDGKKKKVKSKSSTRYESSSDENASDEEDNLGTLFANLNMQQKEKLNELISTIHEKDDLLDSQEDFLIKENKKHVKVKNAYSLEVEKCEKLSSELSTCHENIDNLRNENANLLAKVDSIASKLDAKIAEHELENEKFKFARSMLYNGRRPSIKDGIGFQKGDNVKLNAPPKKLSNFVKGKAPMPQDNEGYILGETSSSRQPTRAKLPKKKTPSASNEHNFSFKTFDASYVLTNKSGKVYASGGSSWIIDSGCTNHMTGEKKMFSSYEKNQDPQRAITFGDGNQGVTVFRRSDDSIAFKGVLEGQLYLVDFDRAELDTCLIAKTNMGWLWHRRLAHVGMKNLHKLLKGEHILGLTNVHFEKDRICSACQAGKQIGAHHPHKNIMTTNRPLELLHMDLFGPIAYISIGGSKYCLVIVDDYSRFTWVFFLQEKSHTQETLKGFLIRAQNEFGLRIKKIRSDNGTKFKNSQIEGFLEEEGIKHEFSSPYTPQQNGVVERKNRTLLDMARTMLDEYKTSDRFWAEAVNTACYAINRLYLHRILKKTSYELLTGKKPNISYFRVFGSKCFILVKRGRKSKFAPKTVEGFLLGYDSNTRAYRVFNKSSGQVEVSCDVVFDETNGSQVEQVDLDEIASPPTQNEDKAQVDEGENQANEPPQNDGNNQGGDANDQDKEDEEPRPPHPRVHQAIQRDHPVDTILGDIHKGVTTRSRVAHFCEHYSFVCSIEPHRVEEALQDSDWVVAMQEELNNFTRNEVWHLVPRPNQNVVGTKWVFRNKQDEHGVVTRNKARLVAKGYSQVEGLDFGETYAPVARLESIRILLAYATYHGFKLYQMDVKSAFLNGPIKEEVYVEQPPGFEDSEYPNHVYKLSKALYGLKQAPRAWYECLRDFLISNGFKVGKADPTLFTKTLENDLFICQIYVDDIIFGSTN

SEQ ID NO: 10462 - protein, 701 aa, Zea mays
  Clone ID: TF_ZM4715.C1.o9.fg.pep
MSGAPAKREIGTGGDKSASSGRTHSRESGHKHKEESSSCIKTQRRCDKKKKMKKVVYYETDSLSPSTSGSESASATSKHHERKKYSKMPLCYPRISKRTPLLSVPLGKPPVPKEGDKDYDSEEVEQIRHFNSQATTILLASLSREEYNKVQGLKSAKEIWDVLKTAHGGDEVTKITKRETIKGELGRFMLNQGEEPQAMYNRLKTLVNQVRNLESTKWDDHEMVKVILGSLVFLNPTQVQLIRGDPRYKLMSPEEVIGKFVQPIAFKATEEKKEESTSSRLPIDTSKLDNEEMALIIKSFRQILKQRKGRDYKPRSKKVCYKCGKLGHFIAKCPISSDSDRGDDKRGKKKEKKRYYKKKGGDAHVCREWDSDESSTDSSSDEDATNIAVNKGLLFPNVGHKCLMAKDGKKKPRGLIKENKKHVKVKDAYAQEVEKCEKLTSELSTCHDTISNLRNENAKLIAKVEKLNVCDDSLVKLKNDNASLIAKIDKLNESLSSLKIENDKLISKAKDLNVCNVSISNLRNENDMLHAKIDELNACKPTTSTVEHVSICMRCRDINVDAIHDHLALIKQENDHIAQLSAKINEHDLENEKFKFARSMLYSGRRPDIKDVIGFQQGDNVKLNSLKKLSNFVKGKAPMVQDNEGYILYPIGYPEHKIRRIHSRKSHSGSHHAFMYKSEASSSRQSTHVKLPKKKSPIASM

SEQ ID NO: 10463 - protein, 748 aa, Zea mays
  Clone ID: TF_ZM4516.C1.o15.fg.pep
MPKFDGRSDPEDYFTWELKVEKIFRLHNYLEEKKLAMASLEFEGYALIWWEQLLSDREEDGDDPIITWQEMRREMRIRFVTKHYRRDLFDKLQNLSQGSFSVEENYKEMEKAMIRANVYEDEEQTIASTKAERQLQQDAKSTKPLSYGARTMTGGSKSISRFTAASSATKGSIGGLQSNIQGNSSAKNGVAPNTSYKPAASTSTSVGSIAKSSGIQCFKCGGHGHVIKECPNNRVILVNDDGEYTSASEEEAEAGNHCGRTNQYTLDLKGRKFVLKPMTPQQIMAEPLQKKTEISAASRGGEEQNKLSAIHNSVSECYKPNSRDKRKEEGEHLVMLATKSELREVRNNPYQVLFVLVNKDALISPNDITSLPSVVADLLQDFEDVFPQETPAVLPPIRGIEHQIDLIPGAALPNRPPYRTNPKETKEIQRQVQELLDKGFIRESLSHCAVPVILVPKKDGSWRMCVDYRAINNITVRYHHPIPRLDDMLDELSGSTIFTKIDLRSGYHQIRMKTGDEWKTAFKTKFGLYEWLVMPFGLTNAPSIFMRLMNHVLRTFIGKFVVVYFDDILIYSKSFDEHVKHIRQVLDELRKEKLFANIEKCNFCTDHVVFLGFVVSAKGIEVDESKVKAVKDWPAPTNVSQVRSFQGLAGFYRRFVRDFSTIASPLNELTKKGVEFKWGNSQEDAFQELKKRLTEAHVLILPDFTKTFEVECDASGIGIGGVLMQQGKPIAYFSEKLGGAQCNTSGVT

SEQ ID NO: 10464 - protein, 1224 aa, Zea mays
  unsure (1)..(1224): unsure at all Xaa locations
  Clone ID: TF_ZM5005.C1.o1.fg.pep
MDPKGKGMVVNDKEESLFNEPRDDKPIDSGLSHRTRDGKKKRCIKKIIYCDSDASSSSPRDDDDDSSSKKKTVNQNYSFDYSRIPYNSNAHLLSIPLGKPPHFDGEDYSFWIHQMCSHLFSLHPSIWEIVENGMHFDSTDNPVFINEQIHKNAQATTVLLASLCRDEYNKVSGLDNAKQIWDTLKISHEGNDATMITKMELVEGELWRFAMIRGEEPTQTYNRLKTLVNKIRSYGSTRWTDHDVVRLMLRSFTIIDPHLVNLIRENPRYTKMMSEEILGKFVSGRMMVKEARYVDDALNGPLLIYEPQLVALKGTSSKETLPSKVAQVEAAGLNEDEMALIIKRFKTALKGRKEYPNKNKTRGKRSCFKCDKTGHFIAQCPDNKNDLAQERHGKKEKKKNYRKAKGEAHLGKEWDSDCSSSDSDDEGLAASAFDKSSLFPNERHTCLMAKEKKVHIQDTPKYTSSSDEESSDDEVDYSDLFMGLDQAKVEKINELIDALNEKDRLVEKQEDILHEEHDKFVSVQKSLALEIKRNEMLSSELSVHHESVSSLKKLNDKLTANLEEVNKTSSCVEHVIICNRCKDFDVNACDEHLASITKLNNEVASLNAQLKTCKVDFDKVKFARDAYIVGRHPSIKDGLGFQKKTKNLTSQRTPILNKEKGKTPMASSPQRNHAFIYDRKIASHSHRSYDHVAYYDSNAMLASSSTHDYGRNRPRTMCNKPSTIYHTCNTSFVLTCKNTKVVARKLGSKCKGDKTCIWVPKVIFTNLVGPNKSWVYATGGSSWIIDSGCTNHMTGEKKMFTSYVKNKDSQDTIIFGDENQGKVKGLGKIAITSEHSISNVFLVESLGYNLLSDKLETQGTLKRFLRRAQNEFELKVKKIRSDNGSEFKNLQVEEYLEEEGIKHEFSAPYTPQQNAVNTACHAINRLYLHHLLKKTSHELLTGNKPNVSYFRVFGSKCYILVKKGRHSKFVPKAVERFLLGYDSNTKAYRVFNKSSGLVEVSSNVVFDETNGSPREQVDLDDVDEEEIPTAAMRTMAIGDVRPQELQEQDQPSSSMVVHPPTQDDEQVPQEEGHDQVGAQEDQVMEEEAPRVPPTQVLATIQRHHPVDHILVDISKGVTTRSRLANFCEHYSFVSSIEPFRVEEALQDPDWVLAMQEELNNFKRNEVWSLVPCPKQNVVGTKWVFRNKQDEHGVVTRNKARLVAKGYXQVASLDYEETFASVARL

SEQ ID NO: 10465 - protein, 511 aa, Zea mays
  Clone ID: TF_ZM4989.C10.o3.fg.pep
MEDLSNMTPTIVIGKIAAFEMSRKMSRGEEPTSSRPYAFACDERKGKKKAPTPSSSSEEEEEEESDDDEDNQPCTSSSEDEETIRRVGKVEDLLFNIDRKKQRKRGCFACGEKGHFRDNCQNMAKPKKERSKGKALTSVRTWDDSSSEDEPPRTRSHRSSSRSSQSSHKCLMARGNKSIPSSSDESSSDDEGEGKPSLDELAEAVEFFQDVCTKQKAQLKTLKNKLVSSQNDYKGLLEKFETFANLNSELSTKIELLESSAPSTATDDNLIKKNEKLKAKLASSQEAIENLLEKMEILSIHNNELTTKLENIGSTPTTSLVEIPEIIKKDASTSCFDLIDDSNPCNQVVVENIVVETCSDEVAKENEQLKQEVARLGKALYDKKGKAKQIRPTQDNTTAGVNKPVEGETVICRLCHMEGHKSFQCKAMTGDKQRQKLKQKPSSKISNTYIKRVNKKDATPYLIKKKKNGKVIAIKANKQANKGKGAKRIWVPKEIISTMKSTKKVWIPKGK

SEQ ID NO: 10466 - protein, 1621 aa, Zea mays
  unsure (1)..(1621): unsure at all Xaa locations
  Clone ID: TF_ZmC951_430.pep
MSGEHTKKEIVTDGDKSRSHGKDPSGESDNKMKGTPSHAKSHWSGDKKKKMRKVVYYETDSSSPSTSGSDTPSVTSKRHERKKFSKIPLHYPRIPKRTPLLFVPLGKPPMFDGEDYNMWSDKMRHHLTSLHTSIWDVVEIGVQVPSPGDEDYDSDEVAQIRHFNSQATTILLASLSREEYNKVQGLKSAKEIWDVLKTAHEGDEVTKITKRETIEGELDRFRLRQGEEPQDMYNCLKTLVNQVRNLGSTKWDDHEMVKVILRSLVFLNPKQVQLICGNPRYTLMSPEEVIGNFVSFELMIKGSKKIIELDGPSTPEAQPVAFKATEEKKEESTPSRQPIDASKLDNEEMALVIKSFRQILKQRRGKDYKSHSKKVCYKCGKPDHFIAKCPMSSDSDRGDDKKGRRKEKKRYHKKRGGDAHVCREWDSDESSSDSSSDEDAANIAFIKGLLFPNVGHKCLMAKDGKKKKVKSKSSTKYETSSDEDNSCDEEDNLRTLFANLNMQQKEKLNELISAIHEKDELLDSQEDFLIKENKKHVKVKNAYALEVEKCEKLSIELSSCHDVITNLRNENASLIAKVDSNVCDASIPNLRDDNVKLLAKIEELNVSLASLKIENEKLIVKAKELDHVTICTRCRDINIDAIHDHMALIKQQNDHIAKLDAKIAEHDLENDNFKFARSMLYNGRRPDIKDGIGFQKGDNVKLNAPPKRLSNFVKGKAPMTQDNEGYILYPTGYPESKIRRIHSRKSHSGPNHAFMYKGETSSSRQSTHARLPKRKTPTTSNDHNFSFKTFDASYVLTNKSGKIVAKYVGDKHKGTKTCVWVPKVLASNAKGPKTVWVYASGGSSWIIDSGCTNHMTGEKKMFSSYEKNQDPQRAITFGDGNQGVTVFRRSDDSITFKGVLEGQLYLVDFDRAELDTCLIAKTNMGWLWHCRLAHVGMKNLHKLLKGEHILGLTNVHFEKDRICSACQAGKQVGIHHPHKNIMTTDRPLELLHMDLFGQIAYISIGGSKYCLVIVDDYSRFTWVLFLQEKSHTQETLKGFLRRAQNEFGLRIKKIRSDNGTEFKNSQIEGFLEEEGIKHEFSSPYTPQQNGVVERKNRTLLDMARTMLDEYKTSDRFWVEAVNTACYAINRLYLHRILKKTSYELLTGKKPNVSYFRVFGSKCFILVKRGRKSKFAPKAVEGFLLGYDSNTRAYRVFNKSSGLVEVSCDIVFDETNGSQVEQVDLDEIGDEEAPCVTLRNMSIGDVCPKESKEPPNAQDQPSSSTQASPPTQNEDEAQDDEGEDQEDEPPQDDGNDQGGDANDQDKEDKEPRLPHPRVHQAIQQEHPVNTILGDIQKGVTTQSRVAHFCEHYSFVSSIEPHRVEEALQDSDWVVAMQEELNNFTRNELYQMDVKSAFLNGPIKEEVYVEQPPGFEDSEYPNYVYKLSKALYGLKQAPRAWYEFLRDFLITNGFKVRKVDPTLFTKTLDNDLFVCQIYVDDIIFGSTNESTCEEFSSIMTPKFEMSMMGELKYFLGFQVKQLQEGTFISQTKYIQDILNKFGMKDAKPIKTHMGTNGHLDLDTGGKSVDQKKXSTSGTCQFLGRSLVSWASKKQNSVALSTAKAEYIAAGHCCAQLLWMRQTL

SEQ ID NO: 10467 - protein, 1191 aa, Zea mays
  unsure (1)..(1191): unsure at all Xaa locations
  Clone ID: TF_ZmC13103_1.pep
MDPKGKGIVINDKEKESFVNEPKDDKPTDSGSGHKRKDGKKKKTRRIKEIVYYDDNDESTSSQKDNDDNDYERRKPVNSNFSFDYSRIPQSTNAHLLSIPLGKPPHFDGEDYGFWSHKMRSHLFSLHPTIWEIVESGMKFDSSDSPMFINEQTHRNAQATTMLLASLCRDEYHKVSGLDNAKQIWDTLRISHEGNDVTLLTKMELVEGELGRFAMIRGEEPTQNCNFPKFLTNLTLRQVKITSXRWSKHTLLVLHLHCQNHLAAQLFLLTLLGYVATSRDPIIGGSLLLTYTTGYVAPLLIAASFAGALHSLLSFRRYSAWINPISGAFLLGGGVYTHTGQGVSSNINGHVGRKGQPSKTKIKGKHSCFKCGKVGHFIANCPDNDSDQEEGNKREKKKNYKKAKGEAHLGKEWDSDCSSSDSDNEGLAATAFNKSSLFPNEHHTCLMAREKKGLDRTKVDKINELIDALNDKNRLLEKQEDLLYDEHDKFVEAQKSLALEIKRNEMLSCELSTCHDSISSLKSIKDDLTAKCKDFNIDACSEHLVSISKLNDEVASLNAQLKTSKSEFDKLKFARDAYTIGRHPSIKDGLGFKREAKNLTSHKAPIPAKEKGKAPMASSAKKNHAFMYHDRRHARNANRSHDAFDSHVYDSYDMFASSSSYMHGRNVARRNAINHMPRRNGVSVPRKVNEPSTIYHACNASFAICRKDRKVYASGGSSWIIDNGCTNHMTGEKKMFTSYVKNKDSQDSIIFGDGNQGKDKSETQGTLKRFLRRAQNEFELKVKKIRSDNGSEFKNLQVEEYLEEEGIKHEISAPYTPQQNGVVERKNRTLIDMVRTMLGEFKTLERFWSEAVNTACHAINRVYLHRLLKKTSYELLTGNKPNVSYFRVFGSKCYILVKKGRNSKFAPKAVEGFLLGYDSNTKAYRVFNKSSGLVEVSSDVVFDETNGSPREQVVDFDNVDEEEVPITAIRTMAIGDVRPQEQDEQDQPSSSTMVQPPTQDDEQEACDQGGAQDDHVMEEEAQPAPPTQVRAMIQRDHPVDQILADISKGVTTRSRLVNFCEHYSFVSSIEPFRVEEALLDLDWVLAMQEELNNFKRNEVWILVPRPKQNVVGTKWVFRNKQDEHGVVTRNKARLVAKGYAQVAGLDFDETFAPVARLESIRILLAYAAHHSFRLFQMDVKSAFLNGPIKEE

SEQ ID NO: 10468 - protein, 1644 aa, Zea mays
  Clone ID: TF_ZM4958.C2.o1.fg.pep
MDPKGKGIVINDKEKESFINEPKDDKPTDSGHKSKDGKKKKTRHIKEIVYYDDSDESTSSQKDNDDNDYERRKPVNSNFSFDYSRIPQSTNAHLLSIPLGKPPHFDGEDYEFWSHKMRSHLFSLHPSIWEIVESGMKFDSSDSPMFINEQIHRNAQATTVLLASLCRDEYHKEARYVNDALNGPIHEPQPIALKATRSKEALPSKVAQVEAAGLNDEEMALIIKRFKTALKGRKGQPSKTKTKGKHSCFKCGKVGHFIANCPDNDSDQEEGNKREKKKNYKKAKGEAHLGKEWDSDCSSSDSDNEGLAATAFNKSSLFPNKHHTCLMAREKKGLDRTKVDKINELIDALNDKNRLLEKQEDLLYDEHDKFVEAQKSLALEIKRNEMLSCELSTCHDSISSLKSINDDLNAKLEIANKSTSCVEYVVVCTRCKDFNVDACSEHLVSISKLNDEVASLNAQLKTSKSEFDKLKFARDAYTIGRHPSIKDGLGFKREAKNLTSHKAPIPAKEKGKAPMASSAKKNHAFMYHDRRHARNANRSYDAFDSHVYDSYAMFASSSSYMHGRNVARRNTINHMPRRNGVNVPRKINEPSTIYHACNASFAICRKDRKVYASGGSSWIIDSGCTNHMTGEKKMFTSYVKNKDSQDSIIFGDGNQGKVKGLGKIAIPSEHSISNVFLVESLGYNLLSVSQLCKMGYNCLFTNVDVSAFRRSDGSLAFKGILDGKLYLVDFAKEEAGLDACLIAKTSMGWLWHRRLAHVGMKNLHKLLKGEHVIGLTNVQFEKDRPCAAYQAGKQVGGAHHTKNVMTTSRPLEMLHMDLFGPVAYLSIGGSKYGLVIVDDFSRFTWVFFLQDKSETQGTLKRFLRRAQNEFELKVKKIRSDNGSEFKNLQVEEFLEEEGMKHEFSAPYTPQQNGVVERKNRTLIDMARTMLGEFKTPECFWSEAVNTACHAINRVYLHRLLKKTSYELLTGNKPNVSYFRVFGSKCYILVKKGRNSKFAPKAVEGFLLGYDSNTKAYRVFNKSSGLVEISSDVVFDETNGSPREQVVDFDDVDEEEVPTAAIRTMAIGDVRPQEQDERDQPSSSTMVHPPTQDDEQEAYDQGGAQDDHVMEEEAQPTPPTQVRAMIQRDNPVDQILGDINKGVTTRSRLVNFCEHYSFVSSIEPFRVEEALLDPDWVLAMQEELNNFKRNEVWTLVPRPKQNVVGTKWVFRNKQDEHGVVTRNKARLMAKGYAQVAGLDFEETFAPSAFLNGPIKEEVYVEQPPGFEDERYPDHVCKLSKVLYGLKQAPRAWYECLRDFLIANAFKVGKADPTLFTKTCDGDLFVCQIYVDDIIFGSTNQKSCEEFSRVMTQKFEMSMMGELSYFLGFQVRQLKDGTFISQTKYTQDLIKRFGMKDAKPAKTPMGTDGHTDLNKGGKSVDQKAYRPMIGSLLYLCASRPNIMLSVCMCARFQSDPRECHLVAMKRILRYLVATPCFGIWYPKGSTFDLIGYSDSDYAGCKVDRKSTSGTCQFLGRSLVSWSSKKQTSVALSTAEAEYVAAGQCCAQLLWMRQTFRDFGYNLSKVPLLCDNESAIRMVDNPVEHSRTKHIDIRHHFLRDHQQKGDIEVFHVSSENQLVDIFTKPLDEQTFCKLRSELNVLDSRNLD

SEQ ID NO: 10469 - protein, 505 aa, Zea mays
  Clone ID: TF_ZmC24260_17.pep
MSGGKRNESASKLEKVEVASTLSFGADVDPRAIDLAMRIAERMFLKMKEDEAKNIIEEEENDRWRPNDESTSSQGSSFKSTSHMCFIANGSDSESESEDKEEQESDSEDEDDLQQFFAQLSKKHRMSLLKLMKRAEEQKEMLHKQEDFLIRKIEDLEKLTKEHEKLKCSHDDLVQRYEDISIEQIKVVNHSSYIAQLENKNAMFKNTIERLNIENLAFQEKHDMLVCSHNKFMDSHIMLEMAHEVVLTNLKSYQPHMCTCVEIETILPCANKCCSQESQSSIELDISRISDISITQENKELKEEVGMLRRSLTRLKGKCHAQPPQDNHDNVVKKLEKGTTVACTKPLQKNTKLSKKGMSKIHGEKINAHMICSNNVPMCFNKERSKRSDRRCYGCKEKGHEIDSCPHMKNQDLARSRKMTIKKDESKRQKHCKDKHRICYNCREKGHLFKVCPKGKTPKPNLSIHLNMLWRPKFDSCARKVMSSPHSRTKAIWVPKSLLANLDLS

SEQ ID NO: 10470 - protein, 678 aa, Zea mays
  Clone ID: TF_ZmC951_348.pep
MSGDHAKKEMVTGEKPATSHGKAPSGESGNKKREESPPRVKSHRSGNKKKKMKKVVYYETDSSSPSTSGSDTPSVTSKRHERKPPVFMVKIIVPSIGDEDYDADKVAQIQHFNSQATTILLTSLSQEEYNKVQGLKSAKEIWDVLKTAHEGDEVTKITKREMIEGELGRFMLNQGEEPQAMYNRLKILVNQVRNLGSTKWDDHEMVKVILRSLVFLNPTQVQLIRGDPRYKLMSLEEVIGKFVSFELMIKGSKQIIEQGATSTPEVQPVAFKATKEKKEESTSSRLPIDASKLDNEEMALIIKSFRQILKQRREKDYKPRSKKVCYKCGKPSHFIAKCPSSSDSDRGDDKKGKRKEKKRYYKKKGGDAHICREWDSDESYTDSSSDEDAANITVNKGLLFPNFGHKCLMTKGGKKKVKSRASTKYATSSDEDNSSDDEDNLLALFANLNMQQKEKLNELIGAIHEKDELLDSQENFLIKENKKHVKVKNAYAQEVEKCEKLTSELSTCHDIISNLRNENVKLIAKVEKLDVCDDSIVSLRNDNASLVTNIDKLNTSLSSLKIENEKLIAKAKDLNVCNISISNLRDENAILHAKIDKLNACKPSTSTISYVSICTRCKDVNVDAIHDHIAMIKQQNDHIAKLDAKIAEHELENEKFKFARSMFYNGRRPVIKDGIGFQ

SEQ ID NO: 10471 - protein, 649 aa, Zea mays
  Clone ID: TF_ZM4952.C1.o18.fg.pep
MASGRTPLQQCPRPHLRSRGEDKYKEPEVRSADGGGDPARDPTVPARRIGHGPVSLGRRRDGRCGQKWAGSNGGGRRAEAAVTSSAKLTSPHGTDVTQEWLDRVKIARKGLRGTKRRFNRFFALFTFLKILVQPDTQPDTQPVFVWWKQLWYYIEFFVDSLLLELLAPRRLGVAYVDPRAIDLAMRIAERMFLKMKEDEAKNKIEEENDRWRPNDESTFSQGSYFKSTSHMCFIANGSDSESESEDEEEQESDSEDEDDLQQFFAQLSKKHRMSLLKLMKRAEEQKEMLHKQEDFLIRKIEDLEKLTKEHEKLKCSHDDLVQRYEDISIEQIKVVNHSSYIAQLENKNAMFKNTIERLNIENLALQEKHDMLMCSHNKFMDSHIMLEMAHEVVLTNLKSYQPHICTCTQVETILSCANKCCSQESQSSIELEISGINDISMTQENKELKEEVGRLRRILTLLKGKCHAQPSQDNRDNMVKKLEKGTTVACTKPFQKNTKLSKKGMSKIHGKKINAHTICSNNVPMCFNKERSKRSDRRCYGCKEKGHEIDSCPHMKNQDLTQSRKMTIKKDENKRQMHCKDKHRICYNCREKGHLFKVCPKGKTLKPTMSIHSYSLRRPKNDTCARKPHRKNEALENELKRFYLALERI

SEQ ID NO: 10472 - protein, 2350 aa, Zea mays
  Clone ID: TF_ZmC3792_1.pep
MRTSAPLGGRMASPDLRKDAARMLRVIGGCWPRNVPIPRAAGEDLFTSRMVREWRVFPYGRNIAAVVSAVMDKDRQGAAQKRQAVVRLVEARPKRQRGSAKAAAAGGGKPPLAAKLGVPASSKAPEATTGAGGSKPTKAVPPASRVPEAAKAAKLLPAGKRIADFATDISVEDYLGGSDEGQLAIVAPAAATTTAAAAPKAKGGAIGARGEVAALAAVRDEAGAASRQLKEVAESLSQVADFANRTTSGALTAVVSAEVERLRTQHTDAVREKSAADSKCRKLVDKVAALEGEKADLRRQLAGERRETNEALVNAQAAQAEANLARAEGNLARERAEQLQERLIALESRVERAEAATRAEAERTRTQLMDTYRELGARTGDFEVPDREPGLHYLEWVQEELQALPTVVEGFMSYASLVTCEGAMNALSREGCRHFEVFDQADDDFERDIYKVEDPVVKESAGAIYDRMWGPHGREVVRERATTARAQAARGERVDDFGALNNALADPEPTPAVTMRLMVLITIMVLMARLRHTARKSVIPFLPSRLAKRPLRRPVAGQSSHLERLHHRLREEQERRRQEQQSSSFSLHQEIESVRSCSPVLPLEAPPAPPLGAPASGVAAGGDPDDGDGDDSSSHDTDFSANPEPEGWVARPITRDAARGCHFHDALDTLLRRAFDRHTWSVEYRCVVYQHSRGVYPDRWEATCLVRCPEDSLQGAEACSEHYSISERDSAEAAMQDAARRALSHYCSVFGGAADGLDLKYYPRRPSGSTGGVIVSPVGEGNPRLSSTVNLAAVLNTELDHALDELSRARAEIALLRAERGNVVIWMMSENRRRGGRRAQQERAAQQEEVPQQQLPPPPPMSIEQMFLMQTQSVQAIGQTLAAIQQQQQQQQQQAPPQPQMPQMPRDKRAEFMRGHPPTFAHSSDPMDAEDWLRNVERELHTAQCDDREKVLYGPRLLRGAAQSWWESYLATHANPDTITWEEFRGSFRQYHVPAGLMTVKKEEFLALKQGSSSVSEYRDRFLQLSRYAPEDVNTDAKRQYRFLRGLVDPLQYQLMNHTFPTFQHLIDRAIMTERKRKEMEDRKRKISGPQPGSSSRPRFSGNQPQQFRQNQRPPQQRQQHQQFQRQYPQHQYQNRQSNQSGGQFQRQNQQAPRLPAPANQQNSQAAPAQVGNRACFHCGEQGHWVMQCPKKAAQQQSGPNAPAKQNVSQPGAGNRPQQRYNHGRLNHLEAEAVQETPGMIVGMFPVDSHIAEVLFDTGATHSFITASWVEAHNLPTTTMSTPIQIDSAGGRIRADSICLNISVEIRGIAFPANLIVMGTQGIDVILGMNWLDKYQAVISCDKRTIKLVSPLGKEVVTELVPPEPKKGSCYQMAVDSSEADPIESIKVVSEFPDVFPKDLPGMPPERKVEFAIELLPGTAPIFKRAYRISGPELVELKKQIDELSEKGYIRPSTSPWAAPVLFVEKKDGTKRMCIDYRALNEVTIKNKYPLPRIEDLFDQLRGASVFSKIDLRSGYHQLRIRPSDIPKTAFITKYGLYEFTVMSFGLTNAPAFFMNLMNSVFMDYLDKFVVVFIDDILIYSQSEEEHADHLRMVLQRLREHQLYAKLSKCEFWINEVLFLGHIINKEGLAVDPKKVADILNWKAPTDARGIKSFIGMAGYYRRFIEGFSKIAKPMTALLGNKVEFKWTQKCQEAFEALKEKLTTSPVLILPDVHKPFSVYCDACYTGLGCVLMQEGRVVAYTSRQLKVHEKNYPIHDLELAAVVHALKTWRHYLYGQKCDVYTDHKSLKYIFTQSELNMRQRRWLELIKDYELEIHYHPGKANVVADALSRKSQVNLMVARPMPYELAKEFDRLSLGFLNNSRGVTVELEPTLEREIKEAQKNDEKISEIRRLILDGRGKDFREDAEGVIWFKDRLCVPNVQSIRELILKEAHETAYSIHPGSEKMYQDLKKKFWWYGMKREIAEHVAKCDSCRRIKAEHQRPAGLLQPLQIPQWKWDEIGMDFIVGLPRTRAGYDSIWVVVDRLTKSAHFIPVKTSYNSAVLAELYMSRIVCLHGVPKKIVSDRGTQFTSHFWQQLHEALGTHLNFSSAYHPQTDGQTERTNQILEDMLRACALQDQSGWDKRLPYAEFSYNNSYQASLKMSPFQALYGRSCRTPLQWDQPGEKQVFGPDILLEAEENIKMVRENLKIAQSRQRSYADTRRRELSFEVGDFVYLKVSPIRGVRRFGVKGKLAPRYIGPYQILSKRGEVAYQLSLPENLSAVHDVFHVSQLKKCLRVPEEQLPVEGLEVQEDLTYVEKPAQILEIADRVTRRKTIRMCKVRWNHHSEEEATWEREDDLVAKYPELFASQP

SEQ ID NO: 10473 - protein, 1799 aa, Zea mays
  Clone ID: TF_ZmC3792_12.pep
MRVVHIATTAQEKAKSWKETSRSSKTTTNFRWLVLDTLHLEAPPAPPRDVPAVGGATGGDPDDNDSDHSTESSEPQEAEGWVARPITRDAARGCHFHDALDTLLRQAFDQHTWSIEYRCVVYQHSRGRYPDRWEATCLVRRPEDDLRGAEAVSEHYSISERDTAEAAMQDAARRALSQYCSLFGGVADGLNLRYYPRRPTGSTESVVVSPVGEANPRLSSTVNLVAVLNTELDHSLDELSRARTEIAGLRAELAERHHQEGGSPAPVGTQHPYRSPPRGSMLMYECLPQMSDNRRRCNRRAQQEQHDQQEEQQRQPPPPPPMSVEQMFLMQTQAVQAIGQTLAAMQQAQQQPQPQLQVQMPQMPRDKRGEFMRGHPPTFAHSADPMDAEDWLRAVERELRTAQCDDREKVLYGPRQLRGAAQSWWESYLATHANLEAITWEEFSESFRRYHVPEGLMIVKKEEFLALKQGPLSVSEYRDKFLQLSRYAPEDVNTDAKRQYRFMRGLVDPLHYQLMNHTFPTFQHLIDRAVMTEKKRKDMEDRKRKMSGHQSGGISRPHFSGSSSQQGRPGHPQGYQNQNQRPHQQQFQRQYPQQQQQYRQHSQQGGNQYQKQNNQAPRLPAPTANQSNQAAPAQGGGRGCFHCGEQGHWAMQCPKKLAQQQTNPNAPTRQGVLQPAAGNRNQAYNRGKVNHLEAEAIQDAPDVAVGMFSVESHPAKVLFDTGATHSFVTATWVELHNISVEAMMPPMRINSVGGKVQTDKICSNIMVEIRGIGFPSDLMVIDTPGIDIILGMNWLMKYEANVSCDKRTVTLKSPSGEEVVAELWMPKSEEGVCHQISVSSKEPNPLEAIKVVSDFPDVFPEELTGMPPERKVEFAIELIPGTAPISKRAYRVSGPELVELKKQIDEMLEKGYIRPSTSPWAAPVLFVEKKDGTKRMCIDYRALNEVTIKNKYPLPRIEDLFDQLRGASVFSKIDLRSGYHQLRIRPSDIPKTAFITKYGLYEFTVMSFGLTNAPAFFMYLMNSVFMDYLDKFVVVFIDDILIYSQSEEDHAEHLKMVLQRLREHQLYAKLGKCEFWIHEVLFLGHIINQDGLAVDPKKVADILNWKAPKDVRGIKSFIGMAGYYRRFIEGFSKIARPMTALLAKKVEFKWTQKCQEAFEELKSRLTTAPVLVLPDVHKPFSVYCDASYTGLGCVLMQEGRVVAYSSRQLKIHEKNYPTHDLELAAVKCDIYTDHKSLKYIFTQSELNMRQRRWLELIKDYELEIHYHPGKANVVADALSRKSQVNMLASYPMPYELAKEFDRLSLGFLNSTQGVTVELEPTLEWEIKEGQKDDENINKIRQLILEGRGKDFREDEEGVIWFKDRLCVPDLKPIRELILKEAHETAYSIHPGSEKMYQDLKRRFWWYGMKREIAEYVAICDSCQRTKAEHQRPAGLLQPLRIPQWKWDEIGMDFIVGLPRTRAGYDSIWVVVDRLTKVAHFIPVKTTYTGATLAELYMSRIVCLHGVPKKIVSDRGTQFTSHFWQQLQEALGTHLNFSSAYHPHTDGQTERTNQILEDMLRACALQDKSGWDKRLPYAEFSYNNSYQASLKMSPFQALYGRSCRTPLHWDQPGERQVFGPDILLEAEENIKMVRENLKIAQSRQRSYADRRRRELSFEVGDYVYLKVSPIRGVRRFGVKGKLAPRYVGPYQIQAKRGEVAYQLNLPESLSAVHNVFHVSQLKKCLRVPEEQLPVEGLEVQEDLTYIEKPTQILEFADRVTRRNTIRMCKVRWGHHSEEEATWEREDDLKAKYPELFADQP

SEQ ID NO: 10474 - protein, 1912 aa, Zea mays
  Clone ID: TF_ZmC3792_3.pep
MWLLLPSTAMRASSVLFHRPRSALLLPSFRLMDLMGTAWTSNVESMALGMFLLKPISRLTMARLRHTARKSVIPFLPSRLAERPLHRTVSGQSSHLERLHHRLREEQERRRQHGEQQGSSSSPQQEVETVRPRSSVAQLEAPLVPPRDVPAVGGATEGATGGDPDDDDSDHSTESSEPQEAEGWVARPITRDAARGCHFHDALDTLLRQAFDRHTWSIEYRCVVYQHSRGRYPDRWEATCLVRRPEDDLRGAEAVSEHYSISERDTAEAAMQDAARRALSQYCSLFDGVADGLNLRYYPRRPTGSTESVVVSPVGEANPRLSSTVNLVAVLNTELDHSLDELSRARTEIAELRAELAERHHQEGGSPAPVGTQHPYRSPPRGHHTYGSPMSDNRRRCNRRAQLEQHDQQEENQRQPPPPPPMSVEQMFLMQTQAVQAIGQTLAAMQQAQQQPQPQLQVQMPQMPRDRRGEFMRGHPPTFAHSADPMDAEDWLRAVERELRTAQCDDREKVLYGPRQLRGAAQSWWESYLATHANPEAITWEEFSESFRRYHVPEGLMIVKKEEFLALKQGPLSVSEYRDKFLQLSRYAPEDVNTDAKRQYRFMRGLVDPLHYQLMNHTFPTFQHLIDRAVMTEKKRKDMEDRKRKMSGPQSGGISRPRFSGSSSQQGRPGHPQGYQNQNQRPHQQQFQRQYPQQQQYRQHSQQGGNQYQKQNNQAPRLPAPAANQSNQAAPAQGGGRGCFHCGEQGHWAMQCPKKMAQQQTNPNAPTRQGVLQPAAGNRNQAYNRGKVNHLEAEAIQDASDVAVGMFSIESHPAKVLFDTGATHSFVTATWVELHSISVEAMMPPMRINSVGGKVQTDKICSNIMVEIRGIGFPSDLIVIGTPGIDIILGMNWLMKYEANVSCDKRTITLKSPSGEEVVAELRMPKSEEGACHQISVDSKEPNPLEAIKVVSDFPDVFPEELTGMPPERKVEFAIELIPGTAPISKRAYRVSGPELVELKKQIDEMLEKGYIRPSTSPWAAPVLFVEKKDGTKRMCIDYRALNEVTVKNKYPLPRIEDLFDQLRGASEFSKIDLRSGYHQLRIRPSDIPKTAFITKYGLYEFTVMSFGLTNAPAFFMYLMNSVFMDYLDKFVVVFIDDILIYSQSEEDHVEHLKMVLQRLREHQLYAKLGKCEFWIHEVLFLGHIINQEGLAVDPKKVADILNWKAPKDVRGIKSFIGMAGYYRRFIEGFSKIARPMTALLAKKVEFKWTQKCQEAFEELKNRLTTAPVLVLPDVHKSFSVYCDASYTGLGCVLMQEGRVVAYSSRQLKIHEKNYPTHDLELAAVVHALKTWRHYLYGQKCDIYTDHKSLKYIFTQSELNMRQRRWLELIKDYELEIHYHPGKANVVADALSRKSQVNMLASHPMPYELAKEFDRLSLGFLNSTQGVTVELEPTLEREIKEGQKDDENINKIRQLILEGRGKDFREDEERVIWFKDRLCVPDLKPIRELILKEAHETAYSIHPGSEKMYQDLKRRFWWYGMKREIAEYVAICDSCQRTKAEHQRPAGLLQPLRIPQWKWDEIGMDFIVGLPRTRAGYDSIWVVVDRLTKVAHFIPVKTTYTGATLAELYMSRIVCLHGVPKKIVSDRGTQFTSHFWQQLQEALGTHLNFSSAYHPQTDGQTERTNQILEDMLRACALQDKSGWDKRLPYAEFSYNNSYQASLKMSPFQALYGRSCRTSLHWDQPGERQVFGPDILLEAEENIRMVRENLKTAQSRQRSYADRRRRELSFEVGDYVYLKVSPIRGVRRFGVKGKLAPRYVGPYQIQAKRGEVAYQLDLPESLSAVHNVFHVSQLKKCLRVPEEQLPVEGLEVQEDLTYIEKPTQILECADRVTRRNTIRMCKVRWGHHSEEEATWEREDDLKAKYPELFADQP

SEQ ID NO: 10475 - protein, 1428 aa, Zea mays
  Clone ID: TF_ZM3670.C6.o1.fg.pep
MTVEQMFLMQTQAVQAIGQTLAAMQQAQQQPQPQMQVQMPQMPRDKHGEFMRGHPPTFAHSADPMDAEDWLRAVERELRTAQCDDREKVLYGPRQLRGAAQSWWESYLATHADPEAITWEEFSESFRRYHVPEGLMIVKKEEFLALKQGPLSLMNHTFPTFQHLIDRAVMTEKKRKDMEDRKRKMSGPQSGSISRPRFSGSSSQQGRPGHPQGYQHQIQRPHQQQFQRQYPQQQQYRQNSQQGGNQYQKQNNQAPCLPAPAANQNNQAAPAQGGGRGCFHCGEQGHWAMQCPKKMTQQQTNPNAPTRQGVLQQAAGNRGQAYNRGKVNHLEAEAIQDAPDVAVGMFSVESHSAKVLFDTGATHSFVTATWVEMHNISVEAMMPPMRINSVGGKVQTDKICSNIRVEIRGIGFPSDLIVIDTPGIDVILGMNWLMKYEANVSCDKRTVTLKSPSGEEVVAELKMPKSAEGVCHQISVDSKETNPLEAIKVVSDFPDVFPEELTGMPPERKVEFAIELIPGTAPISKRAYRVSGPELVELKKQIYEMLEKGYIRPSTSPWAAPVLFVEKKDGTKRMCIDYRALNEVTVKNKYPLPRIEDLFDQLRGASVFSKIDLRSGYHQLRIRPSDIPKTTFITKYVLYEFTVMSFGLTNAPAFFMYLMNSVFMDYLDKFVVVFIDDILIYSQSEEDHVEHLKMVLQRLREHLLYAKLSKCEFWIHEVLFLGHIINQDGLAVDPKKVADILNWKAPKDVRGIKSFIGMAGYYRRFIEGFSKIARPMTALLAKKVEFKWTQKCQEAFEELKNRLTTSPVLVLPDVHKPFSVYCDASYTGLGCVLMQEGRVVAYSSRQLKIHEKNYPTHDLELAAVVHALKTWRHYLYGQKCDIYTDHKSLKYIFTQSELNMRQRRWLEFIKDYELEIHYHPGKANVVADALSRKSQVNMMATHPMSYELAKEFDRLSLGFLNSTQGVTVELEPTLEREIKEGQKDDENINKIRQLILEGRGKDFREDEEGVIWFKDRLCVPDLKPIRELILKEAHEIAYSIHPGSEKMYQDLKRRFWWYGMKREIAEYVAICDSCQRTKAEHQRPAGLLQPLRIPQWKWDEIRMDFIVGLPRTRAGYDSIWVVVDRLTKVAHFIPVKTTYTGATLAELYMSRIVCLHGVPKKIVSDRGTQFTSHFWQQLQEALGTHLNFSSAYHPQTDGQTERTNQILEDMLRACALQDKSGWDKRLPYAEFSYNNSYQTSLKMSPFQALYGRSSEENIKMVRENLKIAQSRQRSYADRRRRELSFEVGDYVYLKVSPIRGVRRFGVKGKLAPRYVGPYQIQAKRGEVAYQLNLPESLSAVHNVFHVSQLKKCLRVPEEQLPVEDLEVQEDLTYVEKPTQILEFADRVTRRNTIRMCKVRWGHHSEEEATWEREDDLKAKYPELFADQP

SEQ ID NO: 10476 - protein, 1834 aa, Zea mays
  Clone ID: TF_ZM4694.C3.o5.fg.pep
MARLRHTARKSVIPFLPSRLAERPLHRTVSGQSSHLERLHHRLREEQEHRRQHREQQGSSSPPQREVESVRPRSSVAQLEAPPAPPRDAPAVGGATGGDPDDDDSDHSTESSEPQEAEGWVARPITRDAARGCHFHDALDTLLRQAFDRHTWSIEYRCVVYQHSRGRYPDRWEATFLVRRPEDDLRGAEVVSEHYSISERDTAEAAMQDAARRALSQYCSLFGGVADGLNLRYYPRRPTGSTESVVVSPVGEGNPRLSSTVNLVAVLNTELDHSLDELSRARTEIAELRAELAERHHQEGGSPAPVGTQHPYRSPPRGHHTYGSPVCADATGVLSKSSMTSRRNNRGSLPHHPPMSVEQMFLMQTQAVQAIGQTLAAMQQAQQQPQPQLQVQMPQMPRDKRGEFMRGHPPTFAHSADPMDAEDWLRAVERELRTAQCDDREKVLYGPRQLRGAAQSWWESYLATHADPEAITWEEFSESFRRYHVPEGLMIVKKEEFLALKQGPLSVSEYRDKFLQLSRYAPEDVNTDAKRQYRFMRGLVDPLHYQLMNHTFPTFQHLIDRAVMTEKKRKDMEDRKRKMSGPQSGGTSRPRFSGSSPQQGRPGHPQGYQNQNQRPHQQQFQRQYPQQQQQYRQHSQQGGNQYQKQNNQAHRLPAPAANQSNQATPAQGGGRGCFHCGEQGHWAMQCPKKMAQQQTNPNAPTRQGVLQPAAGNRNQAYNRGKVNHLEAEAIQDAPDVAVGMFSVESHPAKVLFDTGATHSFVTATWVELHNISVEAMMPPMRINSVGGKVQTDKICSNIMVEIRGIGFPSDLIVIDTPGIDVILGMNWLMKYEANVSCDKRTVTLKSPSGEGVVAELRMPKSEEGVCHQISVDSKEPNPLKAIKVVSDFPDVFPEELTGMPPERKVEFAIELIPGTAPISKRAYRVSGPELVELKKQIDEMLEKGYIRPSTSPWAAPVLFVEKKDGTKRMCIDYRALNEVTVKNKYPLSRIEDLFDQLRGASVFSKIDLRSGYHQLRIRPSDIPKTAFITKYGLYEFTVLSFGLTNAPALFMYLMNSVFMDYLDKFVVVFIDDILIYSQSEEDHVEHLKMVLQRLREHQLYAKLGKCEFWIHEVLFLGHIINQDGLAVDPKKVADILNWKAPKDVRGIKSFIGMAGYYRRFIEGFSKIARPMTALLAKKVEFKWTQKCQEAFEELKNRLTTTPVLVLPDVHKSFSVYCDASYTGLGCVLMQEGRVVAYSSRQLKIHEKNYPTHDLELAAVVHALKTWRHYLYGQKCDIYIDHKSLKYIFTQSELNMRQRRWLELIKDYELEIHYHPGKANVVADALSRKSQLAKEFDRLSLGFLNSTQGVTVELEPTLEREIKEGQKDDENINKIRQLILEGRGKDFREDEEGVIWFKDRLCVPDIKPIRELILKEAHETAYSIHPGSEKMYQDLKRRFWWYGMKREIAEYVAICDSCQRTKAEHQRPAGLLQPLRIPQWKWDEIGMDFIVGLPRTRAGYDSIWVVVDRLTKVAHFIPVKTTYTGATLAELYMSRIVCFHGVPKKIVSDRGTQFTSHFWQQLQEALGTHLNFSSAYHPQTDGQTERTNQILEDMLRACALQDKSGWDKRLPYAEFSYNNSYQASLKMSPFQALYGRSCRTPLHWDQPGERQVFGPDILLEAEENIKMVRENLKTAQSRQRSYADRRRRELSFEVGDYVYLKVSPIRGVRRFGVKGKLAPRYVGPYQIQAKRGEVAYQLNLPESLSAVHNVFHVSQLKKCLRVPEEQLPVEGLEVQEDLTYKEKPTQILEFADRVTRRNTIRMCKVRWGHHSEEEATWEREDDLKAKYPGLFADQP

SEQ ID NO: 10477 - protein, 348 aa, Zea mays
  Clone ID: TF_ZM4711.C2.o1.fg.pep
MQQAQQQPQPQLQVQMPQMPRDKRGEFMRGHPPTFAHSAEPMDAEDWLRAVERELRTAQCDDREKVLYGPRQLRGAAQSWWESYLATHADPEAITWEEFSESFRRYHVPEGLMIVKKEEFLALKQGPLSVSEYRDKFLQLSRYAPEDVNTDAKRQYRFMRGLVDPLHYQLMNHTFPTFQHLIDRAVMTEKKRKDMEDRKRKMSGPQSGGISRPRFSGSSSQQGRPGHPQGYQNQNQRPHQQQFQRQYPQQQQQYRQHSQQGGNQYQKQNNQAPRLPAPAANQSNQAAPAQGGGRGCFHCGEQGHWAMQCPKKLAQQQANPNAPARQGVLQPAAGNRNQAYNRGKGANR

SEQ ID NO: 10478 - protein, 1437 aa, Zea mays
  Clone ID: TF_ZM4783.C6.o2.fg.pep
MPQMPRDKPGEFMRGHPPTFAHSADPMDAEDWLRAVERELRTAQCDDREKVLYGPRQLRGAAQSWWESYLATHADPEAITWEEFSESFRRYHVPEGLMIVKKEEFLALKQGPLSVSEYRDKFLQLSRYAPEDVNTDAKRQYRFMRGLVDPLHYQLMNHTFPTFQHLIDRAVMTEKKRKDMEDRKRKMSGPQTGGISRPRFIGSSSQQGRPGHPQGYQNQNQRPHQQQFQRQYPQQQQQYRQHSQQGSNQYQKQNNQAPRLPAPAANQSNQAAPAQGGGRGCFHCGEQGHWAMQCPKKMAQQQTNPNAPTRQGVLQPAAINRSQAYNRGKVNHLEAEAIQDAPDVAVGMFSIESHPAKVLFDTGATHSFVTATWVELHNISVEAMMPPMRINSVGGKVQTDKICSNIMGEIRGIGFPSDLIVIDTPGIDVILGMNWLMKYEANVSCDKRTVTLKSPSGEEVVAELRMPKSAEGVCHQISVDSKEPNPLEAIKVVSDFPDVFPEELTGMPPERKVEFAIELIPGTAPISKRAYRVSGPELVELKKQIDEMLEKGYIRPSTSPWAAPVLFVEKKDGTKRMCIDYRALNEVTVKSKYPLPRIEDLFDQLRGASVFSKIDLRSGYHQLRIRPSDIPKTAFITKYGLYEFTVMSFGLTNAPAFFMYLMNSVFMDYLDKFVVVFIDDILIYSQSEEDHVEHLKMVLQRLREHQLYAKLGKCEFWIHEVLFLGHIINQDGLAVDPKKSFIGMAGYYRRFIEGFSKIARPMTALLAKKVEFKWTQKCQEAFEELKNRLTTAHVLVLPDVHKSFSVYCDASYTGLGCVLMQEGRVVAYSSRQLKVHEKNYPTHDLELAAVVHALKTWRHYLYGQKCDIYTDHKSLKYIFTQSELNMRQRRWLELIKDYELEIHYHPGKANVVADALSRKSQVNMLASYPMPYELAKEFDRLSLGFLNSTQGVTVELEPTLEREIKEGQKDDESINKIRQLILEGRGKDFREDEEGVIWFKDRLCVPDLKPIRELILKEAHETAYSIHPGSEKMYQDLKRRFWWYGMKREIVEYVAICDSCQRTKAEHQRPAGLLQPLRIPQWKWDEIGMDFIVGLPRTRAGYDSIWVVVDRLTKVAHFIPVKTTYTGATLAELYMSRIVCLHGVPKKIVSDRGTQFTSHFWQQLQEALGTHLNFSSAYHPQTDGQTERTNQILEDMLRACALQDKLGWDKRLPYAEFSYNNSYQASLKMSSFQALYGRSCRTPLHWDQPGERQVFGPDILLEAEENIKMVRENLKIAQSRQRSYADRRRRELSFEVGDYVYLKVSPIRGVRRFGVKGKLAPRYVGPYQIQAKRGEVAYQLNLPESLSAVHNVFHVSQLKKCLRVPEEQLPVEGLEVQEDLTYIEKPTQILEFADRVTRRNTIRMCKVRWGHHSEEEATWEREDDLKAKYPELFADQP

SEQ ID NO: 10479 - protein, 1507 aa, Zea mays
  Clone ID: TF_ZM4932.C1.o2.fg.pep
MSDNRRRCNRRAQQEQHDQQEEQQRQPPPPPPMSVEQMFLMQTQAVQAIGQTLAAMQQAQQQPQPQLQVQMPQMPRDKRGEFMRGHPPTFAHSADPMDAEDWLRAVERELRTAQCDDREKVLYGPRQLRGVAQSWWESYLATHADPEAITWEEFSESFCRYHVPEGLMIVKKEEFLALKQGPLSVSEYRDKFLQLSRYAPEDVNTDAKRQYRFMRGLVDPLHYQLMNHTFPTFQHLIDRAVMTEKKRKDMEDRKRKMSGPQSGGISRPRFSGSSSQQGRPGHPQGYQNQNQRPHQQQFQRQYPQQQQQYRQHSQQGGNQYQKQNNQAPRLPAPAANQSNQAAPAQGGGRGCFHCGEQGHWAMQCPKKMAQQQTNPNAPTRQGVLQPAAGNRSQAYNRGKVNHLEAEAIQDAPDVAVGMFSVESHPAKVLFDTGATHSFVTATWVELHNISVEAMMPPMRINSVGGKVQTDKICSNIMVEIREIGFPSDLIVIDTPGIDVILGMNWLMKYEANVSCDKRTVTLKSPSGEEVVAELRMPKSEEGVCHQISVDSKEPNPLEAIKVVSDFPDVFPEELTGMPPERKVEFAIELIPGTAPISKRAYRVSGPELVELKKQIDEMLEKGYIRPSTSPWAAPVLFVEKKDGTKRMCIDYRALNEVTVKNKYPLPRIEDLFDQLRGASVFSKIDLRSGYHQLRIRPSDIPKTAFITKYGLYEFTVMSFGLTNAPAFFMYLMNSVFMDYLDKFVVVFIDDILIYSQSEEDHVEHLKMVLQRLREHQLYAKLGKYGLAVDPKKVADILNWKAPKDVRGIKSFIGMAGYYRRFIEGFSKIARPMTALLAKKVEFKWTQKCQEAFEELKNRLTTAPVLVLPDVHKSFSVYCDASYTGLGCVLMQEGRVVAYSSRQLKIHEKNYPTHDLELAAVVHALKTWRHYLYGQKCDIYTDHKSLKYIFTQSELNMRQRRWLELIKDYELEIHYHPGKANVVADALSRKSQVNMLASYPMSYELAKEFDRLSLGFLNSTQGVTVELEPTLEREIKEGQKDDESINKIRQLILEGRGKDFRDDEEGVIWFKDRLCVPDLKPIRELILKEAHETAYSIHPGSEKMYQNLKRRFWWYGMKREITEYVAICDSCQRTKAEHQRPAGLLQPLRIPQWKWDEIGMDFIVGLPRTRAGYDSIWVVVDRLTKVAHFIPVKTTYTGATLAELYMSRIVCLHGVPKKIVSDRGTQFTSHFWQQLQEALGTHLNFSSAYHPQTDGQTERTNQILEDMLRACALQDKSGWDKRLPYAEFSYNNSYQASLKMSPFQALYGRRCRTPLHWDQPGERQVFSPDILLEAEENIKMVRENLKIAQSRQRSYADQRRRELSFEVGDYVYLKVSPIRGVRRFGVKGKLAPRYVGPYQIQAKRGEVAYQLNLPESLSAVHNVFHVSQLKKCLRVPEEQLPVEGLEVHEDLTYIEKPTQILEFADRVTRRNTVRMCKVRWGHHSEEEATWEREDDLKAKYPELFADQP

SEQ ID NO: 10480 - protein, 1595 aa, Zea mays
  Clone ID: TF_ZM4940.C2.o21.fg.pep
MLALPRLSAEVLSFCSLLVTLLRGGMARLRHTARKSVIPFLPSRLAERPLHRTVSGQSSHLERLHHRLREEQERRRQHGEQQGSSSSPQQEVETVRPRSSVAQLEAPLVPPRDVPAVGGATGGATGGDPDDDDSDHSTESSEPQEAEGWVARPITRDAARGCHFHDALDTLLRQAFDRHTWSIEYRCVVYQHSRGRYPDRWEATCLVRRPEDDLRGAEAVSEHYSISERDTAEAAMQDAARRALSQYYSLFGGVADGLNLRYYSRRPTGSTESVVVSPVGEGNPRLSSTVNLVAVLNTELDHSLDELSRARTEIAELRAELAERHHQEGGSPAPVGTQHPYRSPPRGHHTYGSPIVRSMLMCECLPQMSDNRRRCNRRAQLEQHDQQEENQRQPPPPPPMSVEQMFLMQTQAMQAIGQTLAAMQQAQQQPQPQLQVQMPQMPRDRRGEFMRGHPPTFAHSADPMDAEDWLRAVERELCTAQCDDREKVLYGPRQLRGAAQSWWESYLATHANPEAITWEEFSESFRRYHVPEGLMIVKKEEFLALKQGPLSVSEYRDKFLQLSRYAPEDVNTDAKRQYRFMRGLVDPLHYQLMNHTFPTFQHLIDRAVMTEKKRKDMEDRKRKMSGPQSGGTSRPRFSGSSSQQGRPGHPQGYQNQNQRPHQQQFQRQYPQQQQYRQHNQQGGNQYQKQNNQAPRLPAPAVNQSNQAAPAQGGGRGCFHCGEQGHWAMQCPKKMAQQQTNPNAPTRQGVLQPAAGNRNQAYNRGKVNHLEAEAIQDAPDVAVGMFSVESHPAKVLFDTGATHSFVTATWVELHSISVEAMMPPMRINSVGGKVQTDKICSNIMVEIRGIGFPSDLIVIGTPGIDVILGMNWLMKYEANVSCDKRTITLKSPSGEEVVAELRMPKSEEGVCHQISVDSREPNPLETIKVVSDFPDVFPEELTGMPPERKVEFAIELIPGTAPISKRAYRVSGPELVELKKQIDEMLEKGYIRPSTSPWAAPVLFVEKKDGTKRMCIDYRALNEVTVKNKYPLPRIEDLFDQLRGASVFSKIDLRSGYHQLRIRPSDIPKTAFITKYGLYEFTVMSFGLTNAPAFFMYLMNSVFMDYLDKFVVVFIDDILIYSQSEEDHVEHLKMVLQRLREHQLYAKLGKCEFWIHEVLFLGHIINQDGLAVDPKKVADILNWKAPKDVRGIKSFIGMAGYYRRFIEGFSKIARPMTALLAKKVEFKWTQKCQEAFEELKNRLTTAPVLVLPDVHKSFSVYCDASYTGLGCVLMQEGRVVAYSSRQLKIHEKNYPTHDLELAAVVHALKTWRHYLYGQKCDIYTDHKSLKYIFTQSELNMRQRRWLELIKDYELEIHYHPGKANVVADALSRKSQVNMLASHPMPYELAKEFDKLSLGFLNSTQGVTVELEPTLEREIKEGQKDDENINKIRQLILEGRGKDFREDEEGVIWFKDRLCVPDLKPIRELILKEAHETAYSIHPGSEKMYQDLKRRFWWYGMKREIAEYVAICDSCQRTKAEHQRPAGLLQPLRIPQWKWDEIGMDFIVGLPRTRAGYDSIWVVVDRLTKVAHFIPVKTTYTGATLAELYMSRIVCLH

SEQ ID NO: 10481 - protein, 352 aa, Zea mays
  Clone ID: TF_ZM4516.C1.o1.fg.pep
MEVLSTMTPIIVIGKIAAFEMSGKMGRQEEPTSSRPYAFACDERKDKKKAPTPSSSSEEESRIFTLTLTRKSKEREDASHVGRRATLGTIVQIWPNPQRGGAKARSLQVSKLGMTLQAKMNLQGRATTDPHHGHRTSALWQELSTKIEQLESSAPSTATDDGLIKKNEKLKAKLASSQEAIENLLEKMEILSIHNDELTTKLENIGSTPEVSLVEIPEIIKKDASTSCLDVIDNSNHCNQVLVKNVVIETYSDEIAMENEQLKQEVYHLGNALYDKKGKAKQIQPPQDNTTAGVNKPMEGETVICRLCHKENHKSFQCKAKTGISKSSNKIRQAKSPTPTSTRWTKRLLHHT

SEQ ID NO: 10482 - protein, 534 aa, Zea mays
  Clone ID: TF_ZmC4916_400.pep
MDPKGKGMVVNDKEKKSFLNEPRDDKPTDSSSSHKKKDGKKKRRIKKIVYYDSDASSSSPRDDDDDDSSLKKKTDTLKISHEGNDATMITKMELVEGELGRFAMIRGEEPTQTYNRLKTLVNKIRSYGSTRWTDHDVVRLMLRSFTVIDPHLVNLIRENPRYTKMTPEEILGKFVSGRMMVKEARHMDDALNDPLPIYESQPVALKATSSKEALPSKVAQVEAADLNKDEMALIIKRFKTALRGRMEYPNKNKTKGKRSCFKCGKTGHFIAQCLDNENDQGQERHGKKEKKKSYRKAKGEAHLGKEWDSDCSSSDSDDEGLAASAFDKSSLFPNERHTCLMAKEKKVNVRETPKYTTSSDDDSSDDEVDYSSLFKGLDRVKVEKINELIDALNEKDRFLEKQEDILYEELDKFVSVQKSLALETKRNEMLSSELSACHESISSLKILNDDLNAKIEEVNKSSSCVEHVVICNRCKDFDVDTCNEHLIAITKLNDEVSSLNAQLKTCKSDFEKLKFARDAYTIGRHPSIKDGFGF

SEQ ID NO: 10483 - protein, 1782 aa, Zea mays
  Clone ID: TF_ZmC4916_381.pep
MDPKGKGMVVNNKTKESIVNESRDDKPSDSGLSHNKDGKKKRHIKKIVYYDSDKSSSPRDNEYEEKKKMFNSNAHLLSIPLGKPPHFDGEDYPFWSHKMRSHLFSLHPSIWEIVKNGMLFDSTDNPVFINEQIHKNAQATTVLLASLCRDEYNKMELVEGELGRFAMIRGEEPTQTYNRLKTLVNKIRSYGSTRWTNHDVVRLMLRSFTVLDPHLVNSIRENPRYTRMTPEEILGKFVSGRMMIKEARYVDEALNGPMPIYEPQTVALKATSSREALSSKVAQVEAARLNEDEMALIIKRFKTALKGRKEHPNKSKTKGKRSCFKCGKTGHFIANCLDNDSDQGQEKSEKREKKKSYKKAKGEAHLGKEWDLDCSSSDSDDEGLAASSFNKSSLFPNERHTCLMAKEKKVNARDTPMYASSSDNESSDDEVDYTGLFKGLDRTKIDKTNKLIDALNEKHRLLEKQEDILYEEHDKFISVQKSLALEVKRNEMLSFELSTCHETVSSLRSINDDLNAKLEVVNKSSSCVEHVVICNRCKDFDVDACVEHLTSITKLNGEVASLNAQLKTSKNDFDKLKFARDAYTVGKHPSIKDGLGFRKEAKNLTSQRAPISAQEKGKAPMANSAQRNHAFIYSDRKFSRNAHRSYAYDSHAMIASSSSFVHGRNMPRKNVAHVPRKVCNEPSTIYHACNTSFAICRKNKKVIARKLGAKCKGDKTCIWVPKSIITNLAGPNKSWVYASGGSSWIIDSECTNYMTGEKKMFTSYVKNKDSQDTIIFGDGDQGKVKGLGKIAITNEHSISNVFLVESLGYNLLFVSQLCHMGYNCLFTNVDVSVFRRSDGSLAFKGVLDGKLYLADFSKEDADLDTCLIAKTSMGWLWHRRLAHVGMKNLHKLLKGEHVLGLTNVFFEKDRPCAACQAGKQVGSTHHSKNVMTTSRPLELLHMDLFGPVAYLSIAGSKYGLVVVDDFSRFTWVFFLQDKSGTQGTLKRFLRRAQNEFELKVKKIRSDNGSEFKNLQVEEFLEEEGIKHEFSAPYTPQQNGVVERKNMTLIDMARTMLGEFKTPERFWSKAVNTACHATNRVYLHLLLKKTSYELLTGNKPNVSYFRVFGSKCYILVKKGRNSKFAPKAVEGFLLGYDSNTKAYRVFNKSSGLVEVSSDVVFDETNGSPREQVDLDDVPTDAIRTMAIGDVRPQEHQQQDQPSSSTMVHPPTQDDEQVPQEEACDQGGAQNVQDVEEEAPQAPPTQVRVTIQRNHAIDHILGDISKGVTTRSRLANFCDHYSFVSSIEPFRVEEALLDPDWVLAMQEELNNFKRNEVWTLVPRPKQNVVGTKWVFRNKQDEHGVVTRNKARLVTKGYAQVAGLDFEETFAPVARLESISILLAYVAHHSFRLFQMDVKSAFLNGPIKEEIYVEQPPGFEDERYPDHVCKLSKALYGLKQAPRAWYECLRDFLIANAFKVGKADPTLFTKTCDGDLFVCQIYVDDIIFGSTNQKSCEEFSRLNYFLGFQVKQLKDGTFISQTKYTQDLLKRFGMKDAKPAKTPMGTDGHVDLNKGGKSVDQKAYRSMIGSLLYLCASRPDIMLSVCMCARFQSDPRECHLVAVKRILRYLVATPCFGIWYPKGSTFDLIGYSDSDYAGCKVDRKSTSGTCQFLGKSLVSLSSKKQTSVILSTAEAEYVAAGQCCAQLLWMRQTLRDFGYNLSKVPLLGDNESAIRMADNPVEHSRTKHIGIQHHFLRDHQQKGDIEVFYVSTENQLAVIFTKPLDEKTFCRLRSELNVIDSRNLD

SEQ ID NO: 10484 - protein, 1654 aa, Zea mays
  unsure (1)..(1654): unsure at all Xaa locations
  Clone ID: TF_ZmC6526_1.pep
MVAVACTGPRRHQTQRAGLQWRLGGPCRRRRLAERPRPPLPRRPVPQDLRGRCFNCLATSHRAAACRHPSCCLRCRRPGHRAAECPGADRGHDVTKVLSGGPDLHPLVARRLNVASASSGGRPVWERLGSQPVEVSVPFSKRRLVWRRVSPPMDHGRHAAAEDGPGQSMNHTKKGRHRTRGRRPRSRSAASLPPVDDDSSARLPSHQSAVVKNAGSAARPVCVLERARDLTLVENNLRHCALFVVVIGSRPPVTAELLAAEIAAEYELDPASFSVHRSVPEDFVIIMQNEQAVLRVFNNGAVLNSPSGSFKFIKWSRLAHAEAVSLPSFVSVSFEGVPLHAWSVETARSLLRAHCTALELHPDTVARLNFSSFRVLGWSRHPELIPVAVDLLILKPVQSFEVETTVKHLLAYQVMASVSLISPSAGDVSPPPSPPASNDDRDTRSRRRRLQQASPARQGGPVEALAVRRPVHERLGPLPICPRHVAISQEVLEQEVSKEASLNGSSNLEEHIPAVKELNIGAMIEASEDNVESNGRRHEQACMVEAGASGLSGGCPSHSPLPVPSSPSSPLRAPAVCCSMGGCEKEQAIQVLPPGSPSRATFDMGGQKSALVDARTSSRLSRRSPIITYFRQRRKKDSQPSLLLGASPSPPSGAKEFIDKLTRPAGGILRAPVRRPRQGKATATEVVPRHNRRVAGAGVERLATPPPATQGKKHILKELGIVNAEETVTIRPKDLDEYARVFSKGLSEVQTKMVDVSRFLVLRMLGPAFDNFVFLPSVGASGGILVAWKNSIGICAGSRVNDHSVSVNFHSSTSPPWWLTCVYGPQGNQEKIQFLQSLREIRALCNGPWLVLGDFNPILREEEKNNNNLDRAMMGRFRRWANDLALNEIPLIGRKYTWSNGPCPPITLAKKLKATARSLQSWNDKKAGKIKQKLEMARELLHQLEVAQDNRSLSHAELWLRNMLKKHSLALSSISRTVARLKSRIGWLNEGDANTSLFHAQTRFRKKKNFIAAIHSEDGQIWTAHEGNAAAFFNFYQGLLGTAEVRDVTVDLDALGMPSFDLVALDAPVSEEEVWDTIKALPSDKSPGPDGFTGRFYKSCWSVIMADFMAAIHCIWARNFRNLGSLNSAFITLLPKVEGATSVRDFRPISLVHSFAKVVTKLLANRLADRLQNMVSPNQTAFIKKRFILDNFMLVQQTTRFLHCQKQARILLKLDISKAFDSRASEEGFLQPLPSRNMQDRISLYAGDAVVFLYPTDRVITMVMAIQQKSGRDSLLKMLGEQNRLIPIAFCXAVTSTMDETQEIIDKASIRLAWESAAAVTRTGSSLYAEYVMTAKVMYVALPLVLPDFAFKAIEMLRKFFFLSYREXFLLFIASRGGLRLAVPSSWMILGLNSXNNLCWELSPSRAWEPRTPPSKPWADLPSHVCXGVNNLFAAALLSKIGHVENRLIXRSNAYSGGXLKEIVAAIFDLMTXVSSQHMVVXDALPHFASILDSHALISIGVAAELLELCELLFAVVLLQRIXRDHHXLISAPGAYTSFYVYNALFLGSVQFEPAERVWKSWAPGKCTFFLWIVEQRRCSAAATFGQGWLERPERCPMXSQEGENIIYLVFECVLAKQFWFDYLYEVALPGLYRAHKKYLDSYRKSSISRASDR

SEQ ID NO: 10485 - protein, 1253 aa, Zea mays
  unsure (1)..(1253): unsure at all Xaa locations
  Clone ID: TF_ZM3738.C20.o2.fg.pep
MITKMELVEGELGRFAMIRGEEPTQTYNRLKTLVNKIRSYGSTRWMDHNVVRLMLRSFTVLDPHLVNSIRENPRYTKMTPEEILGKFVSGCMMIKEARYVDEALNGPMPIYEPQTVALKATSSREVLPSKVAQVEAAGLNEDEMALIIKRFKTALKGRKEYSNKNKAKGKRSCFKCGKTGHFIANCLDNSSDQEQGKGGKKEKQKSYRKAKGEAHIGKEWDSDCSSSDSDDEGLAAXAFNKSFLFPNERHTCLMAKEKKXDDEVDYTELFKGLDRSKVDKINELIDALNEKDRLLERQEDILYEEHDKFVSVQKSLALELKRNELLSSELSTCNETVASLKSINDDLNAKLEVVNKSSSCVEKIVICNRCKDFNVDACDEHLISISKLNDEVASLNAQLKTCKSDFDKLKFARDGYTVGRHLLIKDGLGFKKEAKNLTSQRAPIFNKEKGKAPMASCIQKNHAFIYHRKVSRNTHYNRSYGAYDSHAMIASSSTFVHGRSRPRKGNVIHHVPNKMPNESATVFHACNTDFVLSCKNKKVVARKLGAKCKGDKTCIWVPKDIVTNLVGPNKSWVYASGGSSWIIDSGCTNHMTGEKKMFSSYVKSKDSQDSIIFGDGNQGKVKGIGKIAISSEHSISNVFLVESLGYNLLSVSQLCNMGYNCLFTNIDVSAFRRSDGSLAFKGVLDDKLYLVNFSKEEADLDACLIAKTSMGWLWHHRLAHVGMKNLQKLLKGEHVLGLTNVSFEKDRPCGACQAGKQVGSTHHNKNVMTTARPLELLHMDLFGPVAYLSIGGSKYGLVIVDDFSRFTWVFLLQDKTETQGTLKRFLRRAQNEFELKVKKIRSDNGSEFKNLQVEEYLEEEGIKHEFSAPYTPQQNSVKGRNSKFTPKVVEGFLLGYDSNTKAYRVFNKSSGLVEVSSDVVFDETNGSPREQVDLDDVDEDDVPTDAIRTMAIGNPFRIEEALLDSDWVLAMQEELNNFKRNEVWTLVPCPKQNVVGTKWVFRNKQDEHGVVTRNKARLVAKGYAQLAGLDFEETFAPVARLESIRILLAYATHHSFRFQSDLRECHLVAVKRILRYLVAMPCFGIWYPKGSTFDLIGYSDSDYAGCKVDRKSTSGTCQFLGRSLVSWSSKKQTSVAISTAEAEYVAEGQCCAQLLWMRQTLRDFGYNLSKVPLLCDNESAIRMGGQSWLNTTRTKHIDIRHHFLRDHQQKGDIEVFYVSTENQLADIFTKPLDEKTFCRLRSELNVLDSCNLD

SEQ ID NO: 10486 - protein, 502 aa, Zea mays
  Clone ID: TF_ZM4936.C1.o6.fg.pep
MELVEGELGRFAMIRGEEPTQTYNRLKTLVNKIRSYGSIRWTDHDVVRLMLRSFTVIDPHLVNLIRENPRYTKMMPEEILGKFVSERMMQPVAGRRCQVPSKVAQVEAASLNEDEMALIIKRFKTALKGRKEYPNKSKTRGNRSCFKCSKTGHFIANCPDNVNDQEQEKSGKKEKKKSYRKAKGEAHLRKEWDSDCSSSDSDDEGLAASAFNKSSLFPNERHTCLMAKEKKVIVRETPKYTTSSDDDSSDDEVDYTDLFKGLDRAKVDKINELIDSLNEKDRLLEKQEDILYEEHDKFVSVQKSLALETKRNEMLSSELSVCHESISSLKILNNDLNAKLEVANKSSSCVEHVVVCNRCKDFDIDACDKHLASITKLNDEVASLNAQLKTCKIDFDKLKFARDAYTVGRHPSIKDGLGFRKEAKNLTSQRAPIPNKEKGKAPMASSIQRNHAFIYDRKCSRNVHYNRSYVDYNDSHATFASSSTFVHGRPRKSNGVHHVPRR

SEQ ID NO: 10487 - protein, 560 aa, Zea mays
  Clone ID: TF_ZmC119_1513.pep
MDPKGKGMVVNDKEKESFVNDPKDDKPTDSGSSHKRKDGKKKKTRRIKEIVYYDDSDESSSSQKDDDNYEKKKTVNSNFSFDYSRIPQNTNAHLLSIPLGKPPHFDGEDYGFWSHKMRSHLFSLHPSIWEIVESGMQFDSSDSPMFINEQIHKNAQATTVLLASLCKDEYHKASGLDNAKKIWDTLKISHEGNDVTMLTKMELVEGELGRFAMIKGKEPTQTYNRLKTLVNKIRSYGSTRWTDHDVVRLMLRSFTVLDPHLVNNIRENPRYTKMTPEEILGKFVSGRMMIKEARYVDDALNGPIHEPQTVALKATRSKEALPSKVAQVEAAGLNEEEMALIIKRFKTALRGRKEHPNKTKTKGKHSCFKCGKIGHFIANCPDNDSDQEQGNKREKKKAYKKAKGEAHLGKEWDSDCSSSDSDNEGLAATAFNKASLFSNEHHTCLMAKEKKVNSRKSTYASSSEDESSDDDEIDYASLFKGLDRTKIDQINELIDALNDKNRLLEKQEDLLYDEHDKFVEAQNSLALEIKRNEMLSCELSTCHDSISSLKSVGVSRPGGP

SEQ ID NO: 10488 - protein, 1572 aa, Zea mays
  Clone ID: TF_ZmC119_745.pep
MDPKGKGMVVNDKEKESFVNDPKDDKPTDSGSGHKRKNGRKKKTRRIKEIVYYDSDKSSSSQKDNDNDYEKKKTVNSNFSFDYSRIPQSSNAHLLSIPLGKPPTLMERTMDFGVTKCVATCSLSIQVSGLDNAKQIWDTLKISHEGNDVTMLTKMELVEGELGRFAMIRGEEPTQTYNRLKTLVNKIRSYGSTRWTDHDVVRLMLRSFTVLDPHLVNNIHENPRYTKMTSEEILGKFVSGRMIIKEARYVDDALNGPIHEPQTVALKATRSKEVLPSKVAQVEAAGLNEEEMALIIKHFKTALRGRKEHPNKTKTKGKHSCFKCGKIGHFIANCPDNDSDQEQGNKREKKKAYKKAKGEAHLGKEWDSDCSSSDSDNEGLAATAFNKSALFPNEHHTCLMAREKKVSTRDTSTYASSSDEESSDDEIDYSCLFRGLNRTKVDKINELIDALNDKNRLLKKQEDLLYEEHDKFVEAQKSLALEIKRNEMLSDELSTCHDSISSLKSINDDLNAKLEIANRSTSCVEHVAICNRCKDFNVDACSEHLVSISNLNDEVASLNAQLKTSKSEFDKLKFARDAYTIGRHPSIKDGLGFKREVKNLTSHMASISAKEKGKAPMASSAQKNHAFMYHDRRHSRNVYRSYDAHAMIASSSSIMHDRNLAKKNVVHHTPRRNIVHVPRKIMNEPSTIYYACNASFAICRKDKKVYASGGSSWIIDSGCTNHMTEEKRMFSSYVKNKDPQDSIIFGDGNQGKVKGLGKIAISSEHFISNVFLVESLGYNLLSVSQLCNMGYNCLFTNVDVSVFRRSDGSLAFKGVLDGKLYLVDFAKEEVGLDACLIAKTSMGWLWHRRLAHVGMKNLHKLLKGEHVIGLTNVTFEKDRPCAACQAVDDFSRFTWVFFLQDKSETQGTLKRFLRRAQNEFELKVKKIRSDNGSEFKNLQVEEYLEEEGIKHEFSAPYTPQQNGVVERKNRTLLDMARTMLGEFKTPERFWTEAVSTACHAINRVYLHRLLKKTSYELLTGNKPNVSYFRVFGSKCYILVKKGRNSKFAPKAVEGFLLGYDSNTKAYRVFNKSSGLVEVSSDVVFDETNGSPREQVVDLDDVNEEDVPTAAMRTMAIGDPFRVEEALLDPDWVLAMQEELNNFKRNEVWTLVPCPKQNVVGTKWVFRNKQDEHGVVTRNKARLVAKGYAQVAGLDFEETFAPVARLESIRILLAYATHHSFKLFQMDVKSAFLNGPIKEEVYMEQPPGFEDERYPDHVCKLSKALYGLKQAPRAWYECLRDFLIANAFKVGKADPTLFTKTCDGDLFVCQIYVDDIIFGSTNQKSCEEFSRVMTQKFEMSMMGELSYFLGFQVKQLKDGTFISQTKYTQDLIKRFGMKDAKPAKTAMGTDGHTDLNKGVATPCFGIWYPKGSTFDLIGYSDSEYAGCKVDRKSTSGTCQFLGRSLVSWSSKKQTSVALSTAEAKYVAAGQCCAQLLWMRQTLRDFGYNLSKVPLLCDNESAIRMADNPVEHSRTKHIDIRHHFLRDHQQKGNIEVFYVSTENQLADIFTKPLDESTFCRLRSELNVLDSRNLD

SEQ ID NO: 10489 - protein, 554 aa, Zea mays
  Clone ID: TF_ZmC33526_1.pep
MELVEGELGRFAMIRGEEPTQTYNRLKTLINKIRSYGSTRWTDHDVVRLMLRSFTVLDPHLVNNIRENPRYTKMMPEEILRKFVSGRMMIKEARYVDDALNGPIQEPQTIALKATRSKETLPSKVAQVEAAVLNDEEMALIIKRFKAALKGRKGQPNKNKTKGKHSCFKCGKIGHFIANCPDNDSDQEQGNKREKKKAYKKAKGEAHLGKEWDSDCLLFDSDNEGLAATAFNKSSLFPNEHHTCLVAREKKVSTRNTSTYASSSDEESSDDEIDYSCLFKGLDRTKVDKINELIDALNDKNRLLEKQEDLLYEEHDKFVEAQKSLALEIKRNEMLSCELSTCHDSISSLKSINDDLNAKLEIANKSTSCVEHVAICNRCKDFNVDACSEHLVSISKLNDEVASLNAQLKTSKSEFDKIKFARDSYTIGRHPSIKDGLGFKREVKNLTSHKVSISAKEKGKAPMSSSVQKNHAFMYHDRRHSRNNYRSYDAFNSHAMTASSSSIMHDRNLTRKNVIHHMPKRNVTHVPRKINEPSINYHTGNASFAICRKDRLGI

SEQ ID NO: 10490 - protein, 1182 aa, Zea mays
  unsure (1)..(1182): unsure at all Xaa locations
  Clone ID: TF_ZmC4916_452.pep
MDPKGKGIVINDKKKESFVNEPKDDKPTDSGLGHKRKDGKKKKTRRIKEIIYYDDNDESTSSHKDNDDNDYDKRKTVNSNFSFDYSRIPHSSNAHLLSIPLGKPPHFDGEDYGFWSHKMDEYHKVSGLDNAKQIWDTLKISHEGNDVTLLTKMELVEGELGRFAMIRGEEPTQTYNRLKTLINKIRSYGSTRWMDHDVVRLMLRSFTVLDPHLVNNIRENPRYTKMSPEEVLGKFVSGRMMIKEARYVDDALNGPINEPQPFALKATRSKEALPSKVAQVEAAGLSDEEMALIIKRFKTALKGHKGQPSKTKTKGKHSCFKCGKIGHFIANCPDNDSDQEQGNKREKKKTYKKAKGEAHLGKEWDSDCSSSDSDNEGLAATAFNKSSLFPNERHTCLMAKEKKVYASGGSSWIIDSGCTNHMTGEKKMFTSYVKNKDSQDSIIFGDGNQGKDKSETQGTLKRFLRRAQNEFELKVKKIRSDNGSEFKNXQVEEFLEEKGIKHEFSAPYTPQQNGVVERKNRTLIDMARTMLGEFKTPECFWSEAVNTACHAINRVYLHRLLKKTSYELLTGNKPNVSYFRVFGSKCYILVKKGRISKFTPKVVEGFLLGYNSNTKAYRVFNKSSGLVEVSSDVVFDETNGSPREQVVDLDDVDDEDVPTAAIRTMTIGDVRPREQLEQDQPSSSTMVHPPTQDDEQVHQKEACDQWGAQDDHVMEEEAQPTPPTQVRAVIQRDHPVDQILGDISKGVTTRSRLVNFCEHYSFVSSIEPFRVEEALLDPDWVLAMQEELNNFKRNEVWTLVPRPKQNVVGTKWVFRNKQDEHGVVTRNKARLVAKGYAQVAGLDFEETFAPVARLESIRILLAYAAHHSFRLYQMDVKSAFLNGPIKEEVYVEQPPGFEDERYPDHVCKLSKALYGLKQAPRAWYECLREFLIANAFKVGKADPTLFTKTCDGDLFVCQIYVDDIIFGYTNQKSCKEFSRVMTQKFEMSMLGELNYFLGFQVKQLKDGTFISQTKYTQDLLKRFGMKDAKPAKTPMGTNGHTDLNKGSKSVDQKAYRSMIGSLLYLCASRPDIMLSVCMCARFQSDPKECHLVAVKRILRYLVATPCFGIWYPKGSNFDLIGYSDSDYAGCKVDRKSTSGTCQFLGRSLVSWNSKKQTSVALSTAEAEYVAAGQCCAQLLWMR

SEQ ID NO: 10491 - protein, 513 aa, Zea mays
  unsure (1)..(513): unsure at all Xaa locations
  Clone ID: TF_ZM4334.C2.o14.fg.pep
MDAQYDVTQEWLDRVKIARKGLRGTKRSLRSVCASVWQSDWQTGCQLWYYIEFFVDSLLLELVAPRRLGVSYIDPRAIDLAMKIAERMFLKMKEDEAKNKIEEEENDRWRPNDESTSSQANGSDSESESENEEEHESDSEDEDDLQKFFAQLSKKNRMSLLKLMKRAEEQKEMLHKQEDVLIEKIKDLEKLTKEHEKLKCSHDDLVQRYEDISIEQIKAIKHSSYIAQLENKNAMLKNTVERLNIENLALQEKHDMLVCSHNKFMDSHIMLEMAHEVVLTNLKSCQPHICTCTQIETILPCANNCCYQASQSSIELEISGISDISITQENKELKEENERLKRSLTILKGKCHAQPSQDNRDNMVKKLEKGTTVACTKPLQKNTKLSKKGMSKIHGKKINAHTICSNNVPMCFNKERSKRSDRRCYGCKEKGHEIDSCPHMKNQDLAGSRNMTIKKDESKRQMLCKDKHHICYNCREKGHLFKDCPMSKYPKPTMSILSYSLRXTQNDICARKV

SEQ ID NO: 10492 - protein, 1629 aa, Zea mays
  Clone ID: TF_ZM4354.C13.o2.fg.pep
MDPKGKGMVVNDKEKESFVNDPKDDKPTDSGSSHKRKDGKKKKTRRIKEIVYYDDSDESSSSQKDDDNYEKKKTFNSNFSFDYSRIPQSTNAHLLSIPLGKPPHFDGEDYGFWSHKMRSHLFSLHPSIWEIIESGMQFDSIDSPIFINEQIHKNAQATTVLLASLCRDEYHKVSGLDNAKQIWDTLKISHEGNDVTMLTKMELVEGELGRFAMIRGEEPTQTYNRLKTLVNKIRSYGSTRWTDHDVVRLMLRSFTVLDPHLVNNIRENPRYTKMSPEEILGKFVSGLMMIKEARYVDDALNGPIHEPQTVALKATRSKEVLPSKVAQVEAAGLNEEEMALIIKRFKTALRSRKEHPNKNKTKGKHSCFKCGKIGHFIANCPDNDSDQEQEKKREKKKAYKKAKGEAHLGKEWDSDCSSSNSDNEGLAASAFNKSSLFPNEHHTCLMAKEKKVNTRKSTYASSDDESSDDEIDYASLFKGLDRTKIDKINELIDALNDKNRLLEKQEDLLYEEHDKFVEAQKSLALEVKRNEMLSCELSTCHESISSLKSVNDDLNAKLEIASKLTSREEHVTICNRCKDFNVDACSEHLVCISKLNDEVASLNAQLKTSKNDFDKLKFARDAYTVGRHPSIKDGLGFKREAKNLTSHKAPISAKEKGKAPMTHNSQKNHAFIYGDKRYSRNVHRSCNDSNAMFASSSSYVHGRDMPRRNVIHHVPRRNVHVPRKINEPSTIYHACNASFAICRKDKKVIARKLGAKCKGDKTCIWVPKDIVTNLVEPNKSWVYASGGSSWIIDSGCTNHMTGEKKMFTSYVKNKDSQDSIIFGDGNQGKVKGLGKIAISSEHSISNVFLVESLGYNLLSVSQLCNMGYNCLSTIVDVSVFRRSDGSLAFKGVLDGKLYLVDFAKEEAGLDACLIAKTSMGWLWHRRLAHVGMKNLHKLLKGEHVIGLTNVTFEKDRPCAACQAGKHVGSSHHTKNVMTTSRPLELLHMDLFGPIAYLSIEGSKYGLVIVDDFSRFTWVFFLQDKSETQGTLKRFLRRAQNEFELKVKKIRSDNGSEFKNLQVEEYLEEEGIKHEFSAPYTPQQNGVVERKNRTLIDMARTMLGEFKTPERFWLEAVNTACHAINQVYLHRLLKKTSYELLTGNKSNVSYFRVFGSKCYILVKKGRNSKFAPKAVEGFLLGFDSNTKAYRVFNKSSGLVEVSSDVVFDETNGSPREQVVDLDDIDEEDIPTVAIRTMAIGEVRPQEQKEQDQPSSSTMVHPPTQDDEQPFRVEEALLDPDWVLAMQEELNNFKRNEVWTLVPHPKQNIVGTKWVFRSKQDEHGVVTRNKARLVAKGYAQVAGLDFEETFAPVARLELFQMYVKSAFLNGPIKEEVYVEQPPGFEDERYPDHVCKLSKALYGLKQAPRAWYECLRDFLIANAFKVGKADPTLFTKTCDGDLFMCQIYVDDIIFGSTNQKSCEEFSRVMTQKFEMSMMGELNYFLGFQVKQLKDGTFISQTKYTQDLLKRFGMKDAKPAKTPMGTDGHVDLNKGGQCCAQLLWMRQTLRDFGYNMSKVPLLCDNESAIRMADNPVEHSRTKHIDIRHHFLRDHQQKILVRQWGSRAKIDPVLVLDAKGGENKAKATNGSATT

SEQ ID NO: 10493 - protein, 970 aa, Zea mays
  Clone ID: TF_ZM4499.C1.o3.fg.pep
MEWVFLRKKILGDISVEYLGSISEKNLKGITREISGRASLRKFQDLNFWDATWTDHDVVRLMLRSFAVLDPHLINNIRENPRYTKMSAEEILGKFRFKTALKGRKEHPNKNKTKGKHSCFKCGKIGHFIANCPDNDSDQEQEKKRENKKSYKKAKGEAHLGKEWDSDCSSSDSDNEGLAASAFNKSSLFPNEHHTCLMAKEKKVNTRKSTYASSDDESSDDEIDYASLFKGLDRTKIDKINELIDALNDKNRLLENQEDLLYEEHDKFVEAQNSLALEVKRNEMLSCELSTCHESISSLKGVNDDLNAKLEIASKSTSREELVTICNRCKDFNVDACSEHLVCISKLNDEVASINAQLKTSKNDFDKLKFARDAYTVGRHPSIRDGLGFKREAKNLTSHKAPITAKEKGKAPMANSSQKNHAFIYDKKFSRNVHHDRSCNAYDSNAMFASSSSYVHGRDMPRRNVYASGGSSWIIDSGCTNHMTGEKKMFSSYVKNKDSQDSIIFGDGNQGKDKHGVVTRNKARLVAKGYAQVAGLDFEEIFAPVARLESIRILLAYVAHHSFRLFQMDVKSAFLNGPIKEEVYVEQPPGFEDERYPDHVCKLSKALYGLKQAPRAWYECLRDFLLSNAFKVGKVDPTLFTKTCDGDLFVCQIYVDDIIFGSTNQKSCEEFSKVMTQKFEMSMMGELNYFLGFQVKQLKDGTFISQTKYTQDLLKRFGMKDAKPAKTPMGTNGHTNLNKGGKSVDQKAYQSMIGSLLYLCASRPNIMLGVCMCARFQSDPKECHLVAVKRILRYLVATPCFGIWYPKRSTFDLIGYSDSDYAGCKVDRKSTSGTCQFLGRSLVSWSSKKQTSIALSTDEAEYVAAGQCCVQLLWMRQTLRDFGYNLSKVPLLCDNESAIRMTDNPVEHSRTKHIDIWHHFLRDHQQKGDIEVFHVSTENQLADIFTKPLDEKTFCRLRSELNVLDSRNLD

SEQ ID NO: 10494 - protein, 456 aa, Zea mays
  Clone ID: TF_ZM4893.C2.o8.fg.pep
MEWVFLRKKILGDISVEYLGSISEKNLKGITREISGRASLRKFQDLNFWDATWTDHDVVRLMLRSFAVLDPHLINNIRENPRYTKMSAEEILGKFRFKTALKGRKEHPNKNKTKGKHSCFKCGKIGHFIANCPDNDSDQEQEKKRENKKSYKKAKGEAHLGKEWDSDCSSSDSDNEGLAASAFNKSSLFPNEHHTCLMAKEKKVNTRKSTYASSDDESSDDEIDYASLFKGLDRTKIDKINELIDALNDKNRLLENQEDLLYEEHDKFVEAQNSLALEVKRNEMLSCELSTCHESISSLKGVNDDLNAKLEIASKSTSREELVTICNRCKDFNVDACSEHLVCISKLNDEVASINAQLKTSKNDFDKLKFARDAYTVGRHPSIRDGLGFKREAKNLTSHKAPITAKEKGKAPMANSSQKNHAFIYDKKFSRNVHHDRSCNAYDSNAMFASSSSYVH

SEQ ID NO: 10495 - protein, 160 aa, Zea mays
  unsure (1)..(160): unsure at all Xaa locations
  Clone ID: TF_LIB3632-013-Q1-K6-E6.pep
SSSXPGRPSCGRRAGILEPQKKKEAQDTSARIVHQKKGVPTPSEGGSFFKGDLEGDGAVRPAGGGPIRSDQADWPDAETPDVGQSRAMFLSSPQGRILPPPQNXXRRAXXXPPPHPMGSPWKSGRQKNSCIIRHHHRRCHRCSRRRRWSSLWPRGQAGRS

SEQ ID NO: 10496 - protein, 1674 aa, Zea mays
  unsure (1)..(1674): unsure at all Xaa locations
  Clone ID: TF_ZM4587.C3.o1.fg.pep
MSGDHAKKEMVTGEKPVTSHGKAPSGESRNKGKEKESPSHKSHRSGEKKKKMRKVVYYEIDSLSPSTSGSDAPSVTSKRHERKKFSKIPLHYPRISKRTPLLSVPLGKPPIFDGEDYNMWSDKMRHHLTSLYTSIWNVVEFGVQEYNKVQGLKSAKEIWDVLKTAHEGDEVTKITKRETIEGELGHFMLNQGEDPQAMYNRLKTLVDQITGQGASPSLADLVPRSVPVGLNLAAFGWGIARIPRNTWRQMQRAGEGGADDVAPPRGVRKAVADARAHLSAPEGQCQARGHAQAMQGENGPQDDTFGPPGSKKIIEQGASSSVPEAQPVAFKATENKKEDSTPSRVPIDASKLDNEEMALIIKSFRQILKQRKGKDYKPRSKKVCYKCGKPGHFIAKCSLSSDSDRGDDKKGKRREKKRYYKKKGGDAHVCREWDSDESSTDSSSDEDAASIAVNKGLLFPNVGHKCLMAKDGKKKKVKSKSSTKYATSSDEANSSDDEDDLFTLFANLNMQQKEKLNELIRAIHDKDELLDSQEDFLIKENKRHVKVKNAYAQEVEKNEKLTSELSTCHDIVSNLRNENAKLIAKVENLNVCDDSLINLRNDNANLIAKIDKLNASLTSLRNENEKLIAKAKELDVCNISISNLRNENNILHAKIVELKDCKPSTSTVEHVSICTRCRDVNVDAIHDHLALIKQQNDHIATLTAKINEHDLENEKFKFARSMLYSGRRPGIKDGIGFQKGDNVKLNAPPKRLSNFVKGKALMVQDNEGYILYPAGYPEHKIRRIHSRKSHSGPNHAFMYKSETSSSRQSTHAKLPKKKTPAASNDHNVSFKTFDASYVLTNKSGKLVAKYVGGKHKGSKTCVWVPKVLVSNVKGPKTIWVYASGGSSWIIDSGCTNHMTREKRMFSSYEKNQDPQRAITFGDGIKDKYQTQETLKGFLRRAQNEFSLRIKKIRSDNGTEFKNSQIEGFLEEEGIKHEFSSPYTPQQNGIVERKNRTLLDMARTMLDEYKTLDRFWAEAVNTACYAINRLYLHRILKKTSYELLTGKKPNVSYFRVFGSKCFILVKRGRKSKFAPKAVEGFLLGYDSNTRAYRVFNKSTGLVEVSCDIVFDETNGSQVEQVDLDELDDEEAPCIALRNMSIGDVCPKESEEPPQAQDQPSSSMQASPPTQDEDEAQDDEGEDQEDEPPQEDSNDQGGDANDQDKEDEQDAKPPHPRVHQAIQRDHPVNTILGDIHKGVTTRSRVAHFCEHYSFVSSIEPYRVEDALRDSDWVLAMQEELNNFTRNEVWHLVPRPNQNVVGTKWVFRNKQDEHGVVIRNKARLVAKGYSQVEGLDFGETYAPVARLESIRILLAYATHHGFKLYQMDVKSAFLNGPIKEEVYVEQPPGFEDSEYPNYVYKLSKALYGLKQAPRAWYECLRDFLITNGFKVGKVDPTLFTKTIENDLFVCQIYVNDIIFGSTNKSICEEFSRIMIKKIEMSMMGELKYFLGFQVKQLQDGTFISQTKYIQDILTKFGMKDVKPIKTPMGTNGHLDLDTGGKSIDQKVYRSMIGSLLYLCASRPDIMLSVCMCARFQADPKEVHLRVVKQIMRYLVYTPKFGLWYPKGSSFDLLGYSDADWAGCKLDRKSTSGTCQFLGRSLVSWASKKQNFVALSTAEAEYIAAGXCAQLLWMRQTL

SEQ ID NO: 10497 - protein, 1420 aa, Zea mays
  unsure (1)..(1420): unsure at all Xaa locations
  Clone ID: TF_ZM4677.C5.o3.fg.pep
MGRRMTLLAHQVILRSLVFLNPTQVQLIRGDPRYKLMSPEEVIGKFVSFELMIKGSKKIIEQGASSSVPEAQPVAFKATENKKEDSTPSRVPIDASKLDNEEMALIIKSFRQILKQRKGKDYKPRSKKVCYKCGKPGHFIAKCSLSSDSDRGDDKKGKRREKKRYYKKKGGDAHVCREWDSDESSTDSSSDEDAASIAVNKGLLFPNVGHKCLMAKDGKKKKVKSKSSTKYATSSDEANSSDDEDDLFTLFANLNMQQKEKLNELIRAIHDKDELLDSQEDFLIKENKRHVKVKNAYAQEVEKNEKLTSELSTCHDIVSNLRNENAKLIAKVENLNVCDDSLINLRNDNANLIAKIDKLNASLTSLRNENEKLIAKAKELDVCNISISNLRNENNILHAKIVELKDCKPSTSTVEHVSICTRCRDVNVDAIHDHLALIKQQNDHIATLTAKINEHDLENEKFKFARSMLYSGRRPGIKDGIGFQKGDNVKLNAPPKRLSNFVKGKALMVQDNEGYILYPAGYPEHKIRRIHSRKSHSGPNHAFMYKSETSSSRQSTHAKLPKKKTPAASNDHNVSFKTFDASYVLTNKSGKLVAKYVGGKHKGSKTCVWVPKVLVSNVKGPKTIWVYASGGSSWIIDSGCTNHMTREKRMFSSYEKNQDPQRAITFGDGIKDKYQTQETLKGFLRRAQNEFSLRIKKIRSDNGTEFKNSQIEGFLEEEGIKHEFSSPYTPQQNGIVERKNRTLLDMARTMLDEYKTLDRFWAEAVNTACYAINRLYLHRILKKTSYELLTGKKPNVSYFRVFGSKCFILVKRGRKSKFAPKAVEGFLLGYDSNTRAYRVFNKSTGLVEVSCDIVFDETNGSQVEQVDLDELDDEEAPCIALRNMSIGDVCPKESEEPPQAQDQPSSSMQASPPTQDEDEAQDDEGEDQEDEPPQEDSNDQGGDANDQDKEDEQDAKPPHPRVHQAIQRDHPVNTILGDIHKGVTTRSRVAHFCEHYSFVSSIEPYRVEDALRDSDWVLAMQEELNNFTRNEVWHLVPRPNQNVVGTKWVFRNKQDEHGVVIRNKARLVAKGYSQVEGLDFGETYAPVARLESIRILLAYATHHGFKLYQMDVKSAFLNGPIKEEVYVEQPPGFEDSEYPNYVYKLSKALYGLKQAPRAWYECLRDFLITNGFKVGKVDPTLFTKTIENDLFVCQIYVNDIIFGSTNKSICEEFSRIMIKKIEMSMMGELKYFLGFQVKQLQDGTFISQTKYIQDILTKFGMKDVKPIKTPMGTNGHLDLDTGGKSIDQKVYRSMIGSLLYLCASRPDIMLSVCMCARFQADPKEVHLRVVKQIMRYLVYTPKFGLWYPKGSSFDLLGYSDADWAGCKLDRKSTSGTCQFLGRSLVSWASKKQNFVALSTAEAEYIAAGXCAQLLWMRQTL

SEQ ID NO: 10498 - protein, 899 aa, Zea mays
  unsure (1)..(899): unsure at all Xaa locations
  Clone ID: TF_ZmC951_443.pep
MVTGEKPATSHGKAPSGESGNKKREESPPHVKSHRSGDKKNKMKKVVYYETDSSWPSTPGSDAPSVTSKRHERKKFSKIPLRYPHISKRTPLLSIPLGKPPVFDGEDYXIWDIVEFGAHVPSMGDEGYDSDEVAQIXEHFNSQATTILLASLSREEYNKVQGLKSAKEIWDVLKTAHEGDEVTKITKRETIEGELGRFMLHQGEDPQAMYNRLXTLVNEVRNLGSTKWDDHEMAKVILRSLIFCNPTQVQLIRGDPRYKLMSPEEVIGKFVSFELMIKGSKQIINLEQGATSTSEVQPVTFKATEEKKEXSPSSRLPIDASKLDNEEMALIIKSFRQILKQRRGKDYKPRSKKVCYKCGKPDHFIAKCPLYSDSDRDNDKKGRMKEKKKYYKKKGGDAHVCREWDSDESSTDSSSDEDAANIAINKGLLFPNVGHKCLMAKDDKKKKVKSRASTKYAISSDEENSSDNEDNLLALFANLNMQQKEKLNELISDIHEKDELLDTQEDFLIKENKKHVKVKNAYAQEVEKCENLTSELSTCHDIISNLRNENAKLIAKVEKLDDCDDSLVKLKNDNANLIAKIDKLNESIASLKIENEKLIIKAKNLNVCNDIVSNLRNENVMLHAKIDELNVCKPSTSTVSHVSNCTRCRDVNIDAIHDHIAMIKQQNDHIAKLDAKIAEHELEIEKFKFARSMLYSGRRPGIKDGIGFQKGDNFKLHAPKKLSNFVKGKAPMTQDNKGYILYPVGYPKHKIRRIHSRKSHSGSHHAFMYKSEPSSSRQSTHAKLPKNKTPIASNEPNILFKTFDASYVLTNRSGKVVAKYVGAKHKGSKTCVWVPKVYASGGSSWIIDSGCTNHITGEKRMFSYEXNHDPQRAITFGDGNQGKITNPRDLKGILETGSK

SEQ ID NO: 10499 - protein, 528 aa, Zea mays
  Clone ID: TF_ZM4885.C3.o4.fg.pep
MDPKGKGIVINDKEKESFVNEPKDDKPTDSGSGHRRKEGKKKKTRRIKEIVYYDDSDESTSSQKDDDHNDYERRKPVNSNFSFDYSRIPQSSNSHLLSIPLDKPPHFDGEDYGFWSHKMRSHLFSLHPSIWEIVESGMHFDSSDNPMFINEQIHKNAQATTVLLASLCRDEYHKVSGLDNAKQIWDTLKISHEGNDVTLLTKMELVEGELGRFAMIRGEEPTQTYNRLKTLINKIRSYGSTRWTDHDVVRLMLRSFTVLDPHLVNNIRENPRYTKMSPEEVLGKFVSGRMMIKEARYVDDALNGPINEPQTLALKATRSKEALPSKVAQIEAAGLNDEEMALIIKRFKTTLKGRNGQPSKTKAKGKRSCFKCGKLGHFIANCSDNDSDQDQGNKREKKKNYKKAKGEAHLDKEWDSDCSSSDSDNEGLAATAFNKSPLFPNECHTCLMAREKKVCTRDSTYASSSEDESSDEDEIDYSCLFKGLDRNKIDKINELIDALNEKDRLLEKQEDLLYDEHDKFVEAQKSMP

SEQ ID NO: 10500 - protein, 890 aa, Zea mays
  Clone ID: TF_ZM4913.C6.o1.fg.pep
METGDKPTTSQGSTSSEESRTKRKEKKKSSSNKGKEKKPSSHHKEKKEKSSSHKSHRSGDQHKRMRKVVYYETDTSSTSTSGSDAPSVTSKRQERKKFSKIPLHYPRTSRHTPLLSVPLGKLPTFDGEDYARWSDLMKFHLTSLHKSIWNVVEFGAQVPSVGDEDYDEDEVAQIEHFNSQATTILLASLSKEEYNKVQGLKNAKEIWDLLKTAHEGDELTKITKRETIEGELGRFRLRQGEEPQDMYNRLKTLVNQVRNLGSKKWDDHEVVKVILRSLIFLNPTQVQLIHGNPRYTQMTPEEVIGNFVSFECMIKGSKKINELDEPSTSEAQPVAFKATEEKKEESTPSRQPIDASKLDNEEMALIIKSFRQILKQRKGKDYKSRSRKVCYKCGKPDHFIAKCPLSSDSDRDNDKKGKRKEKKRYHKRRGGDAHVCREWNSDESSTDSSSDKDAANIAVTKGLLFPNVGHKCLMAKDSKRKKVKSRSSTKYETSSDEDDASNEEDNLHVLFANLNMEQKEKLNELISAIHEKDDLLDSQEDFLIKENKKHVKVKNAYALEVENCEKLSSELSTCHDTITNLRNENASLNTKVDSHVCNVSIPNLRNDNDDLLAKIEELNISLASLRVENENLIAKAKELDVCNVTISDLRDNNDILRAKIVELNSCKPSTSSVEHVSVCTRCRDVDIDAIHDHMTLIKQQNDHIAILDAKIAEHNLENEKFKFARSMLYNGRRPGIKDGIGFQRGDTVKLNAPPKRLSNFVKGKTPMPQDNEGYILYPAGYPEDKIRRIHSRKSHSGPNHAFMYKGETSSSRQPTRAKLPKKKTPSASNEHSLSFKTFDASYVLTNKSGKVVAKYVGGKHKGSKTCVWVPKVLVSNAKGPKTIWVPKVKN

SEQ ID NO: 10501 - protein, 1459 aa, Zea mays
  Clone ID: TF_ZM5008.C2.o5.fg.pep
MNPPNPPPGGVDPLVAAQMAVMQQMADTMADMRAQMQQERQEMRQEREDIRQELRQERDEIRQERRAQQQQLQQQLQQQQQQQQVPLPPPPPPVPPHDKHREFMSHKPPTFASSPDPLDADDWLKSIEKMLNIAQCTDREKVLYASGRLTGPAADWWDSYTAAHDAADTITWAEFSTQFRNYHIPAGMIKIKKKEFLSLKQGNMSVSEYRDKFIQLSRYAPEEVAEDERKQEHFIEGLNGPLQYALVAHTFPSFQRLLDKALAIEHKRVQLSDLKRKAISQGQGSSSVRPRYVPPQGTPTRPGGPRPVQQSPLRIPPPRQATPTGTPTRPTGQKTGPTCFKCSQVGHYANACPMGNSGTPAKNKQQTRGKGYSIARVNQVSVDDTPDGGDLVIGMFYVNAIPATILFDSGATHSFMSARYANTNEIPLLNMRKPMIVITPKGPVEANQMTRRLTLTIMGREFGATAIILESSSIDLILGMSWLRKAKAVIACGRGTVELTTTKGERFQVNIAVTSSSMRAMFFMPEEFVGDNIRVVRDFPDVFPEELPGMPPDREVEFVIDLLPGTAPISKRPYKMSVEELKELKKQLINDVTVKNKYLLPRIEDLFDQMRGARVFSKIDLRSGYHQMRIRPSDIPKTTFSNRYGLYEFTVMSFGLTNAPAYFMNLMNKVFMEYLDRFVVVFIDDILIYSKNESDHEQHLRLVLQKLRDNQLYAKFSKCEFWIDKVPFLGHIISNGGIAVDPSKVKEIMEWRVPTTVTEIRSFLGLAGYYRRFIEGLSKIAKPMTSLLEKGREFKWDEKCQESFDQLKERLMSPPVLVMPDLQKGFDIYCDACGQGLGCVLMQDGHVIAYASRQLRRHELNYPTHDLELAAVVHALKIWRHYIMGTKCQVYTDHKSLKYIFTQKDLNLRQRRWLELIKDYDLEIHYHPGKANLVADALSRKEHVHSAFVVQLPDELAKDFERLNLGIVTHTEGVTIELEPTLEQEIRKGQIGDAKIQEIKDLITEGRGPEFTEDEQGTIWFKNRICVPEIDSLRETILKEAHDSVYSIHPGSTKMYQGLKQKYWWYGLKRDVAAHVAMCDVCQRVKAEHQRPAGLLHPLKIPEWKWEEIGMDFIVGLPRTSAGYDSIWVIGDRLTKVAHFIPVKTTYSGAKLAELYMARIVCLHGVPKKIVSDRGSQFTSRYWKKLHESLDTRLNFSSAYHPQTDGQTERTNQVLEDMLRACALKHGGSWDKSLPYAEFSYNNSYQASLKMSPFEALYGRKCRAPLYWDQTDERQLFGPEIIQEAEDQVQQIRENLRTAQSRQKSYADTRRRLLEFKEGDYVYLKVSPLRGMRRFKVKGKLSPRFIGPFLILKRVGEVAYQLELPDHLADVHDVFHVSQLKKCLRVPEEQLPMEDLSVQDDLTYAEYPIKILDTLTRVTRNKVIKMCKVQWSHHGEDEATWEREEELRVDFPHLFPRSS

SEQ ID NO: 10502 - protein, 819 aa, Zea mays
  Clone ID: TF_ZmC16207_1.pep
MLRSFTVIDPHLVNLICENPKYTKMTPEEILGKFVSGRMMVKETRYVDDALNRPLLLHESQPVALKATGSKEALPSKVAQVEAVGLNEDEMTLIIKCFKTALKGRKEYPNKNKSRRKCSCFKCGKYGHFIAQCPDNNNDQAREKYGKKERKKNYRKAKGEAHIGKEWDSDCSSSDSDDEGLAASAFNKSSLFPNERHTCLMAKENKIDLRCKDFNIDACNEHVSTILKLNNDVASLNAKLKTCKDDYEKLKFTRDAYTIGRHPSIKDGLGFQKETKNFTSHRTSNLNKEKGKAPMANSSQKNHAYLYKKIPNVTHHDKCHNHSVFLCVMMMYLVLMPCLQPAPRMLMVYAFGGSSWIIDSGCTNHMMGEKKMFTSYVKNRDSQDTNIFGDGNQGKVKGLGKIAITTEHSISNVFFVESLGYNLLSDKTETQGTLKRFLRRAQNEFELKVEKIRSDNGSEFKNLQVKDYLEDEGIKHEFSAPYTPQQNGVVERKNRTLIDMARTMLGEYKTPERFWSEAVNTACHDINRLYLHCLLEKTSYELLTGNKPKVSYFRVFGSKCYVLIKKGRHSKFAPKAVEGFLLGYDSNTKAYRVFSKSSELVEVSSDVVFDETNGSPREQVDLDDVDEDEVPTAAMRTMAIGEEELNNFKRNEVWSLVPRPKQNVVGTKWVFRNKQDEHGVVTRNKARLVAKGYAQVTGLDFEETFAPVARLESIRILLACAAHHSFKIFQMDVKSAFLNGPIKEKVYVEQPPSFEDDRYPDHVYKLSKALYGLKQAPRAWYECLRDFFITNAFKVGKADPTLFTKTCNGDLFVCQIVTP

SEQ ID NO: 10503 - protein, 1461 aa, Zea mays
  unsure (1)..(1461): unsure at all Xaa locations
  Clone ID: TF_ZmC951_456.pep
MSGEHAKKEMETGDKPATSHGKASSGESRNKGKGKEKKPSSHKSHRSGDKKKMMRKVVYYETDTSSPSTSGSDAPSITSKRHERKKFSKPPTFDGEDYARCSDLMKFHLTSLHKSIWNVVEFGAXREEYNKVQGLKSAKKVWDVLKTXHEGDELTKITKRETIEGELGRFRLRQEEEPQDMYNRLKTLVNQVRNLGSKKWDDHKVVKVILRSLIFLNPTQVQLIRGNPRYTLMTPEEVIGSFVSFEFMIKGSRKINELDGPSTSEAQPVTFKATEEKKEESTSSRTPIDASKLDNEEMTLVIKSFRQILKQRRGKDYKPRFKKVCYKCGKPGHFIAKCSISSDSDRGDDKKGRRKEKKRYYKKKGGDAHVCREWDSDESSSDSSDDEDVANIAVTKGLLFPNVGHKCLMAKDGKKKNVKSKSSTRYESSSDDNASDEEDNLRTLFANLNMQQKEKLNELISAIHEKDDLLDSQEDFLIKENKKHVKVKNAYALEVEKCEKISSELSTCHETIDNLRNENANLLAKVDSIACNVSIPNLRNDNDDLLARIEELNISLASLRDEDEKLLAKAKDFDVCNATISNLRSKNDILHAKVVELKSCKPSTSTVEHTTICTRCRDVDINAIHDHMALIKQQNDHIAKLDAKIAEHEIENEKFKFARSMLYSGRRPGIKDGIGFQQGGNVKLNAPPKKLSNFVKGKAPMPQDNEGYILYPAGYPESKIRRIHSRKSHSGPNHAFMYKGETSSSRQPTRAKLPKKKTPSASNDHNISFKTFDASYVLTNKSGKVYASGGSSWIIDSGCTNHMTGEKKMFSSYEKNQDPQRAITFGDGNQGVTVFRRSDDSITFKGVLEGQLYLVDFDRAELDTCLIAKTNMGWLWHRRLAHVGMKNLHKLLKGEHILGLTNVHFEKDRICSACQAGKQVGAHHPHKNIMTTDRPLELLHMDLFGPIAYISIGGSKYCLVIVDDYSCFTWVFFLQEKSHTQETLKGFLRRAQNEFGLRIKKIRSDNGTEYKNSQIEGLLEEEGIKHEFSSPYTPQQNGVVERKNRTLLDMARTMLDEYKTSDRGRKSKFAPKTVEGFLLGYDSNTRAYRVFNKSSGQVEVSCDVVFDETNGSQVEQVDLDEICDEEAPCIALRNMSIGDVCPKESEEPPNAQDQPSSSTQASPRTQNEDEAQVDEGEDQASELPQDDDNDQGGDANDQDKEDEERRPPHPRVHQAIQRDHPVDTILGDIHKGVTTRSRVAHFCEHYSFVSSIEPHRVEEALQDSDWVVAMQEELNNFTRNEQDEHGVVTRNKARLVAKGYSQVKGLDFGEIYAPVARLESIRILLAYGTYHGFKLYQMDVKSAFLNGPIKEDVYVEQPPGFEDSEYPNHVYKLLKALYGLKQAPRAWYECLRDFLITNGFKVGKADPTLFTKTLENDLFVCQVYVDDIIFGSTNESTCEEFSRIMTQKFEMSMMGELKYFL

SEQ ID NO: 10504 - protein, 784 aa, Zea mays
  Clone ID: TF_ZM4589.C1.o4.fg.pep
MKKVVYYETDSSSPSTSGSDAASVTSKRQERKKYSKIPLRYPRIPKHTPLLSVLLGKPPTFDGEDYSRWSDMMRYHLTSLHKNIWDIVEFGVQVPSVGDEDYDEDEVAQIVHFNSQATTILLTSLSREEYNKVQGLKSAKEIWDVLKTTDEGDEVTKITKRETIEGELGRFRLRKRRSHKKCSKKIIEQDGPSTPEAQSVAFKATEEKKEESTSSRLPIDASKLDNEEMTLIIKSFRQILKQRRGKDYKSRSKKVCYKCGKPGHFIAKCSISSDSDRGDDKKGKRREKKRYYKKKGGDAHVCRERNSDESSSDSSSDEDAANIAVTKGLLFPNIGHKCLMAKDGKRKKVKSRSSTKYASSSDEDNSSDEEDNLRTLFANLNMQQKEKLNELISDIHEKDELLDSQEDFLIKENKKHVKVKNAYALEVEKCEKLSSELSTCHDIIANLRNENAKMITKVDSNLCDDSISNHRDDNVNLLAKIEELNVSLASLRNENERLIAKAKDLDVCNVTISNLRSENDILHAKIVALNSCKPSTSTIEHVTICTRCRDINVDAIHDHLALIKKQNDHIAQLNAKINEHDLENEKFKFARSMLYNGRRPGIKDGIGFQKGDNVKLNAPPKRLSNFVKGKAPMPQDNEGYILYPVGYPEHKIRRIHSRKSHSGPNHAFMYKGETSSSRQSTRAKLPKKKTPIASNDSNISFKTVDASYVLTNKSGKVYASGGSSWIIDSGCPNHMTGEKKMFSSYKKNQDPQRAITFGDGNQGVTVFRRSDDSVAFKGVLEGQL

SEQ ID NO: 10505 - protein, 1647 aa, Zea mays
  Clone ID: TF_ZmC951_328.pep
MSGDHTKKEMETGEKPTTSHGKTSSEESRNKRKEKKDSSKGKEKKSSSHKEKKEKSSSHKPHRSGDKKKKMRKVVYYETDSSSTSTSGSDAASVTSKRQERKKYSKIPLRYPHISKHTPLLFVPLGKPPTFDGEDYARWSDLMRFHLTSLHKSIWDVVEFGAQVPSVGDEDYDEDEVAQIEHFNSQATTILLASLSREEYNKVQGLKSAKEVWDVLKTAHEGDELTKITKRETIEGELGRFRLRKGEEPQNMYNRLKTLVNQVRNLGSKKWDDHEMVKVILRSLIFLNPTQVQLICGNPRYTLMTPEEVIGNFVSFECMIEGSRKINELDDPSTSEAQPVAFKATEEKKESTPSRQPIDASKLDNEEMALVIKSFRQILKQRRGKDYKLRSKKVCYKCGKPDHFIAKCPISSDSDRGDDKKGRRKEKKKYYKKRGGDAHVCREWDSDESSSDSSDDEDAANIAVTKGLLFPNVGHKCLMAKDGKKKKVKSKSSTRYESSSDENVSDEEDNLRTLFANLNMQQKEKLNELISAIHEKDDLLDTQEDFLIKENKKHVKVKNAYALEVEKCEKLSNELSTCHETIDNLRNENSNLLAKVDSIACNVSIPNLRNDNDDLLAKIEELNLSLVSLKNENEKLIAKAKDFDVCNATISDLRTKNDILHAKVVELKSCKPSTSTVEHTSICTRCRDIDVNAIHDHMTLIKQQNDHIAKLDAKIAEHNLENEKFKFARSMLYSRRRPGIKDGIGFQRGDNVKLNAPPKRLSNFVKGKAPMPPDNEGYILYPAGYPEDKIRRTHSRKSHSGSNHAFMYKSETSSSRQPTRAKLPKKKTPSASNDHDISFKTFDASYVLTNKSSKVYASGGSSWIIDSGCTNHMTGEKKMFSSYEKNQDPQRAITFGDGNQGVTVFRRSDDSIAFKGVLEGQLYLVDFDRAELDTCLIAKTNMGWLWHRRLAHVGMKNLHKLLKGEHILGLTNVHFEKDRICSACQAGKQVGAHHPHKNIMTTDRPLELLHMDLFGPIAYISIGGSKYCLEKYQTQETLKGFLRRAQNEFTLRIKKIRSDNGTEFKNSQIEGFLEEEGIKHEFSSPYMPQQNGVVERKNRTLLDMARTMLDEYKTSDRFWAEAVNTACYAINRVFGSKCFILVKRGRKSKFAPKTVEGFLLGYDSNTRAYRVFNKSSGQVEVSCDVVFDETNGSQVEQVDLDEIGDEEAPCIALRNMSIGDVCPKKSEEPPNAQDQPSSSTQASPPTQNEDEAQIDEGEDQANEPPQYDGNDQGGDANDQDKEDEEQRPPHPRVHQAIQRDHPVDTILGDIHKGVTTRSRVAHFCEHYSFVSSIEPHRVEEALQDSDWVVAMQEELNNFTRNEVWHLVPRPNQNVVGTKWVFRNKQDEHGVVTRNKARLVAKGYSQVEGLDFGETYAPVARLESIQILLAYATYHGFKLYQMDVKSAFLNGPIKEEVYVEQPPGFEDSEYPNHVYKLSKALYGLKQAPRAWYECLRDFLITNGFKVGKADPTLFTKTLENDLFVCQIYVDDIIFGSTNESTCEEFSRIMTQKFEMSMMGELKYFLGFQVKQLQEGTFISQTKYTQDILNKFGMKDAKPIKTPMGTNGHLDLDTGGEESNVRALMIPFLAIHAKGGESMSPKQKDRTTT

SEQ ID NO: 10506 - protein, 1186 aa, Zea mays
  unsure (1)..(1186): unsure at all Xaa locations
  Clone ID: TF_ZmC951_331.pep
MKKVVYYEIDSSSPSTFGSDAPSVTSKRHERKKFSKIPLRYPRISKRTPLLSISLGKPPIFYGEDYCMWSDKLRHHLTSLHASIWDIVEFGAQVPPIGDEDYDSNEIAQIWHFDSQATTILLASLCREEYNKVQWLKSAKKIWDVLKTAHEGDEVTKTTKRETIEGELGRFVLNQGEEPQAMYNRLKTLVNQIILRSLIFRNPTQVQLIRGDPRYKLMSPEEVIGKFVSFELMIKGSKQIVNLEQGDTSTPEVQPIAFKATEDKKEESTSSRLPIDASKLDNEEMTLIIRSFRQILKQRRGKDYKPRSKRVCYKCGKPRHFIAKCPMSSDSDRDNDKKGMKKEKNKYYKKKGDDAHVCWEWDSSSDEDAANIIVNKGLLFPNVGHKCYMAKDGKKKRVQARTTPSILHLVMRGKAPKAQDNEGYILYPAGYPEHKIRRSHARKSHSVSHHAFMYKNEASSSRHSTYVKMSKKITPTASNEPNVSFKTFDASYALTNKSGKIVYASWSSSWIIDSRCTNHMTWEKRMFSSYEKNDDPQRVITFGDGNQDLGVTVFRRSDDSIAFKGVLEXNIMTTDRPLELLRMDLFGSIAYISIXREKSQTQETLKGFLRRAQNEFGLRIKKIRSDNGTEFKNSQIEGFLEDEGIKHEFSSPYTPQQNGVVERKNRTLLDMARTMLDEYKTPDWFWVEAINTACYSINRLYLHRILKKTSYEFLXRNMSIGDVCPKESEEPTQAQDQPSLSCKHXPPTQDEDQAQDNEDGDQEDEPPQEEDNDQGGYEVDQDKEDDQELQGQRPPHPRVHQAIQRDHPVNSILGDIHKGVTTRSRVAHFCEYYSFVSSIEPYRVEEALRDLDWVLAMQEELKNFTRNXGTKWVFHNKQDEHGVETRNKARLVANGYSQVXKLYQMDMKSSFLNGPIKEEVYVEQPPGFEVSEYPNHVYKLSKALYGLKQAPRAWYKCLRDFLITNGFKVGKADPTLFTKTIAKDLFVCQIYVDDIIFGSTNKSTCEEFSRIMIQKFEMSMMGELKYFLGFQVKQLQEGTFISQTKYIQNILTKFGMKDAKPIKTPMGTNGHLDLDTRGCKIDRKSTSGTCQFLGRSLVSWASKKQNSVALSTAEAEYIAAGHCCVQLLWMRQTLRDYGYKLSKVPLLCDNESAIRMEDNLVEHSRTKHIDIQYHFLRDHQQRGISK

SEQ ID NO: 10507 - protein, 1583 aa, Zea mays
  Clone ID: TF_ZmC951_376.pep
MSGDHAKKEMETGDKPTTSHGKASSEESRNKGKGKEKKSSSHKSHRSGDKKKKMRKVVYYETDTSSPSTSGSDAPSITSKRHERKKFSKIPLRYPRIPKHTPLLSVPLGKPPTFDGEDYARWSDLMRFHPTSLHKSIWDVVEFGVQSREYNKVQGLKGAKEIWDTLKTAHEGDEVTKITKRETIKGELGRFRLRQGEEPQDMYNRLKTLVNQVRNLGSKKWDDHEMVKVILRSLVFLNPTQVQLIRGNPRYTLMTPEEVIGNFVSFEMMIKGSKKINELDGPSTSEAQPVAFKATEEKKEESTPSRTPIDASKLDNEEMAIIIKSFRQILKQRKGKDYKPCSKKVCYKCGKPDHFIAKCPISSDSDRGDDKKGRRKEMKKYYKKKGGDAHVCREWDSDESSTDSSSDEDAANIAVTKGLLFPNIGHKCLMAKDGKRKKVKSRSSTKYETSSDEDNASNEEDNLRILFANLNMQQKEKLNELISAIHEKDDLLDTQEDFLIKENKKHVKVKNAYALEVEKCEKLSSELSTCHETIDNLRNENANLLAKVDSNVCDVSIPNLRNDNDDLLAKIEELNMSLTSLRNENEKLIAKAKDFDVCNASISDLRSKNDILHAKVVELKSCKPYTSTVEHTAICTKCRDINVDAIHDHLALIKKQNDHIAQLNAKINEHDLENEKFKFARSMLYSGRRLGIKDGIGFQKGDNVKLNAPPKRLSNFVKGKAPMPQDNEGYILYPAGYPESKIRRIHSRKSYSGPNHAFMYKGEASSSRQPTHAKLPKKKTPSASNEHSISFKTFDASYVLTNKSVKVYASGGSSWIIDSGCTNHMTGEKKMFSSYEKNQDPQRAITFGDGNQGVTVFRRSDDSIAFKGVLEGQLYLVDFDRAEPDTCLIAKTNMGWLWHRRLAHVGMKNLHKLLKGEHILGLTNVHFEKDRICSACQAGKQVGAHHPHKNIMTTDRPLELLHMDLFGPIAYRSIGGSKYCLVIVDDYSRFTWVFFLQEKSHTQETLKGFLRRAQNEFGLRIKKIRSDNGTEFKNSQVEGFLEEEGIKHEFSSPYTPQQNGVVERKNRTLLDMARTMLDEYKTSDRFWAEAVNTACYTINRLYLHRILKKTSYELLTGKKPNISYFRVFGSKCFILVKRGRKSKFAPKIVEGFLLGYDSNTRAYRVFNKFSGQVEVSCDVVFDETNGSQVEQVDLDEIGNEEAPCIALRNMSIGDVCPKESEEPPNAQDQPSSSTQASPPTQNEDEAQVDEGEDQRVEPPQDDGNDQGGDVNDQDKEDEEPRPPHPRVHQAIQRDHPVDTILGDIHKGVTTRSHVAHFCEHYSFVSSIEPHRVEEALQDSDWVVAMQEELNNFTRNEVWHLVPRPNQNVVGTKWVFRNKQDEHGVVTRNKARLVAKGYSQVEGLNFGETYAPVARLESIRILLAYATYHGFKLYQMDVKSAFLNGPIKEEVYVEQPPGFEDSEYPNHELSKALYGLKQAPRAWYECLRDFLIANGFKVGKADPTLFTKTLDNDLFVCQIYVDDIIFGSTNESTCEEFSRIMTQKFEMSMMGELKYFLGFQVKQLQEGTFISQTKYIQDILKKFG

SEQ ID NO: 10508 - protein, 933 aa, Zea mays
  unsure (1)..(933): unsure at all Xaa locations
  Clone ID: TF_ZmC951_378.pep
MKKVVYYEIDSSSPSTFGSDAPSVTSKRHERKKFSKIPLRYPRISKRTPLLSISLGKPPIFYGEDYCMWSDKLRHHLTSLHASIWDIVEFGAQVPPIGDEDYDSNEIAQIWHFDSQATTILLASLCREEYNKVQWLKSAKKIWDVLKTAHEGDEVTKTTKRETIEGELGRFVLNQGEEPQAMYNRLKTLVNQIILRSLIFRNPTQVQLIRGDPRYKLMSPEEVIGKFVSFELMIKGSKQIVNLEQGDTSTPEVQPIAFKATEDKKEESTSSRLPIDASKLDNEEMTLIIRSFRQILKQRRGKDYKPRSKRVCYKCGKPRHFIAKCPMSSDSDRDNDKKGMKKEKNKYYKKKGDDAHVCWEWDSSSDEDAANIIVNKGLLFPNVGHKCYMAKDGKKKRVQARTTPSILHLVMRGKAPKAQDNEGYILYPAGYPEHKIRRSHARKSHSVSHHAFMYKNEASSSRHSTYVKMSKKITPTASNEPNVSFKTFDASYALTNKSGKIVAKYVGGKHKGSKTRVWVPKVYASWSSSWIIDSRCTNHMTWEKRMFSSYEKNDDPQRVITFGDGNQDLGVTVFRRSDDSIAFKGVLEGQLYLVDFNRAELDTCLIAKTNMGWLWHRRLAHVGMKNLXKLLKGEHILGLTNVHFEKDRVCSTCQAGKQVGAHHXKNIMTTDIPLELLHMDLFGPIAYISISGSKYCLVIVDDYSRFTWVFFLQEKSHTQETLKGFLRRAXNEFGLRSKXIRSDNGTEFKNSQIEGFLEEEGIKHEFSSPYTPQQNGVVERKNXTLFDMARTMLDEYKTSDRFWAEAVNTACXAINRLYLHRILKKTSYELLTGKKPNISYFRVFGSKCFILVKRGRKSKFAPKTVEGFLLGYDSNTRAYRVFNKSSGQVEVSCDVVFDETNGSQVEQVDLDEIGDEEAPXIALRNIPLGRGPP

SEQ ID NO: 10509 - protein, 1279 aa, Zea mays
  Clone ID: TF_ZM3644.C1.o16.fg.pep
MSGDHAKKEMETGEKPTISHGSTSSEESRTKRKEKKDSSKGKEKRSSSHHKEKKEKSSSHKPHRSGDKKKRMRKVVYYETDSSSASTSGSDAASVTSKRQERKKYSKIPLRYPRISKHTPLLSVPLGKPPTFDGEDYARWSDLMRFHLTSLHKSIWDVVEFGAQVPSVGDEDYDEDEVAQIEHFNSQATTILLASLSREEYNKVQGLKSAKEIWDLLKTAHEGDELTKITKRETIEGELGRFRLRQGEEPQDMYNWLKTLVNQVRNLGSKKWDDHEVVKVILRSLIFLNPTQVQLIRGNPRYTLMTPEEVIGNFVSFEYMIKGSKKINELDDPSTSAAQPDAFKATEEKDESTSSRQPIDTSKLDNEEMTLVIKSFRQILKQRRGKDYKPQSKKVCYKCGKPDHFIAKCPISSDSDRGDDKKGRRKEKKRYYKKKGGDAHVCREWDSDESSSDSSDDEDAANIAVTKGLLFPNVGHKCLMAKDGKRKKVKSKSSTKYETSSDDNASDEEDNLRTLFANLNMEQKEKLNELISAIHEKDDLLDSQEDFLIKENKKHVKVKNAYALEIEKCEKLSSELSTCHDTIANLRNENAKLIAKVDSHVCNVSTSNPRDDNVDLLARIDELNISLVSLRIENEKLLAKAKDFDVCNVTISNLRSENDILHAKVIELKSCKPSTSIVEHVSICTRCRDVDVNAILDHMALIKQQNDHIAKLDAKIVEHNLENEKFKFARSMLYNGRRPGIKDGIDFQRGDNVKLNAPPKRLSNFVKGKAPMPQDNEGYILYPAGYPESKIRRIHSRKSHSGPNHAFMYKGETSSSRQPTHAKLPKKKTPSASNEHSISFKTFDASYVLTNKSGKIVAKFVGGKHKGSKTCVWVPKVLVSNAKGPKTVWVYASGGSSWILDSGCTNHMTGEKKMFSSYEKNQDPQRAITFGDGNQGVTVFRRSDDSIAFKGVLEGQLYLEKSQTQETLKGFLRRAQNEFGLRIKKIRSDNGTEFKNSQIEGFLEEEGIKHEFSSPYTPQQNGVVERKNRTLLDMARTMLDEYKTSDRFWAEAVNTACYAINRLYLHRILKKTSYELLTGKKPNISYFRVFGSKCFILIKRGRKSKFAPKTVEGFLLGHDSNTRAYRVFNRSTGQVEVSCDVVFDETNGSQIEQVDLDEIGNEEAPCIALRNMSIGDVCPKESEEPPNAQNQPSSSTQASPSTQNEDEAQVDEVEDQANEPPQDDDNDQRGDANDQDKEDEEQRPPHPRVHQAIQRDHPVDTILGDIHKGVTTRSRVAHF

SEQ ID NO: 10510 - protein, 314 aa, Zea mays
  Clone ID: TF_ZM4612.C4.o4.fg.pep
MENLSQMTLTIVIGKIVVDDLLFNTEGKCKERKDASHAGRRATSGTTVQTCPNPQRGGAKPRRLQVSKLEITLQTKMNLQGHATTNPHHAHHGHCTSALWQEVTTKIEQLESDVPSSATDDGLIKNNEKLKAKLASSQEAIENLLEKMEILSIHNNELTTKLEKIDSTLEVFLVEIPKIIEKDASTSCFDLIDDSNPCNQVLVENVVIETCSNEVSKENEQLRQEVARLGKALYGKKGKAKQIQTPQGNTTAGVNKPVEGGTVICRICHKEGHKFYQCKAKTGDKQKQKLKKKSNNKISNTYINKVDKRLLHHI

SEQ ID NO: 10511 - protein, 662 aa, Zea mays
  Clone ID: TF_ZM4913.C4.o2.fg.pep
MDPKGKGMVVNNNEKESIFNEPKDDKPTDSGSSHKRKDGKKKKTRRIKEIVYYDSDESSSSQKDDDYEKKKTVNSNFSFDYSRIPQSTNAHLLSIPLDKPPHFDGEDYGFWSHKMRSHLFSLHPSIWEIVESGMHFDSTDSPMFINEQIHKNAQATTVLLASLCRDEYHKVSGLDNAKQIWDTLKISHEGNDVTMLTKMELVEGELGRFAMIRGEEPTQTYNRLKTLVNKIRSYRSTRWTDHDVVRLMLRSFTVLDPHLVNNIRENPRYTKMTPEEILGKFVSGRMMIKEARYVDNALNGPINEPQPLALKATRSKETLPSKVAQIEAARLNYEEMALIIKRFKTALKGRKGQPSKTKTKGKHSCFKCGKLGHFIANCPDNDSDQDQGNKREKKKNYKKAKGEAHLGKEWDSNCSSSDSDNEGLAATAFNKSSLFPNERHTCLMAREKKVCTRNSTYASSSEDESSDEDEIDYSCLFKGLDRTKVDKINELIDALNDKNRLLEKQEDLLYEEHDKFVEAQKSHALEVKRNEMLSCELSSCHKTISNLRSINDDLNAKLEIASKSTCCGEIVATCNRCKDFDIDACSEHLVSISKLNDELASLNAQLKTSKSEFDRLKFMMDAYTIGRHPSIKDGLGFKRETKNLTSHKVPIPAKEKGKAPMA

SEQ ID NO: 10512 - protein, 443 aa, Zea mays
  Clone ID: TF_ZM4986.C2.o5.fg.pep
MDPKGKGIVINDKEKESFVNEPKDDKPTDSGSGHKRKDGKKKKTRRIKEIVYYDDSDESTSSQKDDDNDYRKTVNSNFSFDYSRIPHSSNSHLLSIPLGKPPHFDGEDYGFWSHKMRSHLFSLHPSMEEYNKVSGLDNAKQIWDTLKISHEGNDITMLTKMELVEGELGRFAMIRGEEPTQTYNRLKTLINKIRSYGSTRWTDHDVVRLMLRSFTVLDPHLVNNIRENPRYTMMTPEEVLGKFVSGRMMIKEARYVDDALNGPINEPQPLALKATRSKEMLPSKVAQIEAVGLNDEEMALIIKRFKTALKGRKGQPSKTKTKGKHSCFKCGKLGHFIANCPDNDSDQDQGNKREKKKNYKKAKGEAHLGKEWDSDCSSSDSDNEGLAATAFNKSSLFPNERHTCLMAREKKVSTRDSTYASSSDNESSDDDDIDYSCLFKGLD

SEQ ID NO: 10513 - protein, 524 aa, Zea mays
  unsure (1)..(524): unsure at all Xaa locations
  Clone ID: TF_ZmC29741_67.pep
MALIIKRFKTALKGRKEHPNKSKTKGKRSCFKCGKIGHFIANCLDNDSDQEQGKNGKRENKKVYKKAKSEAHLGKEWDSDCSSSDSDDEGLAATAFNKSSLFPNEHHTCLMAKEKKVSTRRTITYASSSDDEPSDDEVDYASLFKGLDRTKIDKINELIDALNEKDRLLEKQEDLLYEEHDKFVSAQNSLALEVKRNEMLSCELSTCHESISSLKSINDDLNTKLEITNKSSSCVEHVVIFNRCKDFNVDACVEHLTSIAKLNGEVASLNAQLKTSKNDFDKLKFARDAYTIGRHPSIKDGLGFKREAKNLTSQRAPIFNKEKGKAPMANSSQKNHAFIYDRKFSRNAYHNGSCDAYDSNAMIASSSFFVHGRDMPRRNVVHVPRKPSNEPSTIYHACNASFAICRKNKKVIARKLGAKCKGDKTCIWVPKAIVTNLVGPNKSWVLSGTIIRGTLKTPNSQLVTPISXSCKGLMGPIKKMFTSYVKNKDSQDSIIFGDGIQGMVKGLGKIAISNAHSISNVFCV

SEQ ID NO: 10514 - protein, 293 aa, Zea mays
  Clone ID: TF_ZM3651.C6.o3.fg.pep
MDPKGKGIVINDKEKESFVNEPKDDKPTDSGSGHKRRDGKKKKTRRIKEIVYYDDNDESSSSQKDDDNNYEKKKTINSNFSFDYSRIPHSSNAHLLSIPLGTSTIRYTKMTPEEILGKFVSGRMMIKEARYVDDALNGPIQEPQTIALKATRSKEALPSKVAQVEAAGLNVEEMTLIIKRFKTALKGRKEHPNKNKTKGKHSCFKCGKIGHFITNCPDNDSDQEKKSGKWEKKKNYKKAKGEAHLGKEWDSDCSSFDSDNEGLATTTFNKSSLFPNKHHTCLMAREKKVLMMI

SEQ ID NO: 10515 - protein, 1661 aa, Zea mays
  Clone ID: TF_ZM4412.C1.o7.fg.pep
MDPKGKGIVINDKEKESFVNEPKDDKPTDSGSGHKRKDGKKKKTRRIKEIVYYNDSDESTSSQKDDDNDYRKTVNSNFSFDYSRIPHSSNSHLLSIPLGKPPHFDGEDYGFWSHKMRSHLFSLHPSIWEIVENGMKFDSSDSPMLINEQIHRNAQATTVLLASLCREEYNKVSGLDNAKQIWDTLKISHEGNDITMLTKMELVEGELGRFAMMRGEEPTQTYNRLKTLINKIRSYGSTRWTDHDVVRLMLRSFTVLDPHLVNNIRENPRYTMMTPEEVYGKFVSGRMMIKEARYVVDALNGPINEPQPLALKATRSKETLPSKVAQIEAVGLNDEEMALIIKRFKTALKGRKGQPSKTKTKGKRSCFKCGKLDHFIANCPDNDSDQDQGNKREKKKNYKKAKGEAHLGKEWDSDCSSSDSDNEGLAATAFNKSSLFPNEHHTCLMAREKKVSTQDSTYASSSDNESSDDDDIDYSCLFKGLDRSKIDKINELIDALNDKNRLLEKQEDLLYEEHDKFVEAQKSLALEIKRNEMLSFELSTCHETISTLKSVNNDLNAKLEAANKSNSYVEHVVICTRCKDFDIDACSKHLVSISKLNDELASLNAQLKTSKNDFDKLKFARDAYTIGRHPSIKDGLGFKREAKNLTSHKAPISAKEKGKAPMASSTKRNHAFMYHDRRQTRNAYRSYNAYDDFDSHAMFASSSSYMHGRNMSRRNAIHHVPRKNIIHTPRKVVNEPSTIYCALNASFAICRKDRKIVARKLGAKCKGDKTCIWVPKDICTNLVGPNMSWVYAFGGSSWIIDSGCTNHMTGEKKMFTSYVKNKDSQDSIIFGDGNQGKDKSETQGTLKRFLRRAQNEFELKVKKIRSDNGSEFKNLQVGEFLEEEGIKHEFSAPYTPQQNGVVERKNRTLIDMARTMLGEFKTPECFWSETVNTACHAINRVYLHRLLKKTSYELLTGNKPNVSYFRVFGSKCYILVKKGRNSKFAPKAVEGFLLGYDSNTKAYRVFNKSSGLVEVSSDVVFDETNGSPREQVVDLDDVDEEDVPTAAMRTMAIGDVRPQEQLEQDQPSSSTMMHPPTQNDEQVHQEECDQGGAQDDHVMEEEAQPAPPTQVRAMIQRDHPVDQILGDISKGVTTRSRLVNFCEHYSFVSSIEPFKVEEALLDPDWVLAMQEELNNFKRNEVWTLVPRPKQNVVGTKWVFRNKQDEHGVVTRNKARLVAKGYAQVAGLDFEETFAPVARLESIRILLAYAAHHSFRLFQMDVKSAFLNGPIKEEVYVEQPPGFEDERYPDHVCKLSKALYGLKQAPRAWYECLRDFLIVNAFKVGKADPTLFTKTCDGDLFVCQIYVDDIIFGSTNQKSCEEFSRVMTQKFEMSMMGELNYFLGFQVKQLKDDTFISQTKYTQDLLKRFGMKDAKPAKTPMGTDGHTDLNKGGKSVDQKAYRSMIGSLLYLCASRPDIMLSVCMCARFQSDPKECHLVAVKRILRYLVATPCFGLWYPKGSTFDLVGYSDSDYAGCKVDRKSTSGTCQFLGRSLVSWNSKKQTSVALSTAEAEYVAAGQCCAQLLWMRQTLRDFGYNLSKVPLLCDNESAIRMAENPVEHSRTKHIDIRHHFLRDHQQKGDIEVFHVSTENQLADIFTKPLDEKTFCRLRSELNVLDSRNLD

SEQ ID NO: 10516 - protein, 1358 aa, Zea mays
  Clone ID: TF_ZM4640.C8.o1.fg.pep
MTSHGSSDEGNAQSHTDGLAREGFRCILWEVLQGAGYMTPPLYAVQQLEKHRVPRCRVRMTLEPHPLQPGWRSLDFECFGYRAEDTIEAIALHGLTTFCRFHPLELSTHPIGLFLTEKEDDPMWKDRVEHAKDIWAIYPCQTAHLTVRCMNALYRLQVMRGEAMSHLMALLEATKITLDNREELVVDLSTEMVEKDLQVEQLSNEIQELEELVGTRENTLEELMAQQNEILRQLAQRQPPPQHYGGGDHQRHPAAATYQEFLSTQPPLFTRAEDPLDADVWLRVVESKFPLLHGVCSEVTKPEDREVEWREFKAAFRGHHIPAGIMDRKLNEFLALTQWNRTVLQYSQAFNDLCQYAGYHADTDEKKWDRFRRGLSTKLRDRLNTVRANSYNELVNMAISQEDCITARQAEKKRKSPVEGPSAQPQHFRIVSDTQNRGPKQQQGRWVIRPQQQQQYRQANDNMCFTCGNTGHYAKNCPMNQQRQRQNANQNQGKRQKVQVRQGRLNFTTMADIPEGAPVMTGIFSVSNYPAIILFDSGASHSFISAKCQLPFHHTNGGITISTPGGRVATYQINKNVPIKFGSLIIKTNLLILGLNSVDIILGTDWLTKHQATMDTAARAIEVHSPTCGETTLYLPNQGCTRSCAFVMIESPVERIPLVCDYPDVFPDELPGMPPDRDIEFAIELQTGTAPTSKRPYRMPPAELAELKKQLQELLDKGFIRPSTSPWGCPALFVKKKDESLRMGVDYRPLNAVTIKNKYPLPHIDVLFDQLLREIKFLGHTISQDGISVDPEKVQEVMYWKPPTTVRQIRSFLGLAGYYRRFIPDFSRIAKPMTELLKKGVKYNWSQKCEDAFHTLRQHLTTAPVLAQPDNTKPFEVYCDASGTGLGCVLMQDNRVIAYASQALRPHEQNYPTHDLELAAVVHALKIWRHFLMGAHCNIYTDHKSLKYLFTQADLNMRQRRWLELIKDYDLEVHYHPGKANVVADALSRKAQCNCALNYISVEPTMQEQIVRAQIEDKGVQVIKEMIKQKAEKYKCFRQDSKGILWFGDRLVVPKDPELRKKILDEAHLSKFSMHPGSNKMYHDLRSLYWWTRMKREIAKYISECDTCQRIKVIHLKVAGPLQPLPIPSWKWEDICIDFIVGLPNTSRHHDSIWVIVDRLTKTAHFLPVHTTHKTEKYAEIYVDPIVRLHGIPKTIVYDRGALFVARFWEQLQESLGTHAIRSSAYHPQTDGQTERVNQILEDMLRACVLHYGKNWDKCLSLAEFSYNNSYQSSLKMAPFEALYGRRCRTPLNWSQAGEREIFGPDLVLEAEEKVRVIKKNLEAAQARQKSYHDKRRKPLQFEVGDHVYLKVSPTKGV

SEQ ID NO: 10517 - protein, 1518 aa, Zea mays
  Clone ID: TF_ZM4871.C2.o15.fg.pep
MDPKGKGIVINDKEKESFVNEPKDDKPTDSGSGHKRRDGKKKKTRRIKEIVYYDDSDESSSSQKDNDDNDYDKRKTMELVEGELGRFAMIRGEEPTQTNNRLKTLINKIRSYGSTRWTDHDIVRLLLRSFTVLDPHLVNNIRENPRYTKMSPEEVLWKFVSGRMMIKEARYVDDALNGPIHEPQPIALKATRSKESLPSKVAQIEATGLNDEEMALIIKRFKTALKDRKGQPSKTKTKGKRSCFKCGKIGHFIANCLDNESDQEQGSKREKKAYKKAKGKAHLGKEWDSDCSSSDSKNEGLAATAFNKSSLFPNERHTCLMVKEKKVCTRDSTTYDSSSDEEIDYSSLFKGLDRTKVDKINELIDALNEKDKLLEKQEDLLYEEHDKFVEAQKSYALEVKRNEMLSCELSSCHETISSLRSINDGLNAKLEIASKSNSCVEHVMICNRCKDFDIDACSEHIASIAKLSDEVASLNAQLKTSKSEFDKLKFARDAYTIGRHPSIKDGLGFKREAKNLTSHKAPIPAKEKGKAPMASSPKKNHAFMYHDRRQSYRSCNAYNAFDSHAMFASSSSYMHGRDMSRRYVVHMPRRNVVNVPRKVNEPSTIYHALNASFAICRKDRKIVARKLGAKCKGDKTCIWVPKDICANLVGPNMSWVYASGGSSWIIDSGCTNHMTGEKKMFTSYVKNKDSQDSIIFGDGNQGKDKSETQGTLKRFLRRAQNEFELKVKKIRSDNGSEFKNLQVEEYLEEEGIKHEFSAPYTPQQNGVVERKNRTLIDMARTMLGEFKTPERFWSEAVNTACHAINRVYLHRLLKKTSYELLTGNKPNVSYFRVFGSKCYILVKKGRNSKFAPKAVEGFLLGYDSNTKAYRVFNKSSGLVEVSSDVVFDETNGSPREQVVDLDDVDEEDVPTAAIRTMVIGDVRPQEQKEQDQPSSSTMVHPPTQEDEQVYQKEAYDQGGAQDDQVMEEEAQSAPPTQVRAMIQRDHPVDQILGDISKGVTTRSRLVNFCKHYSFVSSIEPFRVEEALLDPDWVLAMQEELNNFKRNEVWTLVPRPKQNVVGTKWVFRNKQDEHGVVTRNKARLVAKGYAQVAGLDFEETFAPVARLESIRILLAYAAHHSFRLFQMDVKSAFLNGPIKEEVYVEQPPGFEDERYPDHVCKLSKVLYGLKQAPRAWYECLRDFLIANAFKVGKADPTLFTKTCDGDLFVWQIYVDDIIFGSTNKKSCEEFSRVMTQKFEMSMMGELNYFLGFQVKQLKDDTFISQTKYTQDLLKRFGMKDAKPAKTPMGTDGHTDLNKGGKSVDQKAYQSMIGSLLYLCASRPDIMLSVCMCARFQSDPKECHLVAVKRILRYLVATPCFDLIGYSDSDYAGCKVDRKSTSGTCQFLGRSLVSWNSKKQTSVALSTAEAEYVAAGKCCAQLLWMRQTLQDFGYNLSKVPLLCDNESAIRMAGNPVEHNRTKHIDIRHHFLRDHQQKGDIEVFHVSTENQLADIFTKPLDEKTFCRLRSELNVLDSRNLD

SEQ ID NO: 10518 - protein, 1631 aa, Zea mays
  unsure (1)..(1631): unsure at all Xaa locations
  Clone ID: TF_ZM4926.C1.o9.fg.pep
MDPKGKGIVINDKEKESFVNEPKDDKPTDSGSGHKRRDGKKKKTMRINEIVYYDDSDGSSSSQKDNDDNDYDKRKTIHKNAQATTVLLASLCRDEYHKVSGLDNAKQIWDTLKISHEGNDVTLLTKMELVEGELGRFAIIRGEEPTQTYNRLKTLINKIRSYRSTQWTDHDVVRLMLRSFTVLDPHLVNNIRENPRYTKMSPEEVLGKFVNGRMMIKEARYVDDALNGPINEPQPFALKATRSKEALPSKVAQVEAAGLNDEEMALIIKRFKTTLKGHKGQLSKTKTKGKRSCFKCGKIGHFIANCLDNDSDQEQGNKREKKKAYKKAKGEAHLGKEWDSDCSSSDSDNEGLAATTFNKSSLFPNEHHTCLMAKEKKVCTRNNATYDSSSDEEIDYSSLFKGLDRTKIDKINELIDALNEKDKLLQKQEDLLYEEHDKFVEAQKSHALEVKRNEMLSCELSSCHETISSLRSINDDLNAKLVIASKSNSCVEHVMICNRCKDFDIDACSEHLVSISKLNDELASLNAQLKTSKNEFDKLKFARDAYTIGRHPSIKDGLGFKREAKDLTSYKAPISAKEKGKAPMASSAKRNHAFMYHDRRQSYRSCNANDAFVSHAMFASSSSYRHDRDMSRRNAVHMPRRNVVNIPRKVNEPSTIYHVLNASFAIYRKDRKIVARKLGAKCKGDKTCIWVPKDICTNLVGPNKSWVYASGGSSWIIDSGCTNHMTGEKKMFTSYVKNKDSQDLIIFGDGNQGKVKGLDVSVFRRSDGSLAFKGVLDGKLYLVDFAKEEAGLDACLIAKTSMGWLWHRRLAHVGMKNLHKLLKGEHVIGLTNVTFEKDRPCAACQAGKQVGGAHHSKNVMTTSRPLEPLHMDLFGPVAYLSIGGSKYGLVIVDDFSRFTWVFFLQDKTETQGTLKRFLRRAQNEFELNVKKIRSDNGSEFKNLQVEEYLEEEGIKHKFSAPCTPQQNGVVERKNRTLIDMARTMLGEFKTPECFWSEAVNTACHAINRVYLHRLLKKTSYELLTGNKPNVSYFRVFGSKCYILVKKGRNSKFAPKAVEGFLLGYDSNTKAYRVFNKSSGLVEVSSDVVFDETNGSPREQVVDFDDVDEEDVPTAAIRTMAIGDVRPQEQGERDQPSSSTMVHPPTQDDEQEVCDQGGAQDDHVIEEEAQPAPPTQVRAMIQRDHPIDQILGDISKGVITRSRLVNFCEHYSFVSSIEPFRVEEALLDPDWVLAMQEELNNFKRNEVWTLVPRPKQNVVGTNWVFRNKQDKHGVVTRNKARLVAKGYAQVAGLDFEETFAPVARLESIRILLAYAAHHSFRLFQMDVKSAFLNGPIKEEVYVEQPPGFEDERYPDHVCKLSKALYGLKQAPRAWYECLRDFLIANAFKVGKADPTLFTKTCDGDLFVCQIYVDDIIFGSTNQKSCEEFSRVMTQKFEMSMMGELSYFLGFQVRQLKDGTFISQTKYTQDLIKRFGMKDAKPAKTPMGTDGHTDLNKGGKSVDQKAYRSMIGSLLYLYASRPDIMLSVCMCARFQSDPKECHLVAVKRILRYLVATPCFGIWYPKGSTFDLIGYSDSDYAGCKVDRKSTSGTCQFLGRSLVSWSSKKXNFVALSTAEAEYVAAGXCCVQLLWM

SEQ ID NO: 10519 - protein, 635 aa, Zea mays
  Clone ID: TF_ZM4991.C3.o7.fg.pep
MDPKGKGIVINDKEKESFVNEPKDDKPTDSGSGHKRKDGKKKKTRRIKEIVYYDDNDESTSSQKDNDDNDYDKRKTVNSNFSFDYSRIPHSSNAHLLSIPLGKPPHFDGEDYGFWSHKMRSHLFSLHPSIWLIVENGMKFDSSDSPTFINEQIHKNAQATTVLLASLCRDEYHKMELVEGELGRFAMIRGEEPTQTYNRLKTLINKIRSYGSTRWTDHDVVHLMLRSFTVLDPHLVNNIRENPRYTKMSPEEVLGKFISGRMMIKEARYVDDALNGPIHEPQPIALKATRSKEVLPSKVAQVEAAGLNDEEMALIIKRFKTALKGRKGQPSKTKTKGKRSCFKCGKIGHFIANCLDNDSDQEQGGKREKKKAYKKAKGEAHLGKEWDSDCSSSDSENEGLAATAFNKSSLFPNERHTCLMAKEKKVCTRDSTTYDSSSDDESSDEQIDYSSLFKGLDRTKIDKINELIDALNEKDRLLEKQEDLLYEEHDKFVSAQNSLALEVKRNEMLSSEVSTCHDSISSLKRINNDLNAKLEVANKSNSCVEHVMICTRCKDFDIDACSEHLVCISKLNDEVASLNAQVKTSKSEFDKLKFARDAYTIGRHPSIKDGLGFKREAKNLTSHKAPISAREGPYG

SEQ ID NO: 10520 - protein, 1319 aa, Zea mays
  Clone ID: TF_ZmC951_407.pep
MLHQGEEPQAMYNRLKTLVNQVRNLGSTKWDDHEMVKVIFRSLVFLNPTQVQLIRGDPRYQLMSPEEVIGKFVSFELMIKGSKQIIERGATSTPEVQPVAFKATEEKKEESTSSRLPIDASKLDNEEMTLIIKRFRQILKQRKGKDYKPRSKKVCYKCGKPDHLIAKCPLSSDSDSGDDKKGKRREKKRYYKKKGGDAHVCREWDSDESSTDSSDEDATNIAVTKGLLFPNVGHKCLMAKDGKRKKVKSRSSTKYATSSDEASSSDDEDDLLTLFANLNMQQKEKLNELISAIHDKDELLDTQEDFLIKENKKHVKVKNAYAQEIEKCENLTSELSTCHDTISNLRFENDKLIAKVEKLNVCDDSIVNLRNDNASLIAKIDKLNASLSSLKVENEKLIAKAKDLNVCNVSISNLRDENAILHAKIVELNTCKPSTSTVSHVSICTRCRDVNVDAIHDHIAMIKQQNDNIAKLDAKIAEHELENEKFKFARSMLYSGRCPGIKDGIGFQKGDNVYASGGSSWIIDSGCTNHMIGEKKMFSSYEKNHDPQRAITFGDGNQGLEKSQTQETLKGFLRRAQNEFGLRIKKIRSDNGTEFKNSQIEGFLEDEGIKHEFSSPYTPQQNGVVERKNRSLLDMARTMLDEYKTSDRFWAEAINTACYAINCLYLHRILKKTSYELLTGKKPNVSYFRVFGSKCFILVKRGRKSNFAPKAVEGFLLGYDSNTRAYRVFNKSTRLVEVSGDIVFDETNGSQVEQVDLDELDDEETLCVTLRNMSIGDVCPKESKDSPQAQDQPSSSNQASPPTQDEDQAQDDENEDQEDEPPQEEGNDQGGDARDQDKDDNDGPRPPYPRVHQAIQRDHPVNSILDDIHKGVTTRSRVAHFCEHYSFVSSIEPYRVEDALRDSDWVLAMQEELNNFTRNEVWHLAPHPNQNVVGTKWVFRNKQDEHGVVTRNKARLVAKGYSQVKGLDFGETYAPVARLESIRILLAYATYHGFKFYQMDVKSAFLNGPIKEEVYVEQPPGFEDSEYPNYVYKLSKALYGLKQAPRAWYECLRDFLITNSFKVGKADPIIFTKNIAKDLFVCQIYVDDIIFGSTNKSTCEEFSRIMIQKFEMSMMGELKYFLGFQVKQLQEGTFICQTKYIQDILNKFGMKDAKPIKTPMGTNGHLDLDTRGCKIDKKSTSGTCQFLGRSLVSWASKKQNSVALFTAEAEYIAAGHCCAQLLWMGQTLRDYGYKLSKVLLLCDNESAIRMADNPVEHNRTKHIDIRYHFLRDHQQREDIEIAYVSTKEQLANIFTNPLDEKTFSKLRNELNILDSRNFD

SEQ ID NO: 10521 - protein, 529 aa, Zea mays
  Clone ID: TF_ZM4640.C5.o2.fg.pep
MLNIAQCSDREKVLYASGRLTGPAADWWDSYVVAHDAADTITWAEFTTEFRNYHILAGLMKIKKKEFLSLKQGNMSVSVYKDKFIKLSRYAPDEVRLLDKALAIEHKRVQLGDLKRKAITQGQGYTSSSRRRTTPSSVHSTGVSTDTSHSSGCPHWHPVRPTGQKTGPTCFKCSQVGHYANACPVGNSGTPAQNKQQTPSKGYSIARVNQVSADATPDGADITLGTFYVNAIPATILFDSGATHSFMSARYANTIEIPLQHMRKPMIVITPIGPVEANHITHKLALTIMGREIWATAIVLEESSIDLILGMSWLRKANDIIQCARGTVELTNPKGERFQVQIAVTTSSRRAMFFIAEEFVGENIRVVRDFPYVFPEELPGMPPERSLNDVTIKNKYSLPRIDDLFDQMRGARVFSKIDPRSGYHQMKIRPSDIPNTVFSTRYGLYEFTVMSFGLTNAPAYFMNLMNKVFMEYLDKFVVVLIDDILIYSKNDSYYWRFIEGFSKISKHMTSLLEKGKEFKWTEKCQESFD

SEQ ID NO: 10522 - protein, 1469 aa, Zea mays
  Clone ID: TF_ZmC119_1021.pep
MNPPNPPPGGVDPLVAAQMAVMQQMTDTMADMRAQMQQERQEMRQEREDIRQELRQEREEIRQERRAQQQQLQQQMQQQQQQQQQQQVPLPPPPPPVPPRDKHREFMSHKPPTFASSPDPLDADDWLKSIEKMLNIAQCTDREKVLYASGRLTGPAADWWDSYTAAHDAADTITWAEFSTQFRNYHIPAGMIKIKKKEFLSLKQGNMSVSEYRDKFIQLSRYAPEEVAEDERKQEHFIEGLNGPLQYALVAHTFPSFQRLLDKALAIEHKRVQLSDLKRKAISQGQGSSSVRPRYVPPQGTPTRPGGPRPVQYAPQGSPRTPTRQATPTGTPTRSTGQKTSPTCFKCSQIGHYANACPMGNSARVNQVSVDDTPDGGDIVLGMFYVNAIPATILFDSGATHSFMSARYANTNEIPLLNMRKLLIVITPKGPVEANQMTRRLTLTIMGREFGATAIILESSSIDLILGMSWLRKANAVIACGRGIVELTTTKGERFQVNIAVTSSSMRAMFFMPEEFVGDNIRVVRDFPDVFPEELPGMPPDREVEFVIDLLPGTAPISKRPYRMAVEELKELKKQLTELQEAGYIRPSSSPWGAPVLFVQKKDGSQRMCVDYRSLNDVTVKNKYPLPRIEDLFDQMRGARVFSKIDLRSGYHQMKIRPSDIPKTTFSTRYGLYEFTVMSFGLTNAPAYFMNLMNKVFMEYLDRFVVVFIDDILIYSRNESDHVQHLRLVLQKLRDNQLYAKFSKCEFWIDKVSFLGHIISNGGIAVDPAKVKEIMEWIVPTTVTEIRSFLGLAGYYRRFIEGFSKIAKPMTSLLEKGREFKWDEKCQESFDQLKERLMSPPVLIMPDLQKGFDIYCDACGQGLGCVLMQEGHVIAYASRQLRKHELNYPTHDLELAAVVHALKIWRHYVMGTKCQVYTDHKSLKYIFTQKDLNLRQRRWLELIKDYDLEIHYHPGKANLVADALSRKEHVHSAFVVQLPDELAKDFERLNLGIVTHTEGVTIELEPTLEQEIRKEGRGPEFTEDEQGTIWFKNRICVPDIDSLRETILKDAHDSVYSIHPGSTKIYQDLKQKYWWYGLKRDVAAHVAMCDVCQRVKAEHQRPAGLLHPLKIPEWKWEEIDMDFIVGLPRTSAGYDSIWVIVDRLTKVAHFIPVKTTYSGAKLAELYMARIVCLHGVPKKIVSDRGSQFTSRYWKKLHESLDTRLNFSSAYHPQTDGQTERTNQVLEDMLRACALKHGGSWDKSLSYAEFSYNNSYQASLKMSPFEALYGRKCRTPLYWDQTGERQLFGPEIIQEAEEQVQQIRENLRTAQSRQKSYADTRRRLLEFKEGDYVYLKVSPLRGMRRFKVKGKLSPRFIGPFLILKRVGEVAYQLELPDHLADVHDVFHVSQLKKCLRVPEEQLPMEDLSVQEDLTYAEYPIKILDTLTRVTRNKVIKMCKVQWSHHGEDEATWEREEELRIDFPHLFPRSS

SEQ ID NO: 10523 - protein, 1348 aa, Zea mays
  Clone ID: TF_ZM4625.C2.o3.fg.pep
MAEREEIRQERRAQQQLQQQFQQQQQQQQVPFPPPPPPVPPRDKHQEFMSHKPPTFASSPDPLDADDWLKSIEKMLNIAQCSDREKVLYASGRLIDPAADWWDSYTAAHDAADTITWVEFSTQFRNYHIPAGLMKIKKKEFLSLKQGNMSVSEYRDKFIQLSRYALDERLLDKALAIEHKRVQLGDLKRKAISQGQGSSSVCPRYVPPQGTPTRLGGPHPVQYAPQASPRTPPTRQATPNGTPTRPTGQKTDPTCFKCSQIGHYANACPMGNSGTPAKNKQQTPGKGYSIARVNQVSVDATPDGADIVLGMFYVNAIPATILFNSGATHSFMSTRYANTNEIPLLNMRKPMIVITPKGPIEANQMTRRLTLTIMGREFGATAIILEASSIDLILGMSWLRKAKAIIACGRGTIELTSPKGETFQVQFAVTTSSKRAIYFIPEEFVGDNIRVVTYFPDVFPEELPGMPPDREVEFVIDLLPGTAPISKRPYKMSVEELKELKKQLTELQEAGYIHLSSSPWGAPVLFVQKKDGSQRMCVDYRSLNDVTVKNKYPLPRIEDLFDQMRGARVFSKIDLLSGYHQMKIRPSDIPKTAFSTRYGLYEFTVMSFGLTDAPAYFMNLMNKVFMEYLDRFVVVFIDDILIYSKSESDHEEHLRLVLQKLRDNQLYAKFSKCEFWIDKVPFLGHIISNGGIAVDPVKVKEIMEWSVPTTVTEIQSFLGLAGYYRRFIEGFSKIAKPMTSLLEKGREFKWDEKCQDNFDQLKKRLMAPPVLIMPDLQKGFDIYCDACGQGLGCVLMQEGHVIAYASRQLRKHELNYPTHDLELAAVVHALKIWRHYIMGTKCQVYMDHKSLKYIFTQKDLNLRQRRWLELIKDYDLEIHYHPGKANLVTDALSRKEHGVTIELEPTLEQEIRKGQVGDAKIQEIKDLIMEGRVPDFTEDEQGTIWFNDRICVPEIDSLRETILKEAHDSDYSIHPGSTKMYQDLKQKYWWYGLKRDVAAHVAKCDVCQRVKAEHQSPAGLLHPLKIPEWKWEEIGMDFIVGLPRTPVGYDSIWVIVDRLTKVAHFIPVRTNYTGAKLVELYMTRIVCLHGVPKKIVSDRGSQFTSRFWKKLHESLDTRLNFSSAYHPQTDGQTERTNQVLEDMLRACALKHGGSWDKSLPYAEFSYNNSYQASLKMSPFEALYGRKCRTPLQKSYADNRRRLLEFKEGDHVYLKVSPIQGMRRFKVKGKLSPRFIGPFLILKRVGEVAYQLELLDHLSNVHDVFYVSQLKKCLTVPEEQLPMEDLSVQDDLTYAEYPIKILDTLTRVTRNKVIKMCKVQWSHHGEDEATWEREEDLRIDFPHLFPRPS

SEQ ID NO: 10524 - protein, 1712 aa, Zea mays
  unsure (1)..(1712): unsure at all Xaa locations
  Clone ID: TF_ZM5057.C1.o8.fg.pep
MDPKGKRIVINDKEKESFVNEPKDDKHTDSGSGHKRKDGKKKKTRRIKEIVYYDDSDESTSSQKDNDDNDYERRKPVNSNFSFDYSRIPQSTNAHLLSIPLGKPPHFDGEDYGFWSHKMRSHLFSLHPSIWEIVESGMKFDSSDSPMFINEQIHRNAQATTMLLASLCRDEYHKVSGLDNAKQIWDTLRISHEGNDVTLLTKMELVEGELGRFAMIRGVEPTQTYNRLKTLINKIRSYRSTRWTDHDVVRLMLRSFTVLDPHLVNNIRENPRYTKMWPEEVLGKFVSGRMMIKEARYVDDALNGPIHEPQPIALKATRSKEALPSKVAQVEAAELNDEEMALIIKRFKTALKGRKGQPSKTKTKGKRSCFKCGMVGHFIANCPDNDSDQEEGNKREKKKNYKKAKGEAHLGKEWDSDCSSSDSDNEGLAATTFNKSSLFPNEHHTCLMAREKKVSAHNTSTYASSSEDESSDDDEIDYSCLFKGLDRTRVDKINELIDALNDKNRLLEKQEDLLYDEHDKFVEAQKSLALEIKRNEMLSCELSTCHDSISSLKSINDDLNAKLEIANKSTSCVEHVVLCTRCKDFNIDACSEHLVSISKLNDEVASLNAQLKTSKSEFDKLKFARDAYTIGRHPSIKDGLGFKREAKNLTSHKAPIPAKEKGKAPMASSAKRNHAFMYHDRKQSYKSCNAYDAFDSHAMFASSSSYMHGKDMSRRYIVHMPRRNVVNVPRKVNEPSTIYHALNASFAICRKDRKIVARKLGAKCKGDKTCIWVPKTIVTNLVGPNKSWVYASGGSSWIIDSGCTNHMTGEKKMFTSYVKNKDSQDSIIFGDGNQGKVKGLDVSVIRRSDGSLAFKGVLDDTLYLVDFAKEEAGLDACLIAKTNMGWLWHRRLAHVGMKNLHKLLKGEHVTGLTNVQFEKDRPCAACQAGKQDKSETQGTLKRFLRRAQNEFELKVKKIRSDNGSEFKNLQVEEYLEEEGIKHEFSAPYTPQQNGVVERKNRTLIDMARTMLGEFKTPERFWSEAVNTACHAINRVYLHRLLKKTSYELLTGNKPNVSYFRVFGSKCYILVKKGRNSKFAPKVVEGFLLGYDSNTKAYRVFNKSSGLVEVSSNVVFDETNGSPREQVVDYDDVDEEEVPTTAIRTMAIGDVRPQEQDEQDQPSSSTMVQPPTQDDEQEACDQGGAQDDHVMEEEAQPAPPAQVRAMIQRDHPVDQILGDISKGVTTRSRLVNFCEHYSFVSSIEPFRVEEALLDPDWVLAMQEELNNFKRNEVWTLVPRPKQNVVGTKWVFHNKQDEHGVVTRNKARLVAKGYAQVAGLDFEETFAPVARLESIRILLAYAAHHSFRLFQMDVKSAFLNGPIKEEVYVEQPPGFEDERYPDHVCKLSKALYGLKQAPRAWYECLRDFLIANAFKAGKADPTLFTKTCDGDLFVCQIYVNDIIFGSTNQKSCEEFSRVMTQKFERSMMGELSYFLGFQVRQLKDGTFISQTKYTQDLIKRFGMKDAKPXKTPMGTDGHTDLNKGGXCHLVAVKRILRYLVATPCFGIWYPKGSTFDLIGYSDSDYAGCKVDRKSTSGTCQFLGRSLVSWSSKKQTSVALSTAEAEYVAAGQCCAQLLWMRQTLRDFGYNLSKVPLLCDNESAIRMADNPVEHSRTKHIDIRHHFLRDHQQKGDIEVFHVSSENQLADIFTKPLDEQTFCKLRSELNVLDSRNLD

SEQ ID NO: 10525 - protein, 831 aa, Zea mays
  unsure (1)..(831): unsure at all Xaa locations
  Clone ID: TF_ZmC10872_12.pep
MALIIKSFCQILKQRRGKDYKPRSKKVCYKCDKPGHFIAKCPLSSDSDKGDDKRKKRRXKKRYYKKKGGDAHVCREWDSDESSTDSSSDEDTTNIIVXTKGLLFPNVGHKCLMAKDDKKKVKSRASTKYATSSDEENSSDDEDNLLALFANLNMQQKEKLNELIGAIHEKYELLDNQEDFLIKENKKHVKVKNAYAQEVERCEKLTSELSTCHDIISNLRNENAKLIAKVEKLDVCDDSIVSLRNDNASLITKIDKFNASLSSLKIENKKLIAKAKDLNVCNVSISNLKNENAISHAKIDELNACKPSTSTVSHVSICTRCRDVNVDAIHDNIAMIKQQNDHIEKLDAKIAEHDMENENFKFARSMLYSGRCPGIGFQQGGNVKLNAPKRLSNFVKGKAPMPQDNEGYILYPAGYPEDKIKRIHAKKTHSVSHHAFIYKNEASSSRHSTHVKMPKMKSPIASNDHNISFKTFDASYVLTNKSGKVVAKYVGAKHKGSKTCVWVPKVYASGGSSWIIDSGCTNHMTGEKRMFSSYEKNHDPQRAITFGDGNQGLVKGLGKIAISPGHSISNVFLVDSLDYNLLSVSQLCKMGYNCLFTNIDVTVFRRSDDSVAFKGVLEGQLYLVDFNRAELDTCLIAKTNMGWLWHRRLAHVGMKNFHKLLKGEHILGLTNVHFEKDRICSACQAGKQVDVHHPHKNIMTTDRPLELLHMDLFGPIAYISIDGSKYYLVIVDDYSRFTWVFFLQDKSQTQETLKGFLRWAQNEFGLRIKKIRSDNGTEFKNSQIEGFLEDEGIKHEFSSPYTPQQNGVVERKNRTLLDMTRTKLDEYKTSE

SEQ ID NO: 10526 - protein, 1588 aa, Zea mays
  Clone ID: TF_ZmC4916_426.pep
MDPNGKGMMVNDKEKESIFNEPRDDNPLTQDQVTRRGTGRRRGRSRRSFTTTTTPPLLHQETTTTMTRLKRNRIWEIVENGMHFDSTDNPVFINEQIHKNAQATTVLLAFLCRDEYNKVSDLDNAKQIWDTLKISHEGNDTTMITKMELVEGELGRFAMIRGEEPTQTYNRLKTLVNKIRSYGSTRWTDHDVVRLMLRSFMVIDPHLVNLIRENPRYTKMTPEEILGKFVSGRMMVKEARYVDDALNGPLPVHEPQTIALKATSNREKLPSKVAQVEAAGLNEDEMALIIKRFKTALKGRKEYPNKNKARGKRSCFKCGNTGHSIAQCPDNDDDHEQEKHGKREKKKVYKKAKGKAHLGKEWDSDYSSSDSDDEGLAASAFNKSSLFPNECHTCLMAKEKKVSVRDSPKYSTSSDEDSSDDEVDYSTLFKGLDRAKVEKINELIDALNEKDRLLEKQEDILYEEHDKFVSAQKSLALETKRNEMLSSKLSACHESISRLKILNDDLNAKLEVANQSSSCVEHVVICNRCKDFDIDACDEHLTSITKLSDEVASLNAQLKTCKVDFDKQKFARDAYAIGRHPSIKDGLGFRKETRNLTSQKTPVLNKEKEKAPMASSSKKCHAYIYDRKFSRNAHYNRSYNAFNSHAMFASSSTFVHGRSKPRRNHVVHHVPRKVYASGGSSWIIDSGCTNHMTGEKKMFTSYVKNKDSQDSIIFGDGNQGKVKGLGKIAITSEHSISNVFLVESLGYNLLSMFLSLERSDGSLAFKGVLDNKLYLVDFSREEVDLDACLIAKTSMSWLWHHRLAHVGMKNLHKLLKGEHVLGLTNVCFEKDRPCATCQAGKLVGSTHHSKNVMTTSRPLELLHMDLFGPVAYLSIGGSKYGLVIVDDFSRFTWVFFLQDKSETQGTLKRFLRRAQNEFELKVKKIRSNNGSEFKNLQVEEYLEEEGVKNEFSAPYTPQQNGVVERKNRTLIDMVRTMLGEFKMLERFWSEAVNTACHAINRLYLHHLLKKTSYELLTDNKPNVSYFRVFGRKCYILAKKGRHSKFAPKAVEGFLLGYDSNTKAYRVFNKSSALVEVSSDVVFYETNGSPREQVDLDDINEDDVPTAAIRTMAIGDVRPQEQQEQDQPSSSIMVHPPTQDDGQVPQEEACDQGGAQEEQAMEEEAPPAPPTQVRATIQRNHPVDQILGDISKGVTTRSRLANFCEHYSFVSSIEPFRVEEALQDPDWVLAMQEQLNNFKRNEVWSLVPRPKQNVVGTKWVFRNKQDEHRVVTRNKARLVAKRLCPSRRLFQMDVKSAFLNGPIKEEVYVEQPPDFEDDRYPHHVCKLSKALYGLKQAPRAWYECLRDFLIANSFKVGKADPTLFTKTCNGDLFVCQIYVDDIIFGSTNQKSCEEFSRVMTQKFEMSMMGELNYFLGFQVKQLKDGTFISQTKYTQDLPMRFGMKDTKPAKTPMGTDGHVDLNKGGKSIDQKAYWSMIRSLLYLCASRPYIMLSVCMCARYQSDPRECHLVAVKRILRYLVSTPCFGIWYPKGSTFDLIGYSDSDYAGCKVDRKSTSGTCQFLGRSLVSWSSKKQTSIALSTAEAEYVAT

SEQ ID NO: 10527 - protein, 1667 aa, Zea mays
  Clone ID: TF_ZM4405.C4.o1.fg.pep
MNTVMKNNKSGIGYNAFVQKKAITQYKPKQTHKPIKCFECGNEGHFAHNCKAKPPTPLPKHSRPFAFNAHYVLRKVANGKIKVNYKTGGSHWVIDSGCTQHMTGNPRMFTSLDENVDGQDKITFGDNSKGKVQGLGKVAISNDLSISNVLLVAPLSFNLLSVGQLCDLGLQCLFTPSEVIVTKMDDESMVFKGFRYNNLYLVDFTSEDADLRTCLFTKASLGWLWHRRLAHVGMSTLKKVLKKDMVRGLKDVVFEKDKPCSACQAGKQVANTHPTKAFMSTSRPLELLHMDLFGPTNYVSAGGNLYCLVIVDDFSRYTWVFFLHDKSEVASIFKKFAKKAQNEFDCKIKKIRSDNGKEFDNTNIHEYCDEIGIKHEVSATYTPQQNGVVERKNRILITLARTMIDEYNTPERFWAEAVNTACYASNRLFPHRLLAKTPYELLNGKKPDVSFFRVFGCKCYIYKKRHHLGKFQRRCDIGFLLGYSLKSKAYRVFNHATGVVEETYDVEFDETNGSQGALENLDDVGDEPLREAMKNMPIGAIKPKEDEEEVQIIDRPSSSNVPQDDEKYERHANEDTFVSYEQARVQAEDVDAPGSSSQVVDRRNSSLLQAHPESQIIGSPSQGVITRSHRHATFIEHHSFVSCVEPTCIDEALQDPDWVNAMHEELNNFTRNEVWTLEKPPQDARIIGTKWVFRNKQDDQGVIVRNKARLVAKGFSQVEGLDFGETFAPVARLEAICILLAYASCYDIKLYQMDVKSAFLNGFINELVYVEQPPGFEDPRYPNHAYRLSKALYGLKQAPRAWYERLRDFLIEKGFKIGTVDTTLFTKKHNGDIFICQVYVDDIIFGSTNDYHCKEFGELMSKEFEMSMIGELTYFLGFQVKQMKDGNFLSQEKYTKDLLKRFNMEKCKPIKTPMPTNGHLDLDEGGNPVNQTLYRSMIGSLLYLTASRPDIMFSVCMCARFQSNPKKAHLRAVKRILRYLRHTTSVGLWYPKGATFDLIGYSDSDYGGCKIDRKSTSGGCHLLGRSLVSWTSKKQNSVALSTAEAEYIAAGACCTQILYMKQTLLDYGVVLEKVPLLCDNESAVKIANNPVQHSRTKHIDIRHHFLRDHVAKGDIILEGVRHQIRMPRTKNASAPGGGDDEEPRRPFRQVKGKTVYLEQQEGRKKRYVPVESWLPAQRDPAAGDLFSTRIQESFFRAQMSAQIALRVHRLLDLPAFLLAAGADSEAHLTYLPGLQTLLTISGRYVEEWVRVFYASVWIDPDHHWIRFRFEREDVTITASQIRQLFGFPESTTRLHSLCYGSSDPPHRPHGGVAPGTAHVAALFRPPFTDGSRRSPADFTTAAKYLYELIRRTLLPRMGYREATTHIQLWLLGALVSHSEFDVVDFLICEIEDTVLDGIRARRQLPYAHYLCHIFAQLIQPPRFQSTLEASRLFDTQGTTADDDDDDDDFGVPPPPPPPMPPRSHDHEAGSSRAAPAPPSAMDPALATILANLAAEQARLSETMLSMFQSMQDRQDALQQQLLQDRAESRAFMALMLQHSGISAPPVQSAPPPPLHAPVVPSILSGPPVGTSPLRPVTLAFTSPVLSSVCPQPPVPPASAVTTTAVAVSVTASVPVAPAARPQSESVPAPASTADPGSETDSDPPPAFALLPRPRPNAPPPPPPASDV

SEQ ID NO: 10528 - protein, 1482 aa, Zea mays
  Clone ID: TF_ZmC3792_17.pep
MSDNRRRCNRRAQQEQHDQQEENQRQPPPPPPMSVEQMFLMQTQAVQAIGQTLAAMQQAQQQPQPQLQVQMPQMPRDKRGEFMRGHPPTFAHSADPMDAEDWLRAVERELRTAQCDDREKVLYGPRQLRGAAQSWWESYLATHADPEAITWEEFSESFRRYHVPEGLMIVKKEEFLALKHGPMSVSEYRDKFLQLSRYAPEDVNTDAKRQYRFMRGLVDPLHYQLMNHTFPTFQHLIDRAVMTEKKRKDMEDRKRKMSGPQSGGISRPRFSGSSSQQGRPGHPQGYQNQNQRPHQQQFQRQYPQQQQQYRQHSQQGGNQYQKQNNQAPRLPAPAANQSNQAAPAQGGGRGCFHCGDQGHWAMQCPKKMAQQQTNPNAPARQGVLQPAAGNRNQAYNRGKVNHLEAEAIQDAPDVAVGMFSVESHPAKVLFDTGATHSFVTATWVELHNISVEAMVPPMRINSVGGKVQTDKICSNIMVEIRGIGFPSDLIVIGTPGIDVILGMNWLMKYEANVSCDKRTITLKSPSGEEVVAELRMPKSEEGVCHQISVDSKEPNPLEAIKVVSDFPDVFPEELTGMPPERKVEFAIELIPGTAPISKRAYRVSGPELVELKKQIDEMLEKGYIRPSTSPWAAPVLFVEKKDGTKRMCIDYRALNEVTVKNKYPLPRIEDLFDQLRGASVFSKIDLRSGYHQLRIRPSDIPKTAFITKYGLYEFTVMSFGLTNAPAFFMYLMNSVFMDYLDKFVVVFIDDILIYSQSEEDHVEHLKMVLQRLREHQLYAKLGKCEFWIHEVLFLGHIINQDGLAVDPKKVADILNWKAPKDVRGIKSFIGMAGYYRRFIEGFSKIARPMTALLAKKVEFKWTQKCQEAFEELKNRLTTAPVLVLPDVHKSFSVYCDASYTGLGCVLMQEGRVVAYSSRQLKIHEKNYPTHDLELAAVVHALKTWRHYLYGQKCDIYTDHKSLKKSQVNMLASYPMPYELAKEFDRLSLGFLNSTQGVTVELEPTLEREIKEGQKDDENINKIRQLILEGRGKDFREDEEGVIWFKDRLCVPDLKPIRGLILKEAHETAYSIHPGSEKMYQDLKRRFWWYGMKREIAEYVAICVSCQRTKAEHQRPAGLLQPLRIPQWKWDEIGMDFIVGLPRTRAGYDSIWVVVDRLTKVAHFIPVKTTYTGATLAELYMSRIVCLHGVPKKIVSDRGTQFTSHFWQQLQEALGTHLNFSSAYHPQTDGQTERTNQILEDMLRACALQDKSGWDKRLPYAEFSYNNSYQASLKMSPFQALYGRSCRTPLHWDQPGERQVFGPDILLEAEENIKMVRENLKTAQSRQRSYADRRRRELSFEVGDYVYLKVSPIRGVRRFGVKGKLAPRYVGPYQIQAKRGEVAYQLDLPESLSAVHNVFHVSQLKKCLRVPEEQLPVEGLEVQEDLTYIEKPTQILEFADRVTRRNTIRMCKVRWGHHSEDEATWEREDDLKAKYPELFADQP

SEQ ID NO: 10529 - protein, 1454 aa, Zea mays
  Clone ID: TF_ZmC3792_22.pep
MPQMPRDKRGEFMRGHPPTFAHSADPMDAEDWLRAVERELRTAQCDDREKVLYGPRQLRGAAQSWWESYLATHADPEAITWEEFSESFRRYHVPEGLMIVKKEEFLALKQGPVSVSEYRDKFLQLSRYAPEDVNTDAKRQYRFMRGLVDPLHYQLMNHTFPTFQHLIDRAVMTEKKRKDMEDRKRKMSGPQSGGISRPRFSGSSSQQGRPGHPQGYQNQNQRPHQQQFQRQYPQQQQQYRQHSQQGGNQYQKQNNQAPRLPAPAANQSNQAAPAQGGGRGCFHCGDQGHWAMQCPKKLAQQQTNPNAPTRQGVLQPAAGNRSQAYNRGKVNHLEAEAIQDAPDVAVGMFSVESHPAKVLFDTGATHSFVTATWVELHNISVEAMMPPMRINSVGGKVQTDKICSNVRVEIRGIGFPSDLIVIDTPGVDVILGMNWLMKYEANVSCDKRTVTLKSPSGEEVVAELWMPKSVEGACHQISVDSKEPNPLEAIKVVSDFPDVFPEELTGMPPERKVEFAIELVPGTAPISKRAYRVSGPELVELKKQIDEMLEKGYIRPSTSPWAAPVLFVEKKDGTKRMCIDYRALNEVTVKNKYPLPRIEDLFDQLRGASVFSKIDLRSGYHQLRIRPSDIPKTAFITKYGLYEFTVMSFGLTNAPAFFMYLMNSVFMDYLDKFVVVFIDDILIYSQSEEDHVEHLKMVLQRLREHQLYAKLGKCEFWIHEVLFLGHIINQDGLAVDPKKVADILNWKAPKDVRGIKSFIGMAGYYRRFIEGFSKIARPMTALLAKKVEFKWTQKCQEAFEELKNRLTTAPVLVLPDVHKPFSVYCDASYTGLGCVLMQEGRVVAYSSRQLKIHEKNYPTHDLELAAVVHALKTWRHYLYGQKCDIYTDHKSLKYIFTQSELNMRQRRWLELIKDYELEIHYHPGKANVVADALSRKSQVNMLASYPMPYELAKEFDRLSLGFLNSTQGVTVELEPTLEREIKEGQKDDESINKIRQLILEGRGKDFREDEEGVIWFKDRLCVPDLKPIRELILKEAHETAYSIHPGSEKMYQDLKRRFWWYGMKREIAEYVAICDSCQRTKAEHQRPAGLLQPLRIPQWKWDEIGMDFIVGLPRTRAGYDSIWVVVDRLTKVAHFIPVKTTYTGATLAELYMSRIVCLHGVPKKIVSDRGTQFTSHFWQQLQEALGTHLNFSSAYHPQTDGQTERTNQILEDMLRACALQDKSGWDKRLPYAEFSYNNSYQASLKMSPFQALYGRSCRTPLHWDQPGERQVFGPDILLEAEENIKMVRENLKIAQSRQRSYADRRRRELSFEVGDYVYLKVSPIRGVRRFGVRGKLAPRYVGPYQIQAKRGEVAYQLNLPESLSAVHNVFHVSQLKKCLRVPEEQLPVEGLEVQEDLTYIEKPTQILEFADRVTRRNTIRMCKVRWGHHSEEEATWEREDDLKAKYPELFADQP

SEQ ID NO: 10530 - protein, 1805 aa, Zea mays
  Clone ID: TF_ZM3616.C5.o3.fg.pep
MARLRHTARKSVIPFLPSRLAERPLHRTVSGQSSHLERLHHRLREEQERRRQHREQQGSSSPPQREVESVRPRSSVAQLEAPPAPPRDVPAVGGATGGDPGGDPDDDDSDHSTESSEPQEAEGWVARPITRDAARGCHFHDALDTLLRQAFDRHTWSIEYRCVVYQHSCGRYPDRWEATCLVRRPEDDLRGAEAVSEHYSISERDTAEAAMQDAARRALSQYCSLFGGVADGLNLRYYPRRPTGSTESVVVSPVGEANPRLSSTVNLVAVLNTELDHSLDELSRARTEIAELRAELAERHHQEGGSPAPVGTQHPYRSPPRGHHTYGSPIVRSMLMYECLPQMSDNRRRCNRRAQLEQHDQQEENQRQPPPPPPMSVEQMFLMHTQAVQAIGQTLAAMQQAQQQPQPQLQVQMPQMPRDKRGEFMRGHPPTFAHSADPMDAEDWLRAVERELRTAQCDDREKVLYGPRQLRGAAQSWWEFYLATHADPEAITWEEFSESFRRYHVPEGLMIVKKEEFLALKQGPLSVSEYRDKFLQLSRYAPEDVNTDAKRQYRFMRGLVDPLHYQLMNHTFPTFQHLIDRAVMTEKKRKDMEDRKRKMSGPQSGGISRPRFSGSSSQQGRLGHPQGYQNQNQRPHQQQFQRQYPQQQQQYRQHSQQGGNQYQKQNNQAPRLPAPAANQSNQAAPAQGGGRGCFHCGDQGHWAMQCPKKTAQQQTNPNAPARQGVLQPAAGNRNQAYNRGKVNHLEAEAIQDAPDVAVGMFSVESHPAKVLFDTGATHSFVTATWVELHNISVEAMMPPMRINSVGGKVQTDKICSNIMVEIRGIGFPSDLIVIDTPGIDVILGMNWLMKYEANVSCDKRTITLKSPSGEEVVAELRMPKSEEGVCHQISVNSKEPNPLEAIKVVSDFPDVFPEELTSMPPERKVEFAIELIPGTAPISKRAYRVSGPELVELKKQIDEMLEKGYIRPSTSPWAAPVLFVEKKDGTKRMCIDYRALNEVTVKNKYPLPRIEDLFDQLRGASVFSKIDLRSGYHQLRIRPSDIPKTAFITKYGLYEFTVMSFGLTNAPAFFMYLMNSVFMDYLDKFVVVFIDDILIYSQSEEDHVEHLKMVLQRLREHQLYAKLGKCEFWIHEVLFLGHIINQDGLAVDPKKVADILNWKAPKDVRGIKSFIGMAGYYRRFIEVFSKIATPMTALLAKKVEFKWTQKCQEAFEELKNRLTTAPVLVLPDVHKSFSVYCDASYTGLGCVLMQEGRVVAYSSRQLKIHEKNSPTHDLELAAVVHALKTWRHYLYGQKCDIYTDHKSLKYIFTQLELNMRQRRWLELIKDYELEIHYHPGKANVVADALSRKSQVNLLASYPMPYELAKEFDRLSLGFLNSTQGVTVELEPTLDREIKEGQKDDENINKIRQLILEGRGKDFREDEEGVIWFKDRLCVPDLKPIRELILKEAHETAYSIHPGSEKMYQDLKRRFWWYGMKREIAEYVAICGSCQRTKAEHQRPAGLLQPLRIPQWKWDEIGMDFIVGLPRTRAGYDSIWVVVDRLTKVAHFIPVKTTYTGATLAELYMSRIVCLHGVPKKIVSDRGTQFASHFWQQLQEALGTHLNFSSAYHPQTDGQTERTNQILEDMLRACALQDKSGWDKRLPYAEFSYNNSYQASLKISPFQALYGRSCRTPLHWDQAGERQVFGPDILLEAEENIKMVRENLKTAQSRQRSYADRRRRELSFEVGDYVYLKVSPIRGVRRFGVKGKLAPRYVGPYQIQAKRGEVAYQLDLPESLSAVHNVFHVSQLKKCLRVPEEQLPVEGLEV

SEQ ID NO: 10531 - protein, 1441 aa, Zea mays
  Clone ID: TF_ZM4327.C5.o5.fg.pep
MSVEQMFLMQTQAVQAIGQTLAAMQQAQQQPQPQLQVQMPQMPRDKRGEFMRGHPPTFAHSADPMDAEDWLRAVERELRTAQCDDREKVLYGPRQLRGAAQSCEYRDKFLQLSRYAPEDVNTDAKRQYRFMRGLVDPLHYQLMNHTFPTFQHLIDRAVMTEKKRKDMEDRKRKMNGPQSGGISRPRFSGSSSQQGRPGHPQGYQNQNQRLHQQQFQRQYPQQQQQYRQHSQQGGNQYQKQNNQAPRLPAPAANQSNQAAPAQGGGRGCFHCGDQGHWAMQCPKKTAQQQTNPNAPARQGVLQPAAGNRSQAYNHGKVNHLEAEAIQDAPDVAVGMFSVESHPAKVLFDTGATHSFVTATWVELHSISVEAMMPPMRINSVGGKVQTDKICSNIMVEIRGIGFPSDLIVIDTPEIDVILGMNWLMKYEANVSWDKRTVTLKSPSGEEVVAELRMPKSEEGVCHQISVDSKEPNPLEAIKVVSDFPDVFPEELTGMPPERKVEFAIELIPGTAPISKRAYRVSGPELVELKKQIDEMLEKGYIRPSTSPWAAPVLFVEKKDGTKRMCIDYRALNEVTVKNKYPLPRIEDLFDQLRGASVFSKIDLRSGYHQLRIRPSDIPKTAFITKYGLYEFAVMSFGLTNAPAFFMYLMNSVFMDYLDKFVVVFIDDILIYSQSEEDHVEHLKMVLQRLREHQLYAKLGKCEFWIHEVLFLGHIINQDGLAVDPKKVADILNWKAPKDVRGIKSFIGMAGYYRRFIEGFSKIARPMTALLAKKVEFKWTQKCQEAFEELKNRLTTAPVLVLPDVHKSFSVYCDASYTRLGCVLMQEGRVVAYSSRQLKIHEKNYPTHDLELAAVVHALKTWRHYLYGQKCDIYTDHKSLKYIFTQSELNMRQRRWLELIKDYELEIHYHPGKANVVADALSRKSQVNMLASHPMPYELAKEFDRLSLGFLNSTQGVTVELEPTLEREIKEGQEDDENINKIRQLILEGRGKDFREDEEGVIWFKDRLCVPDLKPIRELILKEAHETAYSIHPGSEKMYQDLKRRFWWYGMKREIAEYVAICDSCQRTKAEHQRPAGLLQPLRIPQWKWDEIGMDFIVGLPRTRAGYDSIWVVVDRLTKVAHFIPVKTTYTGATLAELYMSRIVCLHGVPKKIVSDRGTQFTSHFWQQLQEALGTHLNFSSAYHPQTDGQTERTNQILEDMLRACALQDKSGWDKRLPYAEFSYNNSYQASLKMSPFQALYGRSCRTPLHWDQPGERQVFGPDILLEAEENIKMVRENLKTAQSRQRSYADRRRRELSFEVGDYVYLKVSPIRGVRRFGVKGKLAPRYVGPYQIQAKRGEVAYQLDLPESLSAVHNVFHVSQLKKCLRVPEEQLPVEGLEVQEDLTYIEKPTQILEVADRVTQRNTIRMCKVRWGHHSEEEATWEREDDLKAKYPELFADQP

SEQ ID NO: 10532 - protein, 1793 aa, Zea mays
  Clone ID: TF_ZM4454.C1.o11.fg.pep
MARLRHTARKSVIPFLPSRLAERPLHRTVSGQSSHLERLHHRLREEQERRRQHGEQQGSSSSPQQEVETVRPRSSVAQLEAPLVPPRDAPAVGGATGGDPDDDDSDHSTESSESQEAEGWVARPITRDAARGCHFHDALDTLLRQAFDRHTWSIEYRCVVYQHSRGRYPDRWEATCLVRRPEDDLRGAEAVSEHYSISERDTAEAAMQDAARRALSQYCSLFGGVADGLNLRYYPRRPTGSTESVVVSPVGEANPRLSSTVNLVAVLNTELDHSLDKLSRARTEIAELRAELAERHHQEGGSPAPVGTQHPYRSPPRGHHTYGSPVCADATGVLSWSSMTSRRKIRGSLPPPPPMSVEQMFLMQTQAVQAIGQTLAAMQQAQQQPQPQLQVQMPQMPRDKRGEFMRGHPPTFAHSADPMDAEDWLRAVERELRTAQCDDREKVLYGPRQLRGAAQSWWESYLATHANPEAITWEEFSESFHRYHVLEGLMIVKKEEFLALKQGPLSVSEYRDKFLQLSCYAPEDVNTDAKRQYRFMRGLVDPLHYQLMNHTFPTFQHLIDRAVMTEKKRKDMEDRKRKMSGPQSGGISRPRFSGSSSQQGRPAANQSNQAAPAQGGGRGCFHCGDQGHWAMQCPKKTAQQQTNPNAPARQGVLQPAAGNRNQAYNRGKVNHLEAEAIQDAPDVAVGMFSVESHPAKVLFDTGATHSFVTATWVELHSISVEAMMPPMRINSVGGKVQTDKICSNIMVEIRGIGFPSDLIVIDTPGIDVILGMNWLMKYEANVSCDKRTITLKSPSGEEVVAELRMPKSEEGVCHQISVDSKEPNPLEAIKVVSDFPDVFPEELTGMPPERKVEFAIELIPGTAPISKRAYRVSGPELVELKKQIDELLEKGYIRPSTSPWAAPVLFVEKKDGTKRMCIDYRALNEVTIKNKYPLPRIEDLFDQLRGASVFSKIDLRSGYHQLRIRPSDIPKTAFITKYGLYEFTVMSFGLTNAPAFFMYLMNSVFMDYLDKFVVVFIDDILIYSQSEEDHVEHLKMALQRLREHQLYAKLGKCEFWIHEVLFLGHIINQDGLAVDPKKVADILNWKAPKDARGIKSFIGMAGYYRRFIEGFSKIARPMTALLAKKVEFKWTQKCQEAFEELKNRLTTAPMLVLPDVHKSFSVYCDASYTGLGCVLMQEGRVVAYSSRQLKIHEKNYPTHDLELAAVVHALKTWRHYLYGQKCDIYTDHKSLKYIFTQSELNMRQRRWLELIKDYELEIHYHPGKANVVADALSRKSQVNMLASHPMPYELAKEFDRLSLGFLNSTQGVTVELEPTLEREIKEGQKDDENINKIRQLILEGRGKDFREDEEGVIWFKDRLCVPDLKPIRELVLKEAHETAYSIHPGSEKMYQDLKRRFWWYGMKREIAEYVAICDSCQRTKAEHQRPAGLLQPLRIPQWKWDEIGMDFIVGLPRTRAGYDSIWVVVDRLTKVAHFIPVKTTYTGATLAELYMSRIVCLHGVPKKIVSDRGTQFTSHFWQQLQEALGTHLNFSSAYHPQTDGQTERTNQILEDMLRACALQDKSGWDKRLPYAEFSYNNSYQASLKMSPFQALYGRSCRTPLHWDQPGERQVFGPDILLEAEENIKMVRENLKTAQSRQRSYADRRRRELSFEVGDYVYLKVSPIRGVRRFGVKGKLAPRYVGPYQIQAKRGEVAYQLDLPESLSAVHNVFHVSQLKKCLRVPEEQLPVEGLEVQEDLTYIEKPTQILEVADRVTRRNTIRMCKVRWGHHSEEEATWEREDDLKAKYPELFADQP

SEQ ID NO: 10533 - protein, 214 aa, Zea mays
  Clone ID: TF_ZM4581.C2.o10.fg.pep
MEDLSAMTTTTVIRKIAAFEISQKMGQEEPTSSRPYAFACDEKKKGKKKAPTPRSLSEEEEEEERKSKEREDVLHVGRRVTSGTTVQICPNAQKRGAKARHSQVSKLGMILQAKMILHGLTATNPHHSYHGHHTSALWQEDNTTAEVNKPGEGETMVCRLCYKECHKSYQCKVKTEDKQKQKLKQKPTSKISNTYINKVDKKVATPYLIKKKKN

SEQ ID NO: 10534 - protein, 1854 aa, Zea mays
  Clone ID: TF_ZM4889.C4.o1.fg.pep
MVLMARLRHTACKSVIPFLPSRLAERPLHRTVSGQSSHLERLHHHLREEQERRRQHREQQGSSSPPQQEVESVRPRSSVAQLEAPPAPPRDAPAVGGATGGDLGGDPDDDDSDHSTESSEPQEAEGWVARPITRDAARGCHFHDALDTLLRQAFDWHTWSIEYRCVVYQHGRYPDRWEATCLVRRPEDDLRGAEAVSEHYSISERDTAEATMQDAARRALSQYCSLFGGVADGLNLRYYPRRPTGSTESVVVSPVGEGNPRLSSTVNLVVVLNTELDHSLDELSRARTEIAELRAELAERHHQEGGSPAPIGTQHPYRSPPRGHHTYGSPMSDNRRRCNRRAQQEQHDQQEEHQRQPPPPPPMSVEQMFLMQTQAVQAIGQTLAAMQQAQQQPQPQLQVQMPQMPRDKRGEFMRGHPPTFAHSADPMDAEDWLRAVERELRTAQCDDREKVLYGPRQLRGAAQSWWESYLATHADPEAITWEEFSESFRRYHVPEGLMIVKKEEFLALKQGPLSVSEYRDKFLQLSRYAPEDVNTDAKRQYRFMRGLVDPLHYQLMNHTFPTFQHLIDRAVMTEKKRKDMEDRKRKMSGPQSGSISRPRFSGSSSQQGRPGHPRGYQNQNQRPHQQQFQRQYPQQQQQYRQHSQQGGNQYQKQNNQAPRLPAPATNQSNQAAPAQGGGRGCFHCGDQGHWAMQCPKKLAQQQTNPNAPTRQGVLQPAAGNHSQAYNRGKVNHLEAEAIQDAPDVAVGMFSVESHPAKVLFDTGATHSFVTATWVELHNISVEAMMPPMRINSVGGKVQTDKICSNIMVEIRGIGFPSDLIVIDTPGIDVILGMNWLMKYEANVSCDKRTVTLKSPSGEEVVAELRMPKSEEGVCHQISVDSKEPNPLEAIKVVSDFPDVFPEELTGMPPERKVEFAIELIPGTAPLSKRAYRVSGPELVELKKQIDEMLEKGYIRPSTSPWAAPVLFVEKKDGTKRMCIDYRALNEVTVKNKYPLPRIEDLFDQLRGASVFSKIDLRSGYHQLRIRPSDIPKTAFITKYGLYEFTVMSFGLTNASAFFMYLMNSVFMDYLDKFVVVFIDDILIYSQSEEDHVEHLKMVLQRLREHQLYAKLGKCEFWIHEVLFLGHIINQDGLAVDPKKVADILNWKAPKDVRGIKSFIGMVGYYRRFIEGFSKIARPMTALLAKKVEFKWTQKCQEAFEELKNRLTTAPVLVLPDVHKSFSVYCDASYTGLGCVLMQEGRVVAYSSRQLKIHEKNYPTHDLELAAVVHALKTWRHYLYGQKCDIYTDHKSLKYIFTQSELNMRQRRWLELIKDYELEIHYHPGKANVVADALSRKSQVHMLVSYPMPYELAKEFDRLSLGFLNSTQGVTVELEPTLEREIKEGQKDDENINKIRQLILEGRGKDFREDEEGVIWFKDRLCVPDLKPIRELILKEAHETAYSIHPGSEKMYQDLKRRFWWYGMKREIAEYVAICDSCQRTKAEHQRPAELLQPLRIPQWKWDEIGMDFIVGLPRTRASYDSIWVVVDRLTKVAHFIPVKTTYTGATLAELYMSRIVCLHGVPKKIVSDRGTQFTSHFWQQLQEALGTHLNFSSAYHPQTDGQTERTNQILEDMLRACALQDKSGWDKRLPYAEFSYNNSYQASLKMSPFQALYGRSCRTPLHWDQPGERQVFGPDILLEAEENIKMVRENLKIAQSRQRSYADRRRRELSFEVGDYVYLKVSPIRGVRRFGVKGKLAPRYVGPYQIQAKRGEVAYQLNLPESLSAVHNVFHVSQLKKCLRVPEEQLPVEGLEVQEDLTYIEKPTQILEFADRVTRRNTIRMCKVRWGHHSEEEATWEREDDLKAKYPELFADQP

SEQ ID NO: 10535 - protein, 1520 aa, Zea mays
  Clone ID: TF_ZM4985.C1.o5.fg.pep
MSDNRRAQQEQHDQQEEHQRQPPPPPPMSVEQMFLMQTQAVQAIGQTLAAMQQAQQQPQPQLQVQMPQMPRDKRGEFMRGHPPTFAHSADPMDAEDWLRAVERELCTAQCDDREKVLYGPRQLRGAAQSWWESYLATHADPEAITWEEFSENFRRYHVPEGLMIVKKEEFLDLKQGPLSVSEYRDKFLQLSRYAPEDVNTDAKRQYRFMRGLVDPLHYQLMNHTFPTFQHLIDRAVMTEKKRKDMEDRKRKMSGPQSGSISRPRFSGSSSQQGRPGHPQGYQNQNRRPHQQQFQRQYPQQQQQQYRQNSQQGGNQYQKQNNQAPRLPAPATNQSNQAAPAQGGGRGCFHCGDQGHWAMQCPKKMAQQQTNPNAPTRQGVLQPAAGNRGQAYNRGKVNHLEAEAIQDAPDVAVGMFSVESHPAKELFDTGATHSFVTAIWVEMHNISVEAMMPPMRINSVGGKVQADRICSNIRVEIRGIGFPSDLIVIDTLEVDVILGMNWLMKYEANVSCDKRTVTLKSPSGEEVVAELRMPKSAEGVCHQISVDSKEPNPLEAIKVVSDFPDVFPEELTGMPPERKVEFAIELIPGTVPISKRAYRVSGPELVELKKQIDELLEKGYIRPSTSPWAAPVLFVEKKDGTKRMCIDYRALNEVTVKNKYPLPRIEDLFDQLRGASVFSKIDLRSGYHQLRIRPSDIPKTAFITKYGLYEFRVMSFGLTNAPAFFMYLMNSVFMDYLDKFVVVFIDDILIYSQSEEDHVEHLKMVLQRLREKQLYAKLSKCEFWIHEVLFLGHIINQDGLAVDPKKVADILNWKAPKDVRGIKSFIGMAGYYRRFIEGFSKIARPMTALLAKKVEFKWTQKCQEAFEELKNRLTTAPVLVLPDVHKPFSVYCDASYTGLGCVLMQEGRVVAYSSRQLKIHEKNYPTHDLELAAVVHALKTWRHYLYGQKCDIYTDHKSLKYIFTQSELNMRQRRWLELIKDYELEIHYHPGKANVVADALSRKSQVNMLATYPMPYELAKEFDRLSLGFLNSIQGVTVELEPTLEREIKEGQKDDENINNIRQLILEGRGKDFREDEEGVIWFKDRLCVPDIKPIRKLILKEAHETAYSIHPGSEKMYQDLKRRFWWYGMKREIAEYVAICDSCQRTKAEHQRPAGLLQPLRIPQWKWDEIGMDFIVGLPRTRAGYDSIWVVVDRLTKVAHFIPVKTTYTGAMLAELYMSRIVCLHGVPKKIVSDRGTQFTSHFWQQLQEALGTHLNFSSAYHPQTDGQTERTNQILEDMLRAYALQDKSGWDKRLPYAEFSYNNSYQASLKMSPFQALYGRSCRTPLHWDQPGERQVFGPDILLEAEENIKMVRENLKIAQSRQRSYADRRRRELSFEVGDYVYLKVSPIRGVRRFGVKGKLAPRYVGPYQIQAKRGEVAYQLDLPESLSAVHNVFHVSQLKKCLRVPEEQLPVEGLEVQEDLTYIEKPTQILEFADRVTRRNTIRMCKVRWGHHSEEEATWEREDDLKAKYPELFADQP

SEQ ID NO: 10536 - protein, 1802 aa, Zea mays
  Clone ID: TF_ZM4995.C3.o5.fg.pep
MARLRHTAHKSVIPFLPSRLAERPLHRTVSGQSSHLERLHHRLREEQERRRQHGEQQGSSSSPQQEVETVRPRSSVAQLEAPLVPPRDVPAVGGATGGDPDDDDSDHSTESSEPQEAEGWAFDRHTWLIEYRCVVYQHSRGRYPDRWEATCLVRRPEDDLRGAEAVSEHYSISERDTAEAAMQDAARRALSQYCSLFGGVADGLNLRYYPRRPTGSTESVVVSPVGEANPRLSSTVNLVAVLNTELDHSLDELSRARTEIAELRAELAERHHQEGGSPAPVGTQHPYRSPPRGHHTYGSPIVRSMLMYECLPQMSDNRRRCNRRAQLEQHDQQEENQRQPPPPPPMSVEQMFLMQTQAVQAIGQTLAAMQQAQQQPQPQLQVQMPQMPRDKRGEFMRGHPPTFAHSADPMDAEDWLRAVERELRTPNATTGRSESFRRYHVPEGLMIVKKEEFLALKQGPMSVSEYRDKFLQLSRYAPEDVNTDAKRQYRFMRGLVDPLHYQLMNHTFPTFQHLIDRAVMTEKKRKDMEDRKRKMSGPQSGGISRPRFSGSSSQQGRSGHPQGYQNQNQRPHQQQFQRQYPQQQQQYRQHSQQGGNQYQKQNNQAPRLPAPAANQNNQAAPAQGGGRGCFHCGDQGHWAMQCPKKSAQQQINPNAPARQGVLQPAAGNRNQAYNRGKVNHLEAEAIQDAPDVAVGMFSVESHPAKVLFDTGATHSFVTATWVELHNISVEAMMPPMRINSVGGKVQTDKICSNIMVEIRGIGFPSDLIVIGTPGIDVILGMNWLMKYEANVSCDKRTITLKSSSGEEVVAELRMPKSEEGVCHQISVDSKEPNPLEAIKVVSDFPDVFPEELTGMPPERKVEFAIELIPGTAPISKRAYRVSGPELVELKKQIDEMLEKGYIRPSTSPWAAPVLFVEKKDGTKRMCIDYRALNEVTIKNKYPLPRIEDLFDQLRGASVFSKIDLRSGYHQLRIRPSDIPKTTFITKYGLYEFTVMSFGLTNAPAFFMYLMNSVFMDYLDKFVVVFIDDILIYSQSEEDHVEHLKMVLQRLREHQLYAKLGKCEFWIHEVLFLGHIINQDGLAVDPKKVADILNWKAPKDVRGIKSFIGMAGYYRRFIEGFSKIARPMTALLAKKVEFKWTQKCQEAFEELKNRLTTAPVLVLPDVHKSFSVYCDASYTGLGCVLMQEGRVVAYSSRQLKIHEKNYPTHDLELAAVVHALKTCRHYLYGQKCDIYTDHKSLKYIFTQSELNMRQRRWLELIKDYELEIHYHPGKANVVADALSRKSQVNMLASHPMPYELAKEFDRLSLGFLNSTQGVTVELEPTLEREIKEGQKDDENINKIWQLILEGRGKDFREDEEGVIWFKDRLCVPDLKPIRELILKEAHETAYSIHPGSEKMYQDLKRRFWWYGMKREIAEYVAICDSCQRTKAEHQRPAGLLQPLRIPQWKWDEIGMDFIVGLPRTRAGYDSIWVVVDRLTKVAHFIPVKTTYTGATLAELYMSRIVCLHGVPKKIVSDRGTQFTSHFWQQLQEALGTHLNFSSAYHPQTDGQTERTNQILEDMLRACALQDKSGWDKRLPYAEFSYNNSYQASLKMSPFQALYGRSCRTPLHWDQPGERQVFGPDILLEAEENIKMVRENLKTAQSRQRSYANRRRRELSFEVGDYVYLKVSPIRGVRRFGVKGKLAPRYVGPYQIQAKRGEVAYQLDLPESLSAVHNVFHVSQLKKCLRVPEEQLPMEGLEVQEDLTYIEKPTQILEFADRVTRRNTIRMCKVRWGHHSEEEATWEREDDLKAKYPELFADQP

SEQ ID NO: 10537 - protein, 1785 aa, Zea mays
  Clone ID: TF_ZM4158.C1.o6.fg.pep
MDPKGKGIVINDKEKESFVNEAKDDKPTDSGSGHRRKEGKKKKTRRIKEIVYYDDSDESTSSQKDDDHNDYEQRKPVNSNFSFDYSRIPQSSNSHLLSIPLGKPPHFDGEDYGFWSHKMRSHLFSLHPSIWEIVDSGMHFNSSDSPIFINEQIHKNAQATTVLLASLCRDEYNKLVEGELGRFAMIRGEETTQTYNRLKTLINKIRSYGSTRWTDHDVVRLMLRSFTVLDPHLVNNIRENPRYTKMSPEEVLGKFVSGRMMIKEARYVDDALNGPINEPQPFALKATRSKEALPSKVAQIEAVGLNDEEMALIIKRFKTVLKGHKGQPSKTKAKGKHSCFKCGKFGHFIANCPDNDSDQEKGNKRDSDNEGLAATAFNKSTLFPNERHTCLMAREKKVCTHNSTYASSSEDESSDEDEVDYSCLFKGLDRSKIDKINELIDALNEKNILLEKQEDLLYEEHDKFVEAQKSLALEIKRNEMLACEVSTCHDSISNLKSINDDLNAKLVEANKSNFCVEYVEICTRCKDINIDDYSEHLACISKLNEEVASLNAQLKTSKSDFEKLKFARDAYTVGRHPSIKDGLGFKREAKNLTSHKAPIPTKEKGKAPMATSTKRNHAFIYHDRRQTRNAYRSYNAYDDFSHAMFASSSSYVHNRNVGRRDVVHNMPRKNIIHAPRKVVNEPSTIYCALNASFAICRKDRKIIARKLGAKCKGDKTCIWVPKDICANLVGPNMSWVYASGGSSWIIDSGCTNHMTGEKKMFTSYVKNKDSQDSIVFGDGNQGKVKGLVESLGYNLLSVSQLCNMGYNCLFTNVDVSVFRRSDGSLAFKGVLDGKLYLVDFAKEEAGLDACLIAKTSMGWLWHRRLAHVGMKNLHKLLKGEHVIGLTNVQFEKDRPCAACQAGKQVGGAHHSKNVMTTSRPLELLHMDLFGPVAYLSIGGSKYGLVIVDDFSRFTWVFFLQDKSETQGTLKRFLRRAQNEFELKVKKIRSDNGSEFKNLQVEEFLEEEGIKHEFSAPYSPQQNGVVERKNRTLIDMARTMLGEFKTPECFWTEAVNTACHAIKKVYLHRLLKKTSYELLTGNKPNVSYFRVFGSKCYILVKKGRNSKFAPKAVEGFLLGYDSNTKAYRVFNKSSGLVEVSSDVVFDETNGSPREQVVDCDDVDEEDVPTAAIRTMAIGDVRPQEQDERDQPSSSIMVHPPTQDDERVHQQEACDQGGAQDDHVMEEEAEPAPPTQVRAMIQRDHPVDQILGDISKGVTTRSRLVNFCEHYSFVSSIEPFRVEEALLDPDWVLAMQEELNNFKRNEVWTLVPRPKQNVVGTKWVFRNKQDEHGVVTRNKARLVAKGYAQVAGLDFEETFAPVARLESIRILLAYAAHHSFRLYQMDVKSAFLNGPIKEEVYVEQPPGFEDERYPDHVCKLSKALYGLKQAPRAWYECLRDFLIVNAFKVGKADPTLFTKTCDGDLFVCQIYVDDIIFGSTNQKSCEEFSRVMTQKFEMSMMGELNYFLGFQVKQLKDGTFISQTKYTHDLLKRFGMKDAKPAKTPMGTDGHTDLNKGGKSVDQKAYRSMIGSLLYLCASRPDIMLSVCMCARFQSDPKECHLVAVKRILRYLVATPCFGLWYPKGSTFDLVGYSDSDYAGCKVDRKSTSGTCQFLGRSLVSWNSKKQTSVALSTAEAEYVAAGQCCAQLLWMRQTLRDFGYNLSKVPLLCDNESAIRMAENPVEHSRTKHIDIRHHFLRDHQQKGDIEVFHVSTENQLADIFTKPLDEKTFCRLRSELNVLDSRNLD

SEQ ID NO: 10538 - protein, 173 aa, Zea mays
  unsure (1)..(173): unsure at all Xaa locations
  Clone ID: TF_ZmC1020407_1.pep
LNYDPGWIKITVILSDANVPGEGELXIMSYIRGQRNLPGFNPDTRHCLYGLDADLIMLXLATHEVHFSILRDVVFTPGQQDKCFLCGQVGHLAANCEGKAKRKAGEYDEKGEAIVPKKPYQFLNNWNLREYLGYEFRMANPAFQIDFGRIVDDFIFMCFFVGNDFLPHMATLG

SEQ ID NO: 10539 - protein, 1055 aa, Zea mays
  unsure (1)..(1055): unsure at all Xaa locations
  Clone ID: TF_ZmC5679_1.pep
MGVPAFYRWLAEKYPMVVVDVVEEEPVEIEGVKVPVDTSKPNPNSLEFDNLYLDMNGIIHPCFHPEDRPSPTTFGEVFQCMFDYIDRLFVMVRPRRLLYMAIDGVAPRAKMNQQRSRRFRAAKDAADAAAEEERLREEFEREGRKLPPKQQSQTCDSNVITPGTEFMAVLSVALQYYIHRRLNYDPGWKQIKGXHKIIYVLPGQRNLSGFNPNTRHCLYGLDADLIMLALATHEVHFSILREVVYTPGQQDKCFLCGQVGHLAANCEGKVKRKAGEFDEKGGAIVPKKPYQFLNIWTLREYLEYEFRMPNPPFKIDFERIVDDFIFMCFFVGNDFLPHMPTLEIREGAINLLMAVYKKEFPSMGGYLTDSCTPDLSRVEHFIQAVGSYEDKIFQKRARLHQRQAERIKREKAQAKRGDDLDPHVRDDLIVPIQRFQGSRLASGAVPVPYEQNGSHKDNKERNSRARKAARVSTSGSSIASALVEAENDLEAQECENKEELKSMLKDALREKSDIFNSDNPEEDKVKLGEPGWRERYYEEKFGARTPEQIEEIRRDVVLKYTEGLCWVMHYYYEGVCSWQWFYPYHYAPFASDLSGLGQLNIKFELGTPFKPFDQLMGVFPAASAHALPLQYRRLMTDPNSPIIDFYPTDFEVDMNGKRYSWQGIAKLPFIDEDRLLAEIKKVEHTLTPEEARRNSIMCDMLFVNGSHPLSPYIYSLNSKFGHLPDKRRNEIKEKLDPSASGGMNGYITLCSGDPCPPIFRSPVDGLEDIMDNQVICSIYNLPDHHKHIAQPPVGVIMPKKIVEAGDLKPPPVLWHEDSGRRPHDNSNRQNPSGAISGRQLGEAAHRLVINSLNAQGRGQHSGTSMPYRTIMNGLHHLDVASPVSDQGMRPQVGQSAGPPGWYVPRGSVSNGQPPAYASSGSGHYQYESSGHSQYEQGNHGRQQSHPYARDGFHDTRGRVPPAYGYQQSNMYPSGPGLYGQPPSAYPGVHGGGYQPPPYGGGQQWQQQSYSSYAVRGPYGGRPPPTRADSGSQQPQNRYGALDRSNNRRPSSGYRR

SEQ ID NO: 10540 - protein, 131 aa, Zea mays
  unsure (1)..(131): unsure at all Xaa locations
  Clone ID: TF_LIB3060-078-Q1-K6-A1.pep
SFWVDNQXGXSDTVXDGSVPLYDREFTLHSTPLGGSSNTERVDKDDSRCFNCGSYSHAMKDCPKPRDNVAISNARKQHNLKRNQSNVNRVQNRYYQKTPGKFDDLKAGVLGPETRQCLGIGVLTIPFAVKI

SEQ ID NO: 10541 - protein, 406 aa, Zea mays
  Clone ID: TF_ZmC6869_1.pep
LLLFLDVAFLASRGVKRARVESKEPSVRVIYSDLTRESKRKLMQLMQQWSEWQARRMHHLEEAVEVTLESGEETYYPALHVGSEKSCAVSFWVDNQARESDTVDDGSVPLYDREFTLHSTPLGGSSNTERVDKDDSRCFNCGSYSHAMKDCPKPRDNVAISNARKQHNLKRNQSNVNRVQNRYYQKTPGKFDDLKAGVLGPETRQCLGIGENDPPPWLHRMRELGYPPGYLDVVDDEDRPSGITIFGDGEVKLEYEEGELSEQGEASPPKKKMTVEFPGINAPIPENGDQWLWGSTPPQSSGRHHSLDSRDFHDRGPPGADHYSPRYHSHDFGPLRPSIGRSHSDRGWRSPPRYDNPPADDGAWTPHSYPSRQHLGHYSSSSEMSSRHSRDKDRDRHDSRHYHHRR

SEQ ID NO: 10542 - protein, 1551 aa, Zea mays
  unsure (1)..(1551): unsure at all Xaa locations
  Clone ID: TF_ZmC951_287.pep
MSGASAKREFGTGEKPATSHGKAPSEESTNKVKGSPSHNKSGWSGDKKKMRKVVYYETDSLSPSTSGSDTPSVTSKLHERKKFSKIPLRYPRISKCTPLLSVPLGKPPMFDGEDYNMWSDKMRHHLTSLHTSIWDVVEIGVQREEYNKVQGLKSAKEIWDVLKTAHEGDEVTKITKQETIEEELGLFRLNQGEDPQAMYNRLKTLVNQVRNLGSTKWDDHEMVKVILRSLVFLNPTQVQLILGNPRYTLMSPEEVIGNFVSFELMIKGSKKIIELDGPSTSKAQPVAFKATEEKKEESTSSRQPIDASKLDNEEMALIIKSFRQILKQRRGKDYKPRSKKVCYKCGKPGHFIAKCLLSSDSDRGEDKKGKRREKKRYHKKRGGDAHVCRKWDSDESSSDSSSDEDAANIAVTKGLLFPNVGHKCLMAKNGKRKKVKSKSSTKYETSSDEDNCCDEEDNLRTLFANLNMQQKEKLNELISAIHEKDDLLDSQEDFLIKENKKHVKVKNAYALEVEKCEKLSSELSTCIDIIANLRNENAKLIAKVDSNVSYVSIPNLRDDNVNLLAKIEELNVSLASLRNENENLIAKAKDLDVCNASISDLRDKNDILRAKIVELNSCKPSTSTIEHVSICTRCRDINVDATHDHLALIKKQNDHIAQLNAKINEHDLENENFKFARSMLYNGRRPGIKDGIGFQKGDNVKLNAPPKRLSNFVKGKAPMPQDNEGYILYPAGYPESKIRRIHSRKSHSGPNHAFMYKGETSSSRQSTRAKLPRKKTPIASNDHNISFKTFDASYVLTNKSGKVYASGGSSWIIDSGCTNHMTREKKMFSSYEKNQDPQRAITFGDGNQGVTVFRRSDDSIAFKGVLEGKXSHTQETLKGFLRXAQNEFGLRIKKIRSDNGTEFKNSQIEGFLEEEGIKHEFSSPYTPQQNGVVERKNRTLLDMARTMLDEYKTSDRFWAEAVNTTCYAINRLYLHRIIKKTSYELLTGKKPSVSYFRVFGSKCFILVKRGRKSKFAPKAVEAFLLGYDSNTRAYRVFNKSTGLVEVSCDIVFDETYGSQVEQVDLDELDDEEAPCVVLRNMSIGYVCPKESKEPTQAQDQASSSMQASPPTQDEDQAQDDENEDQEDEPPQEEDNDQGXDDNDQEKEDEQEVXPYRVEDALRDSNRVLAMQEELNNFIRNEWVFRNKQDEHVVVTRNKARLVAKGYSQVEGLDFGETYAPIARLESIHILLAYATYHGFKLYQMDVKSAFLNGPIKEEVYVEQPPGFEDSEYPNHVYKLSKALYGLKQAPRAWYECLRDFLITNGFKVRKANPTLFTKTIANDLFVCQIYVDDIIFGSTNKSTCEEFSRIMIQKFEMSMMGELKYFLGFQVRQLQEGTFISQTKYIQDILTKFGMKDAKPIKTPMGTNGHLDLDTRGCKIDRKSTSGTCQFLGRSLVSWASKKQNSVAISTAEAEYIVAGHYCAQLLWMRQTLRDYGYKLSKVPPLYDNESAIRMADNLVEHSRTKHIAIRYHFLRDHQQRGDIEIAYVSTKEQLADIFTKSLDEKNLYQT

SEQ ID NO: 10543 - protein, 185 aa, Zea mays
  Clone ID: TF_LIB5117-003-Q1-PF1-H3.pep
PSPLPPLSPAIPSSSPPSTPRFRTLCDAACSAARPSPVSPAATVADGAPTPLQSYKDALLSPAPPHLHRRRLLAFLSSPVKKLCHKCYSAEHLVRDCRDPVRCRDCGRSGHLSSACKFEPLLPPSLVSPASHPPLPPRRLSNELLRSLSRSRSTSPPNSPMSRAPPREHWLDRYYREVEAERTIP

SEQ ID NO: 10544 - protein, 1844 aa, Zea mays
  Clone ID: TF_ZmC951_385.pep
MSGDHAKKEMETGDKPTTSHGKTSSEESRNKGKGKEKKSSSHKSHRSGDKKKKMRKVVYYETDTSSPSTSGSNASSITSKRHERKKFSKIPLRYPRISKRTPLLSVPLGKPPLFDGEDYNMWSDKMRHHLTSLHTSIWNVVEFGVQVPSVGDEDYDSDEVAQIHHFNSQATTILLASLTREEYNKVQGLKSAKEIWDVLKTAHEGDEVTKITKREMIEGELGRFMLHQGEDPQAMYNRLKTLVNQVHNLGSEKWDDHEMVKVILRSLVFLNPTQVQLIRGDPRYKLMSPEEVIGKFVSFELTIKGSKKIIEQGTSSTLEAQPVAFKATEEKKEESTSSRQPIDASKLDNEEMTLIIKSFRQILKQRRGKDYKPCSKKVCYKCGKPGHFIAKCLISSDSDRGDDKKGRRKEKKRNHKKKGGDAHVCHEWDSDESSTDSSSDEDAANIAVNKGLLFPNVGHKCLMAKDGKKKKVKSKSSTKYESSSDDNASDEEDNLRTLFANLNMQQKEKLNELISAIHEKDELLDTQEDFLIKENKKHVKVKNAYALEVEKCEKLSTLGLKMKKMLTKAKNLDVCNASISDLRSENDILHAKIVELKTCKPSTSTVEHVSICTRCRDVDIDAIHDHMVLIKQQNDHIAKLDAKIAEHELENENFKFARSMLYSGRRPGIKDGIGFQRGDNVKLNAPPKRLSNFVKGKAPIPQDNEGYILYPVGYPESKIRRIHSRKSHSGPNHAFMYKGETSSSRQSTHAKLPRKKTPTASNDSKISFKTFDASYVLTNKSGKVYASGDSSWIIDSGCTNHMTGEKKMFSSYEKNQDPQRAITFGDGNQGLVKGVTVFRRSDDSIAFKGVLEGQLYLVDFDRAELDTCLIAKTNMGWLWHRRLAHVGMKNLHKLLKGEHILGLTNVHFEKDRICSACQAGKQVGVHHPHKNIMTTDRPLELLHMDLFGPIAYISIGGSKYCLVIVDDYSRFTWVFFLQEKSQTQETLKGFLRRAQNEFGLRIKKIRSDNGTEFKNSQIEGFLEEEGIKHEFSSPYTPQQNGVVERKNRTLLDMARTMLDEYKTSDRFWAEAVNTACYAINRLYLHRILKKTSYELLTGKKPNISYFRVFGSKCFILVKRGRKSKFAPKTVEGFLLGYDSNTRAYRVFNKSSGQVEVSCDVVFDETNGSQVEQVDLDEIGDEEAPCIALRNMSIGDVCPKESEEPPNAQDQPSSSTQASPPTQNEDEAQVDEGGDQRDEPPQDDGNDQGGDANDQGKEDEEPRPPHPRAHQAIQRDHPVDTILGDIHKGVTTRSRVAHFCEHYSFVSPIESHRVEEALQDSDWVVAMQEELNNFTRNEVWHLVPCPNQNVVGTKWVFRNKQDEHGVVTRNKARLVAKGYSQVEGLDFGETYAPIARLESIRILLAYATYHGFKLYQMDVKSAFLNGPIKEEVYVEQLPVFEDSEYPNHVYKLSKALYGLKQAPRAWYECLRNFLITNGFKVGKADPTLFTKTLENDLFVCQIYVDDIIFGSTNESTCEEFSRIMTQKFEMSMMGELKYFLGFQVKQLQEGTFISQTKYTQDILSKFGMKDAKPIKTPMGTNGHLDLDTEGKSVDQKVYRSMIGSLLYLCASRPDIMLSVCMCARFQADPKEAHLTVVKRILRYLAYTPKFGLWYPRGSTFDLIGYSDADWAGCKIDIKSTSGPCQFLGRSLVSWASKKQNSVALSSAEAEYIAAGHCCAQLLWMRQTLRDYGYKLTKVPLLCDNESAIRMADNPVEHSRTKHIAIQYHFLRDHQQRGDIEIAYINTKEQLANIFTKPLDEKTFTKLRHELNILDSRNLYRYFAHIAQLYTFDHLFHITMTNVFFK

SEQ ID NO: 10545 - protein, 1655 aa, Zea mays
  unsure (1)..(1655): unsure at all Xaa locations
  Clone ID: TF_ZM3738.C1.o1.fg.pep
MSGGDGPPPVFDGDDFPYWKIRMEAYLEAIDIGVYKAATQGFPEPRDPTNLVGDEFNYEKWNAKAKNTLFRGLCKDVFNRVRNHKNAHDLWMDICALHEGTRSEREERYHIAMRKLNSFEMLANENANAMYSRLNILVEEVNGLGLTQISQPDVVRKILSVLPIDKYGHIVTVLHQMDLSVTTPTQILGKINAHEMKTTKMLKKXIEKASNLIQERKNSFPTKESPFLRWTATTVVSSVILLINATSPRRISSRARNKMTTMMKRRKRNSSRGRMGSKRGSTRRRMERHILLVTGSPTXESSSGSSSSEKENDEKVAAIAGDFSSPPPSPSSTSHICLMARGERKVQNDINIVDDSDSDSDSDEEFASPSYDELADLLKEYTQIIRKSKAKCDRLKNENESLNAKYDIVIKASDEIKEENKTMSSTVNELTNSLKDAKEKCDKLNEANRELQNRLVKIKEDYTQIKFDHDNLLVENELLSCKTHEAINPVVKIDVATSCDDLSQEEQTSLHAELTEKVEVLTLDNQKLKNYLTDATTRGNVAIENNDFNNELAVDNQRLKMSVQKFNKGQYLQNELLMNTVMKNNRSGHFAHNCKAKPPTPLPKHSRPFAFNAHYVLRKVANGKVNYKTGGSHWVIDSGCTQHMTGNPRMFTSLDENVDGQDKITFGDNSKGKVQGLGKVAISNDLSISNVLLVAPLSFNLLSVGQLCDLGLQCLFTPTEVIVTKMDDESMVFKGFRYNNLYLVDFTSEDANLRTCLFTKASLGWLWHRRLAHVGMSTLKKVLKKDMVRGLKDVVFEKDKPCSACQAGKQVANTHPTKAFMSTSRPLELLHMDLFGPTNYVSVGGNLYCLVIVDDFSRYTWVFFLHDKSEVASIFKKFAKKAQNEFDCKIKKIRSDNGKEFDNTNIHEYCDEIGIKHEVSATYTPQQNGVVERKNRTMITLARTMIDEYNTPEKFWAEAVNTACYASNRLFPHRLLEKTPYELLNGKKPDISFFRVFGCKCYIYKKHHHLGKFQRRCDIGFLLGYSLKSKAYRVFNHATGVVEETYDVEFDETNGSQGALENLDDVGDEPLREAMKNMPIGAIKPKEDEEEVQIIDMPSSSNVPQNDEKDERHANEDTFVSHEQARVQAEDIDAPGSSSQVVDRRNSSLLQAHPQNQIIESPSQGVITRSHRHASFIEHHSFVSCVEPTCIDEALQDPDWVNAMHEELNNFTRNEVWTLEKPPQDARIIGTKWVFRNKQDDQGVIVRNKARLVAKGFSQVEGLDFGETFAPVARLEAIRILLAYASCYDIKLYQMDVKSAFLNGFINELVYVEQPPGFEDPRYPNHAYRLSKALYGLKQAPRAWYERLRDFLIEKGFKIGTVDTTLFTKKHNGDIFICQVKQMKDGNFLSQEKYTKDLLKRFNMEKCKPIKTPMPTNGHLDLDEGGNPVNQTLYRSMIGSLLYLTASRPDIMFSVCMCARLQSNPKKAHLRAVKRILRYLRHTTSVGLWYPKGATFDLIGYSDSDYAGCKIDRKSTSGGCHLLGRSLVSWTSKKQNSVALSTAEAEYIAAGACCTQILYMKQTLLDYGVVLEKVPLLCDNESAVKIANNPVQHSRTKHIDIRHHFLRDHVAKGDIILEGVRLEDQLADIFTKPLDKTRFCMLRNELNILDLRNFM

SEQ ID NO: 10546 - protein, 1654 aa, Zea mays
  unsure (1)..(1654): unsure at all Xaa locations
  Clone ID: TF_ZM4509.C5.o5.fg.pep
MSGAHAKKEMVTGEKPATSHGKAPSGESDNKKREESPPRVKSHRSGDKKKKMKKVVYYKTDSSSPSTSSSDASSVTSKRHERKKFSKIPLRYPRISKRTPLLYVPLGKPPEPSVGDEGYDSDEVAQIRHFNSQATTILLASLSREEYNKVQGLKSAKEIWDVLKTAHEGDEVTKITKRETIEGELGRFMLHQGEEPQAMYNRLKTLVNQVRNLGSTKWDDHEMVKVILRSLVFLNPTQVQLIRGDPRYKLMSPEEVIGKFVSFELMIKGSKQIIERGATSTPEVQPVAFKATEEKKEESTSSRLPIDASKLDNEEMALIVKSFRQIRKQRRGKDYKPRSKNVCYKCGKHGHFIAKCPLSSDSDRGDDKKGRRQEKKYYKKKGGDAHVCREWDSDESSTDSSSDEDAANITVNKGLLFPNVGHKCLMAKDGKKKKVKSRASTKYATSSDEASSSDDGDDLLTLFANLNMQQKEKLNELISAIHEKDELLDSQEDFLIKENKKHVKVKNAYAQEIEKCEKITSEQSTCHNTISNLRFENDKLIAKVEKLNDSDDSLVNLRNDNANLIAKIDKLNASLSSLKIENEKLISKPKDSNVCNVSISNLRDENAILHAKIVELNTCKPSTSTVSHVSICTRCRDVNVDAIHDHIAMIKKQNDHIAKLDAKVAEHELENENFKFARSMLYSGRRPGINDGIGFQQGGNVKLNAPKRLSNFVKGKAPMPQDNEGYILYPAGYPKDKIRRIHAKKTHSVSHHAFIYKNEASSSRRSTHVKMPKKKSPIALNDHNISFKTFDASYVLTNKSGKVVAKYVGAKHKGSKTCVWVPKVLVSNVKGPKTVWVYASGGSSWIIDIGCTNHMNGGKRMFSSYEKNHDPQRAITFGDGNQGVTIFRRSDDSVAFKGVLEGQLYLIDFNRAELDTCLIAKTNMSWLWHRRLAHVGMKNLHKLLKGEHILGLTNVYFEKDRICSTCQAGKQVGVHHPHKNIMTTDRPLELLHMDLFGPIAYISIGGKTLKRFLRRAQNEFGLRIKKIRSDNGTEFKNSQIEGFLEDEGIKHEFSSPYTPQQNSVVERKNRTLLDMARTMLDEYKTSDRFWVEAVNTACYAINRLYLHRILKKTSYELLTGKKPNVSYFRVFGSKCFILIKRGRKPKFAPKAVEGFLLGYDSNTRAYRVFNKSTRLVEVSCDIVFDETNDSQVEQVDLDELDDEEAPCVALRNMSIGDVCPKESEEPPHAQDQPSSSNQASPPTQDEDQAQDDENEDQEEPPQEEDNNQGGDANDQYKEDDEGPAPPHRRVHQAIQRDHPVNSILGDIHKRRVEDALRDSDWVLAMQEELNNFTRNEVWHLVPRPNQNIVGTKWVFHNKQDEHGVVTRNKARHVAKEYSQVEGLDFGETYAPVARLESICILLAYATYHGFKLYQMDMKSAFLNRPIKEEVYVEQPPGFEDSEYPNHVYKLSKALYGLKQAPRAWYECLRDFLIANGFKVGKTDPTLFTKTIANDLFXMVQKFEMSMMGELKYFLGFQVKQLQXGTFISQTKYIQDILTKFGMKDAKPIKTPMGTNGHLDLDMGGCKIDRKSTSETCQFLERSLVSWASKKQNFVALSTAEAEYIAAGHCCTQLLWMRQTLRDYDYKLIKVPLLCDNESAIRMADNPVSTATLST

SEQ ID NO: 10547 - protein, 731 aa, Zea mays
  Clone ID: TF_ZM4581.C2.o19.fg.pep
MSGAHAKKEMVTGEKPATSHGKAPSGESDNKKREESPPRVKSHRSGDKKKKMKKVVYYKTDSSSPSTSSSDASSVTSKRHERKKFSKIPLRYPRISKRTPLLYVPLGKPPEPSVGDEGYDSDEVAQIRHFNSQATTILLASLSREEYNKVQGLKSAKEIWDVLKTAHEGDEVTKITKRETIEGELGRFMLHQGEEPQAMYNRLKTLVNQVRNLGSTKWDDHEMVKVILRSLVFLNPTQVQLIRGDPRYKLMSPEEVIGKFVSFELMIKGSKQIIERGATSTPEVQPVAFKATEEKKEESTSSRLPIDASKLDNEEMALIVKSFRQIRKQRRGKDYKPRSKNVCYKCGKHGHFIAKCPLSSDSDRGDDKKGRRQEKKYYKKKGGDAHVCREWDSDESSTDSSSDEDAANITVNKGLLFPNVGHKCLMAKDGKKKKVKSRASTKYATSSDEASSSDDGDDLLTLFANLNMQQKEKLNELISAIHEKDELLDSQEDFLIKENKKHVKVKNAYAQEIEKCEKITSEQSTCHNTISNLRFENDKLIAKVEKLNDSDDSLVNLRNDNANLIAKIDKLNASLSSLKIENEKLISKPKDSNVCNVSISNLRDENAILHAKIVELNTCKPSTSTVSHVSICTRCRDVNVDAIHDHIAMIKKQNDHIAKLDAKVAEHELENENFKFARSMLYSGRRPGINDGIGFQQGGNVKLNAPKRLSNFVKGKAPMPQDNEGYILYPA

SEQ ID NO: 10548 - protein, 550 aa, Zea mays
  Clone ID: TF_ZM4939.C2.o4.fg.pep
MDAQFDVTQEWLDRVKIARKGLRGTKRSLQVRLANRSPEVSGEAQPPWGGGSTALVNPDQSADVDPRAIDLAMKIAERMFLKMKEDEAKNKIEEEENDRWRPNDESTSSQGSSFKSTSHMCFIANGSDSESESEDEEEQESDSEDEDDLQQFFAQLSKKHRMSLLKLMKRAEEQKEMLHKQEDFLIRKIEDLEKLTKEHEKLKCSHDDLVQRYEDISIEQIKVVNHSSYIAQLENKNAMFKNTIERLNIENLALQEKHDMLVCSHNKFMDSHIMLEMAHEVVLTNLKSYQPHMCTCVEIETISPCANNCCYQASQSSIELEISGISDISITQENKELKEEVGRLRRSLTLLKGKCHAQPSHDNRDNMVKKLEKGTTVACTKPLQKNTKLFKKGMSKIHGKKINDHTICSNNVPMCFNKERSKRSDRRCYGCKEKGHEIGSCPHMKNKDLAQSRKMIIKKDESKRQMHCKDKHRICYNCRKKGHLFKVCPNGKTPKPNLSIHSNMLRRPKFDSCATKVMSSPHSRTKAVWVPKSLLANLDGPIMRWVPKCT

SEQ ID NO: 10549 - protein, 1391 aa, Zea mays
  unsure (1)..(1391): unsure at all Xaa locations
  Clone ID: TF_ZM5005.C1.o15.fg.pep
MEAYLEAIDIGVYKAATQGFLEPRNPTNLVGDEFNYEKWNAKAKNTLFRGLCKDVFNRVRNHKNAHDLWMDICALHEGTRSEREERYHIAMRKLNSFEMLANENANAMYSRLNILVEEVNGLGLTQISQQDVVRKILSVLPIDKYGHIVIVLHQMDLSVTTPTQILGKINAHDMYMHINDKDESYSKRKDLALKANQERKGKAKVQIEEESSSDDDLNANIALMVRKTTKMLKKLNREGIKFDSRKKKFFSSKRKPISEMDCYNCGELGHLAHQCNKPKKNKFKGKKEDDNDDEKKEKRFFKRKDGKHKRFHKKKNGKAYIVGDWLTDIESSSGSSSSEEENDEKVATIVGNFSSPPPSPSSTSHLCLMARGDRNIQNDIDITDDSDSDSDEEFASPSYDELADLLKEYTQIIRKSKAKCDKLKNENESLNAKYDIDKCDKLNEANRELKDRLVKIKEDYTKIKFDNDNLLVENELLSYNTHEAINPVVKIDVATSCDDLNQGEQTSVHDELTEKVEVLTLDNQKLKRYLTDATTRGKVAIENNDFNNELAVDNERLKNEVNYKTGGSHWVIDSGCTQHMTGNPRMFTSLDENVDGQDKITFGDNSKGKVQGLGKVAISNDLSISNVLLVAPLSFNLLSVGFRYNNLYLVDFTSEDVDLRTCLFTKASLGWLWHRRLAHVGMSTLKKVLKKDMVRGSKDVVFEKNKPCSACQAGKQVANTHPTKAFMSTSRPLELLHMDLFGPTNYVSAGGNLYCLVIVDDFSRYTWVLFLHDKSEVASIFKKFAKKAQNEFDCKIKKIRSDNGKEFDNTNIHEYCDEIGIKHEVSATYTPQQNGVVERKNRTLITLARTMIDEYNTPERFWAEAVNTACYASNRLFPHWLLAKTPYELLNGKKPDVSFRVFGCKCYIYKKRHHLGKFQRRCDIGFLLGYSFKSKEYRVFNHATGVVEETYDVEFDETNGSQGALENLDDVGDEPLREAMKNMPIGAIKPKEDEEEVQDIGRPSSSNVPQDDEKDERHANEDTFVSHEQARPTCIDEALQDLDWVNAMHEELNNFTHNQVWTLEKPPQDARIIGTKWVFRNKQDDQGVIVRNKARLVAKGFSQVEGLDFGETFAPVARLEAIRILLAYASCYDIKLYQMDVKSAFLNGFINEHVYVEQPPGFEDPRYPNHAYRLSKALYGLKQAPRAWYERLRDFLIEKGFKIGTVDTTLFTKKHNGDIFICQVYVDDTIFGSTNDYHCKEFGELMSKEFKMSMIEKYTKDLLKRFNMEKCKPIKTPMPTNGNPDLDEGGNPVNQTLYRSMIGSLLYLTASRPDIMFSVCMCARFQSNPKKVHLRSIKRILRYLRHTLSVGLWYPKGATFDLIDYSDSDYAGCKIDRKSTSGXCHLLGRSL

SEQ ID NO: 10550 - protein, 672 aa, Zea mays
  Clone ID: TF_ZmC4916_457.pep
MDPKGKGIVINDKEKESFVNEPRDDKSNDSGSGHKRRDGKKKKTRRIKEIVYYDSDESSSSQKDDDHDKQRKPVNSNFSFDYSRIPQSSNSHLLSIPLGKPPHFDGEDYGFWSHKMRSHLFSLHPSIWEIVDSGMHFNSSDSPIFINEQIHKNAQATTVLLASLCRDEYNKVSGLDNAKQIWDTLKISHEGNDATLLTKMELVEGELGRFAMIRGEEPTQTYNRLKTLINKIRSYGSTRWTDHDVVRLMLRSFTVLDPHLVNNIRENPRYTKMSLEEVLGKFVSGRMMIKEARYVDDALNGPINEPQPFALKATGNKEALPSKVAQIEAAGLNEEEMALIIKRFKTVLKGRNGQPSKTKTKGKRSCFKCGKLGHFIANCLDNDSDQEKGNKREKKKHYKKAKGEAHLGKEWDSDCSSSDSDNEGLAATAFNKSTLFPNECHTCLMAREKKVCTRNSTYASSSEDESSDEDEVDYSCLFKGLDRSKIDKINELIDALNEKNILLEKQEDLLYEEHDKFVEAQKSYALEVKRNEMLSFELSTCHETISTLKGVNNDLNAKLEVANKSNSCVENVVICNRCKDFDIDACSEHIASIAKLNNEVASLNAQLKTSKSEFDKLKFARDAYTIGRHPSIKDGLGFKREAKNLTSHKTPISTKEKGKAPVANSVKKNHAF

SEQ ID NO: 10551 - protein, 306 aa, Zea mays
  Clone ID: TF_ZmC8013_1.pep
METPPAKDGLKMFDGMGSTSAAMERVINSSSVELPLLTKANYHEWALVMQVSLEAMELWDAVEAVCKERPKDRRAMAAILRGVPPEMKAGLAVKKTAKEAWEAVRSMRIGDDRVKAASVQRLWKEYENVGFCDGESVGDFALRINGLVASLREMGETLEDHRVVKKILRVVPKRLKQVAVAIEMLTDLNTTTIEELVGRLRVAEDADADDAKAKEVSTEGVGQLLLTEAQWEARRRERNKQRKPRDGDKRRGNGDRGNNGDDEHSDGDDDASSMASGSSRRGWSRNKGQCFECGGYGHIARFCREK

SEQ ID NO: 10552 - protein, 394 aa, Zea mays
  Clone ID: TF_ZM4488.C6.o1.fg.pep
MGMIRKINLMGVPLQVEDILFNIDRKKQRKRGCLACGEKGHFRDSCPTMAKPKKERSRGKALTSVRTWDDSSSEDEPPRTRSHWSSSRSSRSSHKCLMARGNKSIPSSSDENSSDDEGLLENFETFANLNSELSTKIELLESSVPSNTADDDLIKKNEKLKAKLASSQNTIENLLEKMEILSIHNDELTTKLENIGSTPGASLVKILEIIKKDASTSCFDLMDDTNPCNQVLVENIVIETCSDEVAKENEQLRQEVARLGKALYDKKGKAKQIQLPQYNTTAGVNKPMEGETVICRLCHKESHKSFQCKTMTGDKPRQKLKQKPSSKISNTYIKKVDKKTATPYLIKKKKNGKVIAIKANKQANKGKGAKRIWVPKEIISTMKSTKKVWIPKGK

SEQ ID NO: 10553 - protein, 1483 aa, Zea mays
  unsure (1)..(1483): unsure at all Xaa locations
  Clone ID: TF_ZmC951_363.pep
MKKVVYYETDSLSPSTSGSKSASASSKRHERKKYSKMPLRYPRISKRTPLLSVALGKPPMLEGEDYSMWSDKMRHHLTSLHKSIWDIVEYGAQVPKKGEKDYDSEEVEQIQHFNSQATTILLASLSREEYNKVQGLKNAKEIWDVLKTVHEGDEVTKITKRETIEGELGRFMLYQGEEPQVMYNRLKTLVNQVRNLGSTKWDDHEMVKVILRSLVFLNPMQVQLIHGDPRYTLMSPEEVIGKFVSFELIIKGSKKIIEQGASSTPDVQPVAFKATEEKKEDSTPSRVPIDASKLDNEEMTLIIKSFRQILKQRRGKDYKSRSKKVCYKCGKPSHFIAKCPLSSDSDRDNDKRGKKKEKKRYYKKKGGDAHVCREWDSDESSIDSSSDEDAANIAITKGLLFPNVGHKCLMAKDDKRKKVKSKSSTKYETSRDEDNSSDDEDNLLILFANLNMQQKEKLNELISAIHEKDELLDSQEDFLIRKCEKLSSELSTCHDVISNLRNENAKLIAKVEKSNICDDSIVNLRNDNASSIAKIEKLNASLASLRNENEKLIAKAKELNVCNVSISNLRDENAILHAKIVELNSCKPSTSTIEHVTICTKCRDVNIDAIHDHIAMIKQQNDHIAKLDAKIAEHELENENFKFARSMLYSGRCPGIKDGIGFQQGGNVKLNAPPKRLSNFVKGKAPMPQNNEGYILYPAGYPEHKIRRIHYRKSHSGPNHDFMYKSEASSSRQSTHAKLPKKKTPIASNDHNISFKTFDASYVLTNKSGKVVAKYAGGKHNGSKTCVWVPKVYASGGSSWIIDSECTNHMTGENMFSSYEKNQDPQRAITFGDGNQGVTVFRRSDDSVAFKGVLEGQLYLVDFDRAELDTCLIAKTNMGWLWHRRLAHMGMKNLHKLIKGEHILGLTNVHFEKDRVCSACQAGKQEKSQTQETLKGFLRRAQNEFGLSIKKIRSDNGTQFKNSQIEGFLEEEGIKHEFSSLYTPQQNGVVERKNRTLLDMARTMLDEYKTSDRFWAEAVNTACYAINRLYLHRILKKTSYELLTGKKPNVSYFRVFGSKCFILVKRGRKSKFAPKAVEGFLLGFDSNTRAYRVFNKSTGLVEVSCDIVFDETNSSQVKQVDLDELDDEEAPCVTLRNMSIGDVCPKESEEPPQAQDQPSSPMQASPPTQDESEAQNDEGEDQEDEPPQEEGNDQGXDVNNQDKEDDXPHRVEEALQDSDWVLAMQEELNNFTRNKLYQMDVKSAFLNGPIKEEVYVEQPPGFEDKFSRIMTQKIEMSMMGELKYFLGFQVKQLQEGTFISQTKYIQDILTKFGMKDAKPIKTPMGTNGHLDLDTGGCKINRKSTSGTCQFLGRSLVSWASKKQNSVALYTAEAEYIAAGHCCAQLLWMRQTLRDYGYKLTKVPLLCDNESAIRIADNPVEHSRTKHIAIRYHFLRDHQQKGDIKIAYVNTKEQLADIFTKPLDEQTFTKLRHELNILDSRNFD

SEQ ID NO: 10554 - protein, 1089 aa, Zea mays
  unsure (1)..(1089): unsure at all Xaa locations
  Clone ID: TF_ZM4578.C3.o6.fg.pep
MYNRLKTLVNQVCNLGSTKWDDHEMVKVILRSLIFLNPTQVQLIHGDPRYKLMSPEEVIGKFVSFELMIKCSKQIIERGATSTPEVQPVAFKAMEEKKEEYTSSRLPIDASKLDNEEMALIIKSFRQILKQRKERDYKPHSKKVCYKCGKPSHFIAKCPLSSDSDRGDDKKGRRKEKKKYYKKKGGDAHVCREWDSDESSTDSSFDEDTANIAFNKGLLFPNVGHKCLMARDDKMKIKSRASTKYATSSEEENSSDDEDNLLALFTNLNMQQKEKLNELIAGVTVFRRSDDSVAFKGVLEGQLYLVDFNRAELDTCLIAKTNMGWLWHRRLAHVGMKNLHKLLKGEHILGLTNVHFEKDRICSACQAGKQVGVHHPHKNIMTTDRPLELLHMDLFGLIAYISIGGSKYCLVIVDDYSRFTWVFFLQEKSQTQETLKGFLRRTQNEFGLRIKKIRSNNGTEFKNSQIEGFLEDEGIKHEFSSPYTPQQNGVVERKNRTLLDMARTMLDEYKTSDRFWAEAVNIACYSINRLYLHRIIKKTSYELLTGKKPNVSYFRVFGSKCFILVKRGRKSKFAPKAVKGFLLGYDSNTRAYRVFNKSTGLVEVSCDIVFDETNGSQVEQVDLDELDDEEAPCIALRNMSIGDVCPKESEEPPHAQDQPSSSNQASPPTQDEDQAQDDENEDQEDEPPQEEGNDQGGDAHDQDKEDDEGPRPPHPRVHQVIQRDHPVNSILSNIHKGVTTRSCVAHFCEHYSFVSSIEPYRVEDALWDLDWVLAMQEELNNFTRNEVWHLVPRPNQNVVGTKWVFHNKQDEHGVVTRNKAQLVAKGYSQVEGLDFGETYAPVARLESIRILLAYASYHGFKLYQMDVKSAFLNGPIKEEVYVEQPPGFEDNVYDGGVEVFLGFQVKQLQEGTFISQTKYTQDILTKFGMKDVKPIKTPMGTNGHLDLNTGGCKIDRKSTSRTCQFLGRSLVSWASKKQNSVALSTAEAEYIAAGHCCAQLLWMRQTLRDYGYKLTKVPLLCDNESAIRMADNPVEHSRTKHIAIQYHFLRDHQQRGDIEIAYVSTKEQLADIFTKPLDEKTFTXLRHEL

SEQ ID NO: 10555 - protein, 428 aa, Zea mays
  Clone ID: TF_ZM4590.C5.o1.fg.pep
MSGDHAKKEMETGEKPTTSHGSTSSEESRTKRKEKKKDSSKGKEKRSSSHHKEKKEKSSSHKPHRSGDKKKRMRKVVYYETDSSSASTSGSDAASVTSKRQERKKYRDENYDEDEVAQIEHFNSQATTIFLASLSREEYNKVQGLKNAKEIWDLLKTAHEGDELTKITKRETIEGELGCFRLRQGEEPQDMYNRLKTLVNQVRNLGSKKWNDHEVVKVILRSLIFLNPTQVQLIRGNPRYTLMTPEEVIGNFVSFECMIKGSKKNNELDDPSTSEAQPVAFKATEEKKKESTPSRQPIDASKLDNEEMALIIKSFRQILKQRKRKDYKSRSKKVCYKCGKPSHFIAKCPLSSDSDRDNDKKGKRREKKRYHKKRGGDAHVCREWDSDESSTDSSDDEDAANIAVTKGLLFPNVGHKCLMAKDGKRKKP

SEQ ID NO: 10556 - protein, 1329 aa, Zea mays
  Clone ID: TF_ZM4903.C2.o1.fg.pep
MREIETGDKSASLGRTHSRESAHKHKEESSSSIKSQRKGKPPMFDGEYYSMWIDKMRHHLTSLHKSIWDIVEYGAQVPKEGDNDCDSEEVKQIQHFNSQATTILLASLSREEYNKVQGLKSAKEIWDVLKTAHEGYEVTKITKRETIEGELGRFMLHQGEEPQAMYNRLKTLVNQVRNLGSTKWDDHEMVKVILRSLVFLNPTQVQLIRGDPRYKLMSPKEVIGKFVSFELMIKGSKKIIEQGATSTPEVQPVAFKATKEEKKDSTPSRIPIDASKLDNEEMSLIIKSFRQILKQRRGKDYKPRSKKVCYKCGKPSHFIAKCPLSSDSDRGDDKKGKRREKKSSTDSSSDEDAANITVTKGLLFPNVGHKCLMEKDGKKKKVKSRSSTKYATSSDEDNCSDDEDNLLILFANLNMQQKEKLNELISVIHEKDELLDSQEDFLIKENKKHVKTKNAYAQEVEKNKKLTSELSTCHDTISSLRNENAKLIANVEKLDVCDDSIVNLRNDNASLIAKIDKLNASLTSLKFENEKLIAKAKDLNVCNVSISNLRDENAILHAKIVELNICKPSTSTVEHVYASGGSSWIIDSGCTNHMTGEKRMFSSYEKNQDPQRAITFGDGNQGVTVFRRSDGSVAFKGVLEGQLYLVDFNRVELDTCLIAKTNMGWLWHRRLAHVGMKNLHKLLKGEHILGLTNVHFEKDREKSQTQETLKRFLRRAQNEFSLRIKTIRSDNGTEFKNSQIEGFLEEEGIKHEFSSPYTPQQNGVVKRKNRTPLDMARTMLDEYKTSDRFWAEAVNTACYAINRNMSIGDVCPKESKEPPHAQDQPSSSMQAFQPTQDEDQAQDDEDEDQEEPPQEEDNDQGGDANDQDKEDDEGPRPPHPRVHQAIQRDNPMNTILGDIHKGPHRVEEAHQDSDWVLAMQEELNNFTRNEVWHLVPRPNQNVVGTKWVFSNKQDEHGVVTRNKPQLVAKGYSQVEGLDFGETYAPVARLKSIRILLAYATYHGFKLYQMDVKSAFLNGPIKEEVYVEQPPGFEDSEYPNHIYKLSKALYGLKQAPRAWYECLRDFLIANGFKVGKSDPTLFTKTIANDLFVCQIYVDDIIFESTNKSTCEEFSRIMIQKFEMSMMGELKYFLGFQAKQLQEGTFISQTKYIQDILAKFGMKDAKPIKTPMGTNGHLDLDTGGCKIDRKSTSGTCQFLGRSLVSWASKKQNSVALSTAEVEYIVVGHCCAQLLWMRQTLRDYGYKLTKVPLLCDNESAIRMADNPVEHSRTKHIVIRYHFLRDHQQRGDIEIAYINTKEQLADIFTKPLDEKTFTKLRHELNILDSRNFD

SEQ ID NO: 10557 - protein, 464 aa, Zea mays
  Clone ID: TF_ZM4983.C2.o13.fg.pep
MARRRSQKNKKTPPKKNNEVTLEVLLSDCSNYASWSTRVINAFRTIDSQLEQVLDKSIIPSNYDKENASEEDQRCIRLNYLAYDILSNSLSKEDYRAFIMNYNEYIPDAHGIWTRIKSKFNESKHISSYDAYTSFSPCETNPLKEEEENERWRLNDESTSPKENLKSQQPHSCTCIQIETILPCANACCSSTSKSSFELEFSGTKDDTCQELKEENEKLRTSLTQLKGKCTAQPSQDNRDYMVKKLETGTTVACTKSLEEKVKDLRIVKSKEQKKKINTSAKSLNHASMQGNIQGNDQATLHTKKSKKCSECFENGHLIRSCPYIKENGLIINKDDKHCFRCSKKGHLVKSCPYEEQKCIVLEKKIFTNHVASKKQGKKKSSRYDDRLWYICRKKGHQCKDCPIGNYPAPNLSIDSYVTRQSKIATCARKVMSLPSASTKDIWVPRSLMTNLDGPIKRWGPKYA

SEQ ID NO: 10558 - protein, 124 aa, Zea mays
  unsure (1)..(124): unsure at all Xaa locations
  Clone ID: TF_ZmC14166_328.pep
RYKQMSPEEVIGKFMSFELMIKDSKHIVNLEXGATFTPEVQPVAFKATEEKKEESTPSRLPINPSKLDNEEMTLIIKIFWXILKQRKGKPAXKRVCYRCGKSGHFIAKCPYTSDSDRDDDKKGK

SEQ ID NO: 10559 - protein, 1522 aa, Zea mays
  Clone ID: TF_ZmC951_355.pep
MSGDHAKKEMVTGEKPATSHGKTPSGEFGNKMKGSPSHNKSHWSGEKKKKMKKVVYYETDSSSPSTSGSNTPSITSKRHERKKFSKIPLRYPRIPKHTPLLSVPLGKPPVFEGEDYSMWSARMKGHLTSLHKSIWDVVEYGAQVPQVGDKDYDSDEADQIRHFNSQATTILLVSLSREEYNKVHGFETTKDIWDVLKTVHEGDEESQAMYNRLKTLVNQVRNLGSTKWDDHEMVKVILRSLVFLNPTQVQLIRGDPRYKLMSPEEVIRKFVSFELMIKGSKQIIERGATSTPEVQPVAFKATEEKKEESTSSRLPIDASKLDNEEMTLIIKSFCQILKQRRGKDYKPRSKKVCYKCGMPGHFIAKCPLSSDSDRGDDKKGRRKEKKKYYKKKGGDAHVCWEWDSDESSTDSSDEDAANITVNKGLLFHNVGHKCLMAKDGKKKVKSRASTKYATSSDEENSSDDEDNLLALFANPNMQQKEKLNELIGVIHEKDELLDSQEDFLFKENKKHVKVKNAYAQEVEKCEKLTSELSTCHDTIFNLRNENAKLIAKVENLNVCDDSLVKLKNDNANLIAKIDKLNESIASLKIENNKLITKAKNLNVCNDIVSNLRNENVMLHAKIDELNVCKPSTSTIEHVTICTRCRDINVDAIHDHLALIKQQNDHIAQLSAKINEHDLENENFKFARSMLYNGRRPGIKDDIGFQQGDNVKLNAPKKLSNFVKGKAPMVQDNEGYILYPAGYPEHKIRRIHSRKSHSGSHHAFMYKSEASSFRQSTHAKFPKKKTPTASNDHNISFKTFDASYVLTNKSGKVVAKYVGAKHKGSKTCVWVPKVYASGGSSWIIDSGCTNHMTGEKRMFSSYEKNHDPQRAITFGDGNQDIGVTVFTRSDDSVAFKGVLEGQLYLVDFNRAELDTCLIAKTNMGWLWHRRLAHVGMKNLHKLLKGEHILGLTNVHFEKDREKSQTQETLKGFLRWAQNEFGLRIKKIRSDNGTEFKNSQIEGFLEDEGIKHEFSSPYTPQQNGVVERKNRTLLDLARTMLDEYKTSDRFWAEAINTACYAINRLYLHRILKKTSYELLTGKKPNVSYFRVFGSKCFILVKRGRKSKFAPKDVEDFLLGYDSNTRAYRVFNKSTGLVEVSCDIVFDETNGSQVEQVDLDELDDEEAPCVALRNMSIGDVCPKESEEPPQAQDQPSSSIQASPPTQDEDQAQDDENEDQEKLPQEEDNDQGGDANDQNKEDDEGPRPPHPRVHQEIQQDHLVNSLLGDIYKGVTTRSRVAHFCEYYSFVSSIDPYRVKDALRDSDWLLAMQEELNNFTRNEVWHLVPHANQNVVGTKWVFHNKQDEHGVVTRNKARLVAKGYSQVEGLDFGETYAPIARLESIRILLAYAIYHGFKLYQMDVKSAFLNEPIKEEVYVEQPPGFKDSEYPNHVYKLSKVLYGLKQAPRAWYECLRDFLITNGFKVGKADPTLFTKTIANDLFVCQIYVDDIIFGSTNKSTCEEFSRIMIQKFEMSMMGELKYFLGF

SEQ ID NO: 10560 - protein, 542 aa, Zea mays
  Clone ID: TF_ZM4596.C2.o8.fg.pep
MYNRLKTMVNQVRNLGSTKWDDYEMVKVILRSLVFHSPTQVQLIRGDSRYKQMSSKEVIDKFVSFELMLKDSKHIVNSNQGATSTPDVQPVAFKPTKEKKEEPTPTSRFPIDASKLDNEKMTLIIKSFWHVLKQRKGKDYKPRSKRVCYRCGKSGHFIAKCPYTSDSDRDDDKKGKKEMTKKRYYNKKKGGEAHMGRKWDSDKSSTDSSFDEDAANIVINKGLLFPNVGHKCLMVKDSKKKKVHSRDTTKYTTSDDEGNSSDDNDDLTSLFANLSKDQKKKINELIETINEKDDILEYQEDLLIKENKKFVKLKDVYALEVEKCENLSKELNICNDSISCLITENVSLIYKIKELNACKPSTSTIEHVTVCTKCRDVNIDAMNDHLAMIKEQNDHINKLNAKIVEHELENENFKFARSMLYNGRRPSIKDVIGFQQGSQSNVKLNAPKNMLSNFVKGKAPMVQDREESSQASKAEHILGLTNVHFEKDRICSACQAGKQVGAHHPHKNIMMTERPLELLHMDLFGPIAYIIIGGRKSQTQET

SEQ ID NO: 10561 - protein, 323 aa, Zea mays
  Clone ID: TF_ZM4948.C1.o9.fg.pep
MSRDHAKREIMTGDKPASSGKTLSRESDNKYKEESSSSIKSHQRGDKKKRKNKVVYYETDSLSPSTSGTDSSTTSKRHEHKKYKVYNKVQGLKNAKEIWDVLKTAHEGDKVTKITKRETIEAEFGRFVLNKGEEPQVMYNRLKTMVNQVRNLGSTKWDDHEMVKVILRSLVFCNPTQLQLIRGDPRYKQMSPEEVIGKFVSFELMIKDSKHIVNLEQGATSTPEVQPVAFKATEEKKEESTLSRLPIDTSKLDNEEMALIIKSFRQILKQRRGKDYKPHSKRVCYRCGKSGHFIAKCPYSSESDRDEDKKGKKKYYKKKGGEA

SEQ ID NO: 10562 - protein, 1392 aa, Zea mays
  Clone ID: TF_ZmC119_1038.pep
MGGLAPVRNCDATVQVLGWGGHDTTGTPLRPSQVTNRERSMTQDVGRRRRSSASDSIGDWVLDEMEKGAGAMAPSTPTFTLRSILEKDKLNGTNYTDWIRNLRIVLRAEKKEDVLDTPLPEDPGENATAAAKTAYKKAMDANLEVSCLMLACMEPELQMQFESNHEVYDMIVALKDMFQTQARTERFNVSKAFLECKLAEGAAVGPHVIKMVGYSQRLEKLGFPISQELATDFILASLPPSYGNFITNYHMHGAERGLNELCGMLKTAEGDIKKSAGSSGHVMAVQNKPNFKKKGKSQKKKGKAKDTVSKPNQKPKAGPAADAECFYCKELGHWKRNCKQYLASIKDRGGKGTAAAGTLAIHITEIFLADSYINSWVFDTGSVAHICNSMQGMIRSRSVKRGEVDFRVGNNARVATLTVGTMQLHLPSGFILELNNCYLVPSMSQNIMSPSCLMKDGYSFASENNGCVISKNGMFVAFASIMNGLFILNLDDAPICNISAKRPRPNDLSPTYMWHCRLGHISENRMKKLHSDGLLTSFDFESYETCEACLLGKMTKAPFTGLPERTLDLLELIHTDVCGPMSTTARGGFQYFITFTDDFSRYGYVYLMKHKSESLEKFKEFQNEVENQRGKKIKALRSDRGGEYLSHEFSNHLKSCGIVPQLTPPGTPQRNGVSERRNRTLLDMVRSMMSQSDLPLSFWGYALETAAFTLNRVPSKSVVKTPYEMWTGKTPSLSFLKIWGCEVYVKRLQSDKLTPKSDKCMFVGYPKETLGYYFYHRSEGKVFVARNGVFLEKEFLKREKSKQKVYLEEVQDEPVGQDSTSDANVAEQVETSMARESPPQPRRSARLREARGEVLLLGNGEVLLLDNDEPATYSEAMMDPDSEKWHVAMRSEIDSMGENQVWNLVDPPDGVRPIECKWIYKKKKDMDGNVHIYKARLVAKGFRQVQGVDYDETFSPVAMLKSIRIILAIAAYFDYEIWQMDVKTAFLNGNLDEDVYMIQPEGFVDPINAGKICKLQKSIYGLKQASRSWNIRFDEVIKGLGFHQNEEEACVYKKESGSAVVFLILYVDDILLIGNDIPMLESVKASLKKSFSMKDLGEAAYILGIRIYRDRSKRLIGLSQDTYIDKVLKRFNMEQSKKGFIPMSHGKHLSQMQCPATANERERMSKVPYASAIGSIMYAMISTRPDVSYAISATSRYQADPGEDHWTAVKGILKYLRRTKDMFLVYGGKEELVVTGYTDASFQTDPDELKSQSGFVFTINGGAVSWKSSKQETVTDSTTEAEYIAASESAKEGVWIRKFLIELGVFPNASSPLNLYCDNNGAIAQAKEPRNHQKNKHVLRKFHLIREFIRRGEIKICKIHTDLNVADPLTKPLPQPKHEAHVRSMGIRYLLD

SEQ ID NO: 10563 - protein, 1424 aa, Zea mays
  Clone ID: TF_ZmC119_814.pep
MAPSTPTFTLRSILEKDKLNGTNYTDWIRNLRIVLRAEKKEDVLDTPLPEDPGENATAAAKTAYKKAMDANLEVSCLMLACMEPELQMQFETNHEVYDMIVALKDMFQTQARTERFNVSKAFLECKLAEGAAVGPHVIKMVGYSQRLEKLGFPISQELATDFILASLPPSYGNFITNYHMHGAERGLNELCGMLKTAEGDIKKSAGSSGHVMAVQNKPNFKKKGKSQKKKGKGKDTVSKPNQKPKAGPAADAECFYCKELGHWKRNCKQYLASIKDRGGKGTAAAGTLAIHITEIFLADSYINSWVFDTGSVAHICNSMQGMIRSTSVKRGEVDFRVGNNARVAALTVGTMQLHLPSGFILELNNCYLVPSMSRNIMSPSCLMKDGYSFASENNGCVISKNGMFVAFASIMNGLFILNLDDAPICNISAKRPRPNDLSPTYMWHCRLGHISENRMKKLHSDGLLTSFDFESYETCEACLLGKMTKAPFTGLPERTLVLLELIHTDVCGPMSTTARGGFQYFITFTDDFSRYGYVYLMKHKSESLEKFKEFQNEVENQRGKKIKALRSDRGGEYLSHEFSNHLKSCGIVPQLTPPGTPQRNGVSERRNRTLLDMVRSMMSQSDLPLSFWGYALETAAFTLNRVPSKSVVKTPYEMWTGKTPSLSFLKIWGCEVYVKRLQSDKLTPKSDKCMFVGYPKETLGYYFYHRSEGKVFVARNGVFLEKEFLKREKSKQKVYLEEVQDEPVGQDSTSDANVAEQVETSMARESPPQPRRSARLREARGEVLLLGNGEVLLLDNDEPATYSEAMMDPDSEKWHVAMRSEIDSMGENQVWNLVDPPDGVRPIECKWIYKKKKDMDRNVHIYKARLVAKGFRQVQGVDYDETFSPVAMLKSIRIILAIAAYFDYEIWQMDVKTAFLNGNLDEDVYMIQPEGFVDPINAGKICKLQKSIYGLKQASRSWNIRFDEVIKGLGFHQNEEEACVYKKESGSAVVFLILYVDDILLIGNDIPMLESVKASLKKSFSMKDLGEAAYILGIRIYRDRSKRLIGLSQDTYIDKVLKRFNMEQSKKGFIPMSHGKHLSQMQCPATANERERMSKVPYASAIGSIMYAMISTRPDVSYAISATSRYQADPGFVFTINGGAVSWKSSKQETVTDSTTEAEYIAASESAKEGVWIRKFLIELGVFPNASSPLNLYCDNNGAIAQAKEPRNHQKNKHVLRKFHLIREFIRRGEIKICKIHTDLNVADPLTKPLPQPKHEAHRSLPVILQNIHIITPIKSRDIGLDKTMHPLGPLLQIISEDMHGDLLKKVLFGTFESIVSQVVPKLGGYTPWVHLPKTLGGSCIPSKFLHLRAQAPMVTNEIVIEAMIKGLQPGPTTQYFARKPPQTLEKLLQKMDEYIRADNDFRQRREEAYRYSVRPKICIKTYK

SEQ ID NO: 10564 - protein, 1300 aa, Zea mays
  Clone ID: TF_ZmC119_998.pep
MAPSTPTFTLRSILEKDKLNGTNYTDWIRNLRIVLRAEKKEDVLDTPLPEDPGENATAAAKTAYKKAMDANLEVSCLMLACMEPELQMQFETNHEVYDMIVALKDMFQTQARTERFNVSKAFLECKLAKGAAVGPHVIKMVGYSQRLEKLGFPISQELATDFILASLPPSYGNFITNYHMHGAERGLNELCGMLKTAEGDIKKSAGSSGHVMAVQNKPNFKKKGKSQKKKGKGKDTVSKPNQKPKAGPAADAECFYCKELGHWKRNCKQYLASIKDRGGKGTAAAGTLAIHITEIFLADSYINSWVFDTGSVAHICNSMQGMIRSRSVKRGEVDFRVGNNARVAALTVGTMQLHLPSGFILELNNCYLVPSMSRNIMSPSCLMKDGYSFASENNGCVISKNGMFVAFASIMNGLFILNLDDAPICNISAKRPRPNDLSPTYMWHCRLGHISENRMKKLHSDGLLTSFDFESYETCEACLLGKMTKAPFTGLPERTLDLLELIHTDVCGPMSTTARGGFQYFITFTDDFSRYGYVYLMKHKSESLEKFKEFQNEVENQRGKKIKALRSDRGGEYLSHEFSNHLKSCGIVPQLTPPGTPQRNGVSERRNRTLLDMVRSMMSQVPSKSVVKTPYEMWTGKTPSLSFLKIWGCEVYVKRLQSDKLTPKSDKCMFVGYPKETLGYYFYHRSEGKVFVARNGVFLEKEFLKREKSKQKVYLEEVQDEPVGQDSTSDANVAEQVETSMERESPPQPRRSARLREARGEVLLLGNGEVLLLDNDEPATYSEAMMDPDSEKWHVAMRSEIDSMGENQVWNLVDPPDGVRPIECKWIYKKKKDMDGNVHIYKARLVAKGFRQVQGVDYDETFSPVAMLKSIRIILAIAAYFDYEIWQMDVKTAFLNGNLDEDVYMIQPEGFVDPINAGKICKLQKSIYGLKQASRSWNIRFDEVIKGLGFHQNEEEACVYKKESGSAVVFLILYVDDILLIGNDIPMLESVKASLKKSFSMKDLGEAAYILGIRIYRDRSKRLIGLSQDTYIDKVLKRFNMEQSKKGFIPMSHGKHLSQMQCPATANERERMSKVPYASAIGSIMYAMISTRPDVSYAISATSRYQADPGEDHWTAVKGILKYLRRTKDMFLVYGGKEELVVTGYTDASFQTDPDELKSQSGFVFTINGGAVSWKSSKQETVTDSTTEAEYIAASESAKEGVWIRKFLIELGVFPNASSPLNLYCDNNGAIAQAKEPRNHQKNKHVLRKFHLIREFIRRGEIKICKIHTDLNVADPLTKPLPQPKHEAHVRSMGIRYLLD

SEQ ID NO: 10565 - protein, 631 aa, Zea mays
  Clone ID: TF_ZM3660.C11.o1.fg.pep
MDANLEVSCLMVACMEPELQMQFETNHEVYDMIVALKDMFQTQARTERFNVSKAFLECKLAEGAAVGPHVIKMVGYSQRLEKLGFPISQELATDFILASLPPSYGNFITNYHMHGAERGLNELCGMLKTAEGDIKKSAGSSGHVMAVQNKPNFKKKGKAKDTVSKPNQKPKAGPAADAECFYCKELGHWKRNCKQYLASIKDRGGKGTAAAGTLAIHITEIFLADSYINSWVFDTGSVAHICNSMQGMIRSRSVKRGEVDFRVGNSARVAALTVGTMQLHLPSGFILELNNCYLVPSMSRNIMSPSCLMKDGYSFASENNGCVISKNGMFVAFASIMNGLFILNLDDAPICNISAKRPRPNDLSPTYMWHCRLGHISENRMKKLHSDGLLTSFDFESYETCEACLLGKMTKAPFTGLPERTLDLLELIHTDVCGPMSTTARGGFQYFITFTDDFSRYGYVYLMKHKSESLEKFKEFQNEVENQRGKKIKALRSDRGGEYLSHEFSNHLKSCGIVPQLTPPGTPQRNGVSERRNRTLLDMVRSMMSQSDLPLSFWGYALETAAFTLNRVPSKSVVKTPYEMWTGKTPSLSFLKIWGCEVYVKRLQSDKLTPKSDKCMFVGYPKETLGYYFYH

SEQ ID NO: 10566 - protein, 1107 aa, Zea mays
  Clone ID: TF_ZM4447.C1.o15.fg.pep
MAPSTPTFTLRSILEKDKLNGTNYTDWIRNLRIVLRAEKKEDVLDTPLPEDPSENATAAAKTTYKKAMDTNLEVSCLMLACMEPELQMQFETNHEMHDMIVALKDMFQTQARTERFNVSKAFLECKLAESAAVGPHVMKMVGYSQRLEKLGFPISQELATDFILASLPTSYGNFITNYHMHGAERGLNELCGMLKTAEGDIKKSAGSSSHVMAVQNKPNFKKKGKSQKKKGKAKDTVSKPNQKPKAGPAADAECFYCKELGHWKRNCKQYLASIKDRGGKGTTAAGTLAIHITEIFLADSYINSWVFYTGSVAHICNSMQGMIRSRSVKRGEVDFWVGNNARVAALTVGTMQLHLPSGFILELNNCYLVPSMSRNIMSPSCLMKDGYSFASENNGCVISKNGMFVAFASIMNGLFILNLDDAPICNISAKMPRPNDLSPTYMWHCRLGHISENRMKKLHSDGLLTSFDFESYETCEACLLGKMTKAPFTGLLERTLDLLELIHTDVCGPMSTTSRGGFQYFITFTDDFSRYGYVYLMKHKSESLEKFKEFQNEVENQRGKKIKALRSDRGGEYLSHEFSNHLKSCGIVPQLTPPGMPQRNGVSERHNRTLLDMVRSMMSQSDLPLSFWGYALETAAFTLNRVPSKSVVKTPYEMWTGKTPSLSFLKICGCAVYVKRLQSDKLTPKSDKCMFVGYPKETLGYYFYHRSEGKVFVARNGVFLEKEFLKREKSKQKVYLEEVQDEPVGQDSTSDANVAEQVETSMARESPPQPRRPIECKWIYKKKKDMDGNVHIYKARLVAKGFRQVQGVDYDETFSLMDVKTAFLNGNLDEDMYMIQPEGFVDPINAGKICKLQKSIYGLKQASRSWNIRFDEVIKGLGFHQNKEEACVYKKESGSSVVFLILYVDDILLIGNDIPMLESVKASLKKSFSMKDLGEAAYILGIRIYRDRSKRLIGLSQDTYIDKVLKRFNMEQSKKGFIPMSHGKHLSQMQCPATANERERMSKVPYASAIGSIMYAMISTRPDVSYAISATSRYQADPGEDYWTAVKGILKYLRRTKDMFLVYGSKKELFVTGYTDASFQTDPDELKSQSGFVFTINGGVVSWKSSK

SEQ ID NO: 10567 - protein, 1012 aa, Zea mays
  Clone ID: TF_ZM4489.C3.o3.fg.pep
MVGYSQRLEKLGFPISQELATDFILASLPPSYGNFITNYHMHGAERGLNELCGMLKTAEGDIKKSAGSSGHVMAVQNKPNFKKKGKSQKKKGKAKDTVSKPNQKPKAGPAADAECFYCKELGHWKRNCKQYLSSIKDRGGKGTAAAVPSMSRNIMSPSCLMKDDYSFASENNGCVISKNGMFLAFASIMNGLFILNLDDAPICNISAKRPRPNDLSPTYMWHCRMGHISENHMKKLHSDGFLTSFDFESYETCEACLLGKMTKAPFTGLPERTLDLLELIHTDVCGPMSTTARGGFQYFITFTDDFSRYGYVYLMKHKSESLEKFKEFQNEVENQRDKKIKALRSDRGGEYLSHEFSNHLKSCGIVPQLTPPGTPQRNGESERRNRTLLDMVRSMMSQSDLPLSFWGYALETAAFTLNRVPSKSVVKTPYEMWTGKTPSLSFLKIWGCEVYVKRLQSDKLTPKSDNCMFVGYPKETLGYYFYHRSEGKVFVAWNEAMMDLDSEKWQVAMRSEIDSMGENQVWNLVDLPDGVRPIECKWIYKKKKDMDGNVHIYKARLVAKGFRQVQGVDYDETFSLVAMLKSIRIILAIATYFDYEIWQMDVKTAFLNGNLDEDVYMIQPEGFVDPINAGKICKLQKSIYGLKQASRSWNIRFDEVIKGLGFHQNEEEACVYKKESGSAVVFLILYVDDILLIGNDIPMLESVKASLKKSFSMKDLGEAAYILGIRIYRDRSKRLIGLSQDTYIDKVLKRFNMEQSKKGFIPMSHGKHLSQMQCPATANERERMSKVPYASAIGSIMYAMISTRPDVSYAISATSRYQADPGEDHWTTVKGILKYLRRTKDMFLVYGGKEELVVTGYTDASFQTDPDELKPQSGFVFTINGGAVSWKSSKQETVTDSTTEAEYIAASESAKEGVWIRKFLIELGVFPNASSPLNLYCDNNGAIAQAKEPRNHQKNKHVLRKFHLIREFIRRGEIKICKIHIDLNVADPLTKPLPQPKHEAHMRSMGITYLLD

SEQ ID NO: 10568 - protein, 1188 aa, Zea mays
  Clone ID: TF_ZM4630.C4.o4.fg.pep
MAPSTPTFTLRSILEKDKLNGTNYTDWIRNLRIVLRAEKKEDVLDTPLPEDPGENATAAAKTAYKKAMDANLEVSCLMLACMEPELQMQFETNHERLEKLGFPISQELATDFILASLPPSYGNFITNYHMHGAERGLNELCGMLKTAEGDIKKSAGSSGHVMAVQNKPNFKKKGKSQKKKGKAKDTVSKPNQNPKAGPAADAECFYCKELGHWKRNCKQYLASIKDRGGKGTAAAGTLAIHITEIFLADSYINSWVFDTGSVAHICNSMQGMIRSRSVKRGEVDFRDGYSFASENNGCVISKNGMFVAFASIMNGLFILNLDDAPICNISAKRPRPIDLSPTYMWHCRLGHISENRMKKLHSDGLLTSFDFESYETCEACLLGKMTKAPFTGLPERTLDLLELIHTDVCGPMSTTARGGFQYFITFTDDFSRYGYVYLMKHKSESLEKFKEFQNEVENQRGKKIKALRSDRGGEYLSHEFSNHLKSCGIVPQLTPPGTPQRNGVSERRNRTLLDMVRSMMSQSDLPLSFWGYALETAAFTLNRVPSKSVVKTPYEMWTGKTPSLSFLKIWGCEVYVKRLQSDKLTPKSDKCMFVGYPKETLGYYFYHRSEGKVFVARNGVFLEKEFLKREKSKQKVYLEEVQDEPVGQDSTSDANVAEQVETSMARETPPQPRRSARLREARGEVLLLGNGEVLLLDNDEPATYSEAMMDPDSEKWHVAMRSEIDSMGENQVWNLVDPPDVQGVDYDETFSPVAMLKSIRIILAIAAYFDYEIWQMDVKTAFLNGNLDEDVYMIQPEGFVDPINAGKICKLQKSIYGLKQASRSWNIRFDEVIKGLGFHQNEEEACVYKKESGSAVVFLILYVDDILLIGNDIPMLESVKASLKKSFSMKDLGEAAYILGIRIYRDRSKRLIGLSQDTYIDKVLKRFNMEQSKKGFIPMSHGKHLSQMQCPATANERERMSKVPYASAIGSIMYAMISTRPDVSYAISATSRYQADPGEDHWTAVKGILKYLRRTKDMFLVYGGKEELVVTGYTDASFQTDPDELKSQSGFVFTINGGVVSWKSSKQETVTDSTIEAEYIAASESAKEGVWIRKFLIELGVFPNASSPLNLYCDNNGAIAQAKEPRNHQKNKHVLRKFHLIREFIRRGEIKICKIHTDLNVADPLTKPLPQPKHEAHVRSMGIRYLLD

SEQ ID NO: 10569 - protein, 1067 aa, Zea mays
  Clone ID: TF_ZM4992.C3.o2.fg.pep
MAPSTPTFTLRSILEKDKLNGTNHTDWIRNLRIVLRAEKKEDVLDSPLPEDPGENATAAAKTAYKKAMDANLEVSCLMLACMEPELQMQFETNHEVYDMIVALKDMFQTQARTERFNVSKAFLECKLAEGAAVGPHVIKMVGYSQRLEKLGFPISQELATDFILASLPPSYGNFITNYHMHGAERGLNELCGMLKTAEGDIKKSAGSSGHVMAVQNKPNFKKKGKSQKKKGKGKDTVSKPNQKPKAGPAADAECFYCKELGHWKRNCKQYLASIKDRGGKGTAAAGTLAIHITEIFLADSYINSWVFDTGSVAHICNSMQGMIRSRSVKRGEVDFRLTPPGTPQRNGVSERRNRTLLDMVRSMMSQSDLPLSFWGYALETAAFTLNRVPSKSVVKTPYEMWTGKTPSLSFLKIWGCEVYVKRLQSDKLTPKSDKCMFVGYPKETLGYYFYHRSEGKVFVARNGVFLEKEFLKREKSKQKVYLEEVQDEPVGQDSTSDANVAEQVETSMARESPPQPRRSARLREARGEVLLLGNGEVLLLDNDEPATYSEAMMDPDSEKWHVAMRSEIDSMGENQVWNLVDPPDGVRPIECKWIYKKKKDMDGNVHIYKARLVAKGFRQVQGVDYDETFSPVAMLKSIQIILAIAAYFDYEIWQMDVKTAFLNGNLDEDVYMIQPEGFVDPINAGKICKLQKSIYGLKQASRSWNIRFDEVIKGLGFHQNEEEACVYKKESGSAVVFLILYVDDILLIGNDIPMLESVKASLKKSFSMKDLGEAAYILGIRIYRDRSKRLIGLSQDTYIDKVLKRFNMEQSKKGFIPMSHGKHLSQMQCPAMANERERMSKVPYASAIGSIMYAMISTRPDVSYAISATSRYQADPGEDHWTAVKGILKYLRRTKDMFLVYGGKEELVVTGYTDASFQTDPDELKSQSGFVFTINGGAVSWKSSKQETVTDSTTEAEYIAASESAKEGVWIRKFLIELGVFPNASSPLNLYCDNNGAIAQAKEPRNHQKNKHVLRKFHLIREFIRRGEIKICKIHTDLNVADPLTKPLPQPKHEAHVRSMGIRYLLD

SEQ ID NO: 10570 - protein, 113 aa, Zea mays
  Clone ID: TF_uC-zmflteosinte082f08b1.pep
QQYSSSICSAPGYSSSSWRRAESSSGDSADTPHWSGCPLWRPGKARRQRTGPTCFKCSQVGHYAIACPMGNSNTPAQNKQQTPTSDKGFSIARVTQVSAEATPNGADIAIGMK

SEQ ID NO: 10571 - protein, 428 aa, Zea mays
  unsure (1)..(428): unsure at all Xaa locations
  Clone ID: TF_ZM4631.C1.o5.fg.pep
MDAEDWLRTVERELHTAQCNDREKVLYGPRQLRGTVQSSWESYLATHANPESITWEEFRDNFRRYHVPEGLMIVRKEEFLALKQGPLSVSEYRDKFLQLSRYVPEDVNTSKRQQXHFSHSSKVTSTSTSISIKTSNSSAKGSFLSSSSSTVRXNKQGGNQYQRQGNQAARLLAPATNQNNQAAPAQGGSRACFHCGEQGHWANHCPKKVAQKQPAPNAPVRQNAMQQGGNNRGQPRAQYGKVNHLESDTVQKTPGVALGEEVLWSWSCLDQXKGSCHQVTAHIEEIKPSEAINVVSEFPDVFPEELLGMPPERKVEFAIELIPGTTPISKRDYRVSGPELVELKKQIDELSEKGYIRPSTSPWAAPVLFVEKDGTKRMCIDYRSLNEVTIKNKYPLPRIEDLFDQLRGASLFSKIETRAMVGAPGFSI

SEQ ID NO: 10572 - protein, 641 aa, Zea mays
  Clone ID: TF_ZM4545.C3.o1.fg.pep
MSGDHTKKEVMTGEKPATSHEKTPSRESGSKVKGESPSHNKSHRSGDKEKKMKKVVYYETDSSSPSTSDSDTSSVTSKRHECKKFSQIPLRYPRFSKHTPLLSVPLGKPPVFRVKVPSLGDEDYDSDEVDQIRHFNSQATTILLASLSREEYNKVQGLKSAKEIWDVLKTAHEGDEVTKITKMETVEGKLGRFMLNQGEEPQAMYNRLKTLVNQVRNLGSTKWDDHEMVKEVIGKFVSFELMIKGSKKIIEQGASSTPEMQLVAFKATEEKKEESTSSRPPIDASKLDNEEMALIIKSFRQTLKQRRGKDYKPHSKKVCYKCGKPSHFIAKCPISSDIDRGDDKKGKRREKKRYYKKKGGDAHLCREWDSDESSTNSSDEDAANIVVNKGLVFPNVGHKCLMAKDGKKKKVKSRSSTKYATSSDEDNSSDDEDNLLTLFANLNMQQKEKLNELISAIHEKDELLDSQEDFLIKENNKHVKVKNAYAQEVERFDDCDNSIVSLRNDNANLIAKIDKLNESLSSLKIENDKLIAKAKELDVCNVSIFYLRNENAILHAKIDDLNACKPSTSSVDHVSICTRCRDINVDAIHDHLAMIKQQNDHIAKLDAKIAEHELENEKFKFARSMLYSGRRPGIKDGIGFQ

SEQ ID NO: 10573 - protein, 1622 aa, Zea mays
  Clone ID: TF_ZM4926.C2.o1.fg.pep
MSGEHAKKEMETGDKPATSHGKASSEESRNKKKGKEKKASSHKSHRSGDKKKKMRKVVYYETDTSSPSTSGSDAPSITSKRHERKKFSKIPLHYPRTSRHTPLLSVPLGKPPTFDGEDYARWSDLMKFHLTSLHKSIWNVVEFGAQVPSVGDEDYDEDEVAQIEHFNSQATTILIASLSREEYNKVQGLKSAKEVWDVLKTAHEGDELTKITKREMIEGELCRFHLRQGEEPQDMYNRLKTLVNQVRNLGSKKWDDHEVVKVILRSLIFLNPTQVQLIRGNPRYTLMTPEEVIGNFVSFEFMIKGSRKINELDGPSTSKAQPVAFKATEEKKEESTPSRTPIDASKLDNEEMALVIKSFRQILKQRRGKDYKPRSKKVCYKCGKPSHFIAKCPISSDSDRGDDKKGRRKEKKWYYKKKGGDAHVCREWDSDESSSDSSDDEDAANIAVTKGLLFPNVGHKCLMAKDDKKKKVKSKSSTRYESSSDDNASDEEDNLRTLFANLNMQQKEKLNELISAIHEKDDLLDSQEDFLIKENKKHVKVKNSYALEVEKCEKLSSELSTCHETIDNLRNENANLLAKVDSIACNVSIPNLRNDNDDLLAKIEELNMSLASLRIENEKLHAKVVELKSCKPSTSIVEHTSICTRCRDVDVNAIHDHMALIKQQNDRIAKLDAKIAEHEHENEKFKFARSMIYSGRRPGIKDGIGFQKGNNVKLNAPPKKLSNFVKGKAPMPQDNEGYILYPAGYPESKIRRIHSRKSHSGPNHAFMYKGETSSSKQPTRAKLPKKKTPNASNDHDISFKTFDASYVLTNKSGKVYASGGSSWIIDSGCTNHMTGEKKMFSSYEKNQDPQRAITFGDGNQGVTVFRRSDDSIAFKGVLEGQLYLVDFDRAELDTCLIAKTNMGWLWHRRLAHVGMKNLHKLLKGEHILGLTNVHFEKDRICSACQAGKQVGAHHPHKNIMTTDRPLELLHMDLFGPIAYISIGGKTLKGFLRQAQNEFGLRIKKIRSDNGTEFKNSQIEGFLEEEGIKHEFSSPYTPQQNGVVERKNRTLLDMARTMLDEYKTSDRFWAEAVNTACYAINQLYLHRILKKTSYELLTGKKPNISYFRVFGSKCFILVKRGRKSKFAPKTVEGFLLGYDSNTRAYRVFNKSSRQVEVSCDVVFDETNGSQVEQVDLDEIGDEEAPCIALRNMSIGDDEAQVDEVQDQANEPPQDDDNDQGGDAHDQDKEDEEPRPPHPRVHQAIQRDHPVDTILGDIHKGVTTRSRVAHFCEHYSFVSSIEPHRVEEALQDSNWVVAMQEELNNFTRNEVWHLVPRPNQNVVGTKWVFRNKQDEHGVVIRNKARLVAKGYSQVEGLDFGETYAPVARLESIRILLAYATYHGFKLYQMDVKSAFLNGPIKEEVYIEQPPGFEDSEYPNHVYKLSKALYGLKQAPRAWYECLRDFLITNGFKVGKVDPTLFTKTLENDLFVCQIYVDDIIFGCTNESTCEEFSRIMTQKFEMSMMGELKYFLGFQVKQLQEGTFLSQTKYTQDILSKFGMKDAKPIKTPMGTNGHLDLDEGGKFVDQKVYRSMIGSLLYLCASRLDIMLSVCMCARFQADPKEAHLTAVKRILRFLVYTPKFGL

SEQ ID NO: 10574 - protein, 1539 aa, Zea mays
  Clone ID: TF_ZM4932.C3.o1.fg.pep
MSGEHAKREMEIGNKPIGDKPTTSHEKASSEESRKKGKGKEKKASSHKSHQSGNKKKKMRKVVYYETDTSSPSTSGSDAPSVISKRHERKKFSKIPLRYPRIPKHTPLLSVPLGKPLTFDGEDYARWSDLMRFHLTSLHKSIWDVVEFGVQVPSVGDEDYDEDEVAQIEHFNSQATTILLASLSREEYNKVQGLKSAKEVWDVLKTAHEGDELTKITKRETIKGELVRNLGSKKWDDHEMVKVILRSLIFLNPTQVQLIRGNPRYTLMTPEEVIGNFVSFEYMIKGSKKINELDDPSTSEAQPVAFKATKEKKEESTPSRQPIDASKLDNEEMAFVIKSFRQILKQRRRKDYKPRSKKVCYKCGKPSHFIAKCPISSDSDRGDDKKGRRKEKKKYYKKKGGDAHVCREWDSDESSSDSSSDEDAANIAINKGLLFPNVGHKCLMAKDGKKKKVKSKSSTRYESSSDDNASDEEDNLRTLFANLNMQQKEKLNGLISAIHEKDDLLDSQEDFLIKENKKHVKVKNAYALEVEKCEKLSSELSICHKTIDNLRNENANLLAKVDSNVCDVSIPNPRSDNDDLLAKIEELNISLASLRDENEKLLAKAKDFDVCNATISDLRSKNDILHAKVVELKSCKPSTSTVEHTSICTRCRDVDINAIHDHMDLIKQQNDHIAKLDAKIAEHELENENFKFARSMLYSGRRPGIKDGIGFQQGGNVKLNAPPKKLSNFVKGKAPMPQDNEGYILYPVGYPESKIRRIHSRKSHSGPNHAFMYKGETSSSRQPTRAKLPKKKTPSASNDHDISFKTFDASYVLTNKFGKVYASGGSSWIIDSGCTNHMTGEKKMFSSYEKNQDPQRAITFGDGNQGVTVFRRSDDSIAFKGVLEGQLYLVDFDRAELDTCLIAKTNMGWLWHHRLAHVGMKNLHKLLKGEHILGLTNVHFEKDRICSACQAGKQVGAHHPHKNIMTTDRPLELLHMDLFGPIAYISIGGSKYCLVIVDDYSRFTWVFFLQEKSHTQETLKGFLRRAQNEFGLRIKKIRSDNETEFKNSQIEGFLEEEGIKHEFSSPYTPQQNGVVERKNRTLLDMERTMLDEYKTSDQFWAEAVNTACYAINRVFGSKCFILIKRGRKSKFAPKTVEGFLLGYDSNTRAYRVFNKSSGQVEVSCDVVFDETNDSQVEQVDLDEIGEEEAPCIALRNMSIGDVCPKEPEEPPSAQDQPSSSTQASPPTQNEDEAQSDEGENQANEPPQDDDNDQGGDANDQDKEDEEPRPPHPRVHQAIQRDHPVDTILGDIHKGVTTRSRVAHFCEHYSFVSSIEPRRIEEALQDSDWVVAMQEELNNFTRNEVWHLVPRPNQNVVGTKWVFRNKQDEHGVVTRNKARLVAKGYSQVEGLDFSETYAPVARLESIRILLAYATYHGFKLYQMDVKSAFLNGPIKEEVYVEQPPGFEDSEYPNHVYKLSKALYGLKQAPRAWYECLRDFLITNGFKVGKADPTLFTKTLENDLFVCQIYVDDIIFGSTNESTCEEFSRIMTQKFEMSMMG

SEQ ID NO: 10575 - protein, 192 aa, Zea mays
  Clone ID: TF_ZmC685828_1.pep
AFRSSTRADALCRFYLGLRRDIQDIMDYKEFNTVNKLFQFAMLAETELQGRQHRPRATFGASSTSRTHTPASSHTPSTTPASTRPPSTPAAHVGNLPLQVPTKKHNSLAPAATSSGRSSGIVCHRCHGIGHVKKDCPSQRTYIATDDGYISTSDAEGDDDDSSDVAANDDAMLGADAIVNLRSIMVQRVLSS

SEQ ID NO: 10576 - protein, 551 aa, Zea mays
  Clone ID: TF_ZM3671.C11.o6.fg.pep
MPATRIVSLRLQSTLLKKGDRLNFNFNRGPERFNRGPGQVQPGSREVQPVSRESSAGVFSQDLTDVDPRAIDLAMRIAERMFLKMKEDEAKNKIEEENDRWRPNDESTSSQGLSFKSTSHMCFIANGSDSESESEDEEEQESDSEDEDDLQQFFAQLSKKNRMSLLKLMKRAEEQKEMLHKQEDFLIRKIEDLEKLTKEHEKLKCSHDGLVQRYEDISIEKIRAINHSSYIAQLENKNVMLKNTIEKLNIENLALQEKHDMLVCSHNKFIDSHIMLEMAHEVVLTNLKSYQPHICTCTQVETILSCANKCCSQESQSSIELEISGISDISITQENKELKEEVGRLRRSLTLLKGKCHAQPSQDNRDNMVKKLEKGTTVACTKPLQRNTKLSKKGMSKIYGKKLNAHTICSNNVPMCFNKERSKRSDRRCYGCKEKGHEIDSCPHMKNQDLARSRKMTIKKDESRRQMHCKDKHRICYSCREKGHLFKVCPKGKIPKPNLSIHSDMLRRPKFDSCARKVMSSPHSRTKAIWVPKSLLANHDGPIMRWVPKYT

SEQ ID NO: 10577 - protein, 1325 aa, Zea mays
  unsure (1)..(1325): unsure at all Xaa locations
  Clone ID: TF_ZmC36654_1.pep
MLISQIAQMKPLDGSNYHSWREDIDMITTVGEIDYALRFDKPVEPTVGTPNYDHRWMQYSIDKVKWERSNDKCMIILKRSIKEPLKSSIPECETAKEYLERVASHHQGSSKAYACYLMTEFVNAKYDGNGVRPFIQKMISIVAKINKYLGSPLHEEFVVFMIMKSLPKEFETFHIQYNTSVTDKWNIDQLLAQCVQEEERLKQTGDSVNLIKGNVPRQNKNSKKMFKKQGKQNNQASSSNNNQPRQGGSFSVPPDTCLYCKKTGHYKRKCPEFLQYLLESGKDQVTFVNESLYLEYPSYSWWIDSGATVHVANSLQGLRTSQRLPKGRRTIRVANGVEAAVEAIGDIHLKLVNGFVLLLRDVLYVPSLRRNLISVSRLDDQHIHCHFGDRQCVIQFDNKDVGLAIRRDMLYLLSQSDVVNVLDIPENDPASSGRKRKRSDGETSSKLWHYRLGHISXXRIESLVKEQILHPLDFTDLEQCRDCIKGKFAKQIKKDAKHSTRVLEIIHTDICGPFPVRTVDGFNSFITFTDDYSRYGYIYPIKERSEALDKFKQFKAEVENQHDLKIKIVRSDRXXXYYGRHTEYGQVPGPFARFLRENGIVAQYSTPGXXXXXXXXXXXXXXXXXXXXXXXSYSNLPLGLWMEAXXXAMHILNRVPSKSVARTPYELWTGRKPTLNYFHIWGCPAEARIFNPGQGKLDERTTSCHFIGYPDRSKGYRFYCPDRQTKFIETRHAIFLEDDMIKGSKVLREVDLQEKRIYVPFPMVEEPHFSIPTVVTPTVTPTVGETPAANVASSSATTTEQVASPSAHIGPEPVAQDSSEDDDSVAPSDAPLQEPQVESEPEPSLRRSQRLRKSAIPDDYEVYAAENIECDEIHMSEDIDTEGDPTXXXXXXXXXXXXXXXXXXXXXXXXXXXXXXXXXXXXXXXXXXXXXXXXXXXXXXXXXXXXXXXXXXXXXXXXXXXXXXXXXXXXXXXXXXXXXXXXXXXXXXXXXXXXXXXXXXXXXXXXXXXXXXXXXXXXXXXXXXXXXXXXXXXXXXXXXXXXXXXXXXXXXXXXXXXXXXXXXXXXXXXXXXXXXXXXXXXXXXXXXXXXXXXXXXXXXXXXXXXXXXXXXXXXSYVLGIEIRRDRQKGVLGLSQKSYIENVLKRYNMHKCNASPGPIVKGDKFGEYQCPKNQYEXXKMKSVPYASAIGSIMYAQVCTRPDLAFTTGMLGRYQKNPGIEHWKAVKKALRYLQGTKGLMLTYRRSNSLQIVGYADADWGGCRDTLKSTSGYVFMLSXXAISWKSCKQTARASSTMHAEFVATYEATGQAIWIKKFVPGLRVVDSIE

SEQ ID NO: 10578 - protein, 222 aa, Zea mays
  unsure (1)..(222): unsure at all Xaa locations
  Clone ID: TF_ZmC36654_4.pep
EFVVFMIMKSLPKEFETFHIQYNTSVTDKWNIDQLLAQCVQEEERLKQTGDSVNLVKGNIPRQNKNSKKKFKKQGKQNNQASSSNNNQPRQGGSFSVPPDTCLYCKKTGHYKRKCPEFLQYLLESXGLRTSQRLPKGRRTIRVANGVEAAVEAIGDIHLKLVNGFVLLLRDVLYVPSLRRNLISVSRLDDQHIHCHFGDRQCVIQFDNKDVGLAIRRDMLFF

SEQ ID NO: 10579 - protein, 489 aa, Zea mays
  Clone ID: TF_ZM4446.C1.o1.fg.pep
MSSDSDLFVDAHDLWTKVKLKIFKSICTTSAPSIAGSTNLSKGEEQERWTPNDGSTSPTGSSPTSYTCLVANDESGDESDDEEEYEDEESTSSQGTFSCFASTDNNDRENETDDVEEEEIRHFYTHLNKEDKALLVKLLRRIKEQSETLLRLEETLIKTNDSLEKMTKEHEELKCSHDDLVQQYDSVLIEQRNNDDDLSCVAQLKMENAMLERQVELLNLEKLALGEKYDMLSYSHNKLVDDHIMLDIAHEVVITSLNLCEPHSCTCAHLDNISPCANPCCSKESQCLNEHQATGSKEKLLINKERNKKAKQLRRRRRAQDIYKHVVNKLEEEGTAARVKLCEKEAPKNKKRRGKRRCFKCNESSHLIASCPYKDKDEGMRRCFGCNDKDHMITSCPLMKNQRRTPSKMTLTKEKDKQQVSCQVERHFCYMCGERGHLSKSQGGKGKMSKKWKNQDLGTSISQVFGILSSTRQGQDKGSGTSVKELPRD

SEQ ID NO: 10580 - protein, 187 aa, Zea mays
  Clone ID: TF_ZmC1239986_1.pep
MPRILASGKAEVGADRTPDFQLSCKPEGDLNSGNVWSHRRAAGLDAAPRLNGQRPYPAASDGIEGDWSVVRPRYWWRKSWTSTERTRQYHQFDVKGTGLFKLKLKGKCYNCFSPDHLAFCCQAPSRCWLCLQSGHRARYCSRISYQGTFTAAGFFPKPVEQPSRTPTYHEARPWTDDLHKLEHCGRT

SEQ ID NO: 10581 - protein, 1697 aa, Zea mays
  Clone ID: TF_ZmC36592_163.pep
MENPWVIRTSYCSEEEGFPHLLRSCALRLGIRKKPEYVWKEYRENGMEKCSMAVYLGESRNYPNHPPFQITFIGHRFPDTCQSVARKALKQLCQNYSREIFETPLRYFPPSNKNTPTWKKRLQALSGGDPIEDDPTIVYMAGYLHTLDNHYDELSSHCTHLNSRVESLEQQVKELKQEKASLQESLSIVEGEEANTREAYRTLKIDFDKKLKTLAPRKKIQKKTTNQGCQTEKKKKKAPLALPPPRIDDWSDEEDVSLASLDDLLKAFGDTLDKELASTSKNALMASDKTTPTASGIGAGFPRRAEGEVVREESETHLPAPPPLPLDLAQVLANQTRLIEVLTRNLENQRPNGGRPQDKMGDFLRLKPPTFAGSSNPLDADDWMRTIKRKLEAIGCPENQRVQLAAHQLSGMALAWWDTFNVTIRDATWAEFEAAFREHHVPQGLFMELARYAPDDVSTESKKMARFLKGLRPELKTILASQDFLNFSHLSNKAMQVERAKEEEKGHLKRKFQVLRAQQQDRHQKTRSFGFPPKGPNFSRPAGPTPSRFSQQSQSSFHSPSVASNQPPANACWHCGDPSHLKNNCPQLKPPGPAYSNSVNGPKNTSASAPKAPSVVSQQNKTPYQGRARVNHVDAQEAQQAPGVVLGEFLVEFTPATVLFDSGASHSFIATSFVEKYGIPSTPLEIPLVTRTPGSDLLCQLKCSQVRILLSGVVFLADLTVLPSKGIDVILGMDWLAKHKGIISCADKTVLLTDQQGKSVSCQAQPPASDLMMFNLITESISVVEEFMDVFPEELSGMPPEREVEFYIDLIPGTAPIAKRPYRMAPTELAELKLQIADLQQKGYIRPSSSPWGAPVLFVSKKDGSMRMCIDYRSLNEVTIKNKYPLPRIDDLFDQLQGAKYFSKIDLRSGYHQLRIKEADIQKTAFVTRYGQYEFTVMSFGLTNAPAFFMNLMNKVFMEELDKFVVVFIDDILIYSKNREDHKRHLRIVLGKLRAHQLYAKLSKCEFWLEKIAFLGHILTAEGIEVDPSKVEAVSKWRQPTNVSEVRSFLGMAGYYRRFIKGFSSIARPMTELLKKDHKFVWTPKCEGSFQIIKEKLTTAPVLSLPDIHQDFVVFCDASRQGLGCVLMQNEKVIAYASRLLKPHEQNYPTHDLELAAIVHALKIWRHYLIGNKCHIFTDHKSLRYIFTQPDLNLRQRRWLELIKDYDLEIHYHPGKANVVADALSRKPFGIKGTNFLEDWKKESAQLNACLGINDSLEVKPMLEDLIGKAQRLDSETARLVEKARKEQLPDLRTDDQGVLWFKHRLCVPKGEAREVLLKEAHDSAYSIHPGTTKMYLDLKTRYWWKGMKKEIAQYVARCDICQRTKAEHQKPAGLLQPLPIPEWKWEEIGMDFVTGLPQTQKGNDSIWVIIDRLTKVAHFIPVKTTFGGATLARIYLKEIVRLHGIPRKIVSDRGTQFTSKFWTSLQKAMGTKLDFSTAYHPQTDGQTERVNKVLEDLLRAYPSHVVQRGGKALEGPAFVKEAEEKVALIRRRLLEAQSRQKSYADNRRRELRFEEGDFVYLKVSPMRGVRRFQVKGKLAPRFVGPYPIIGRVGPAAYRLELPESMSDIHNVFHVSQLRKCLQAPESHLEEETVQIQKDLQYREKPVKVLDSAIRKTRTSEVKLCKVQWSREGEEEATWESEDFLRREYPYLFPNPV

SEQ ID NO: 10582 - protein, 1653 aa, Zea mays
  unsure (1)..(1653): unsure at all Xaa locations
  Clone ID: TF_ZM5033.C2.o1.fg.pep
MDPRGKGMVVNDKEKESFVNDPKDDKPTDSALAHKRKDERKKKTRRIKEIVYYNSDESSSSQKDDDIDYEKKKTFQCSFAFHSPRKTPHFDGEDYGFWSHKMRSHLFSIHPSIWEIVENGMHFDSTDSPMFINEQIHKNAQATTVLLASLCRNEYHKVSGLDNAKQIWDTLKISHEGNDVTMLTKMELVEGELGRFAMIRGEEPTQTYNRLKTLVNKIRSYGSTRWTDHDVVRLMLRSFTVLDPHLVNNIRENPRXHQDDTRGDTWKVXSGRMMIKEARYVDDALNGPIQEPQTIALKATRSKEALPSKVAQVEAAGLNNEEMALIIKRFKTALRGRKEHPNKTKTKGKRSCFKYGKIGHFIANCPDNDSDQEQGNKREKKKAYKKAKGEAHLGKECDSDCSSSDSDNEGLAATAFNKSALFPNEHHTCLMAREKKVSTRDTSTYASSSDEESSDDEIDYSCLFKGLDRTKVDKINELIDALDDKNRLLEKQEDLLYEEHDKFVEAQKSLALEIKRNEILSCELSSCHDSISSLKSINDDLNAKLEVATKSTSCVEHVAICNRCKDFNIDACSEHLVCISKLNDEVAILNAQLKTSKNDFDKLKFARDAYMIGRHPSIKDGLGFKREVKNLTSHKAPISIKEKGKAPMANSIQKNHAFLYHDRKYSTNVHHDRSCNDVVSHAYDSNAMFASSSSMMYDRSLARKNVYASRGSSWIIDSGCTNHMMGKKRMFSSYVKNKDSQDSIIFGDGNQSKVKGLGKIAISSEHSISNVFLVESLGYNLLSVSQLCNMGYNCLFTNVDVFVFRRSDGSLAFKGVLDDKLYLVDFAKEEAGLDACLIAKTSMGWLWHRRLAHVGMKNLHKLLKGEHIDLVQLVKQDKSETQGTLKRFLRRAQNEFELKVKKIRSDNGSEFKNLQVEEYLEEEGIKHEFSAPYTPQQNGVVERKNRTLLDMARTMLGEFKTPERFWTEAVSTACHAINRVYLHRLLKKTSYELLTGNKPNMSYFRVFGSKCYILVKKGRNSKFAPKAVEGFLLGYDSNTKAYRVFNKSSGLVEVSSDVVFNETNGSPREQVCDLDDADEEDVPTTAIRTMAIGDVRPQEQNERDQPSSSTMVHPPTQDDEQVHQEEACDQGGAQDDHAMEEEAQPAPPTQVRAMIQRDHPVDQILGDISKGVTTRSRLVNFCEHYSFVSSIEPFREELNNFKRNEVWTLVPRPKQNVVGTKWVFRNKQDEHGVVTRNKARLVAKGYAQVAGLDFEETFAPVARLESIRILLAYATHHSFRLFQMDVKSSFLNGPIKEEVYVEQPPGFEDERYPDHVCKLFKALYGLKQAPRAWYECLRDFLVANAFKVGKADPTLFTKTCDGDLFVCQIYVDDIIFGSTNQKSCEEFSRVMTQKFEMSMMGELSYFLGFQVKQLKDGTFISQTKYTQDLIKRFGMKDAKPAKTPMGTDGHTDLNKGGKSVDQKAYRSMIGSLLYLCASRPDIMLSVCMCARFQSDPRECHLVPVKRILRDLVATPCFGIWYPKGSTFDLIGYSDSDYAGCKVDRKSTSGQCCAQLLWMRQTLRDFGYNLSKVPLLCDNESAIRMADNPVEHSRTKHSDIRHHFLRDHQQKGDIEVFYVSTENQLADIFTKPLDESTFCTLRSELNVLDSRNLE

SEQ ID NO: 10583 - protein, 1360 aa, Zea mays
  Clone ID: TF_ZmC951_459.pep
MSGGSTKREIETGTSHGKAPSRESGAKRREESPPRVKSHWSGDKKKKMKKVVYYETNSLSPSTSSSDAPSITSKRHEHKKFKEYNKVQRLKSSKEIWDVLKTTHEGDEVTKITKRKTIEGELSRFFLNKGEEPQTMYNRLKTMVNQVRNLGSTKWDDHEMVKVILRSLVFRNPTQVQLIRGSKQIVNLEQGGTSTPEVQPIAFKATEEKKEESTSSRLPIDASKLDNEEMVLIIKSFRQILKQRRGKDYKPHSKRVCYKCGKASHFIAKCPMSSDSDRDNDKKGRKKEKKYYKKKGGDAHVCREWDSDMSSTESSSDEDATNIAVNKGLLFPNVGHKCFMAKDGKKKKVKSRASTKYTTSSDEGSSSEDEDNLLTFFVNLNMHQKEKLNELIGAIHEKDELLDSQDEFLIKENKKHVKGKAPMAQDNEGYILYPTGYLEHKIRRIHAKKYHSVSHHAFMYKNEASSSRHPTHVKMPKKKTPTASNEPNVSFKTFDASYVLTNKSGKVVAKYVGGKHKGSKTCVWVPKVYASGGSSWIIDSGCTNHMTGEKRMFSSYEKNEDPQRAITFGDGNQGVTVFRRSDDSVAFKGVLEGQLYLVDFNRAELDTCLIAKTNMGWLWHRQLAHVGMKNLHKLLKGEHILGLTNVYFEKDREKSQTQETLKGFLKRAQNEFRLRIKKIRSDNWMEFKNSQIEGFLEEEGIKHEFSSPYTPQQNGVVERKNRTLLNMARTMLDEYKTPDRFWAEAINTACYSINRFYLHRILKKTSYELLTGKKPNVSYFRVFGSKCFILVKRGKKSKFAPKAVESFLLGYDSNTRAYRVFNKSTGLVEVSCDIVFDETNGSQVEQVDLDELHDEEAPCVLLRNMSIGDVCPKESEDPLIHKINHHLPIKHPHQLKMRIGLKAMKMKIKNMSHLKRRTKWVFHNKQDEHGVVTRNKARLVAKGYSQVEGLDFGETYAPVARLESIRILLPYATYHGFKLYQMDVKSAFLNGPIKEEVYVEQPPGFEDSEYPNHVYKLSKALYGLKQAPRAWYECLRDFLITNGFKVGKVDPTLLTKTIAKDLFVCQIYVDDIIFGSTNKSTCEEFSRIMIQKFEMSMMGELKYFLIFQVKQLQEGTFISQTKYIQDILTKFGMKDAKPIKTPMGTNGHLDLDTGGKSVDQKVYWSMIGSLLYLCASRPDIMLSVCMCARFQADPKEVHLRAVKTIMRYLVYTPKFGLWYPKGSTFDLIGYSDADWAGCKIDRKSTSGTCQLLGRSLMSWASKKQNSVAFSTTEAEYIAVGHCCAQLLWMRQTLRDYGYKLSKVPLLCDNESATRMADNPVEHSRTKHIDIRYHFLRDHQQRGDLEIAYVSTKEQLADIFT

SEQ ID NO: 10584 - protein, 1062 aa, Zea mays
  Clone ID: TF_ZmC119_1382.pep
MDPKGKGMVVNDNEKESIFNEPRDDKVNDSSSSQKKKDGKKKRRIRKVVYYDSDESSSSQKDDEYEEKKKMVNSNFSFDYSRILHNSNAHLLSIPLGKPPHFDGEDYGFWSHKMRSHLFSLHPSIWKIVENRMQFDSSDNSMFINEQIHKNAQATTVLLTSLCREEYNKVSDLDNAKQIWDTLKISHEGNDVTMLTKMELVEGELGRFAMIRGEEPTQTYNRLKTLVNKIRSYGSTRWTDHDVVRLMLRSFTILDPHLVNSIRENPRYTKMTPEEILGKFVSGRMMIKEARYVDDALNGPIHEPQTIALKATRSREALPSKVAQVEAAGLNEEEMALIIKCFKTALKGRKEHPNKSKTKGKRSYFKCGKVGHFIANCPNNDSDQDQEKKREKKKTYKKAKGEAHLGKEWNSDCSSSDSDDEGLAASAFNKSSLFPNEHHTCLMAKEKKVSTRNNTTYASSSDDESSDDEIDYACLFKGLDRTKIDKINELIDALNEKNRLLEKQEDLLYEEHDKFVSVQNSLALEVKRNEMLSRELSTCHESISSLKSINDDLNAKLEIANKSTSYEEHVVICNRCKDFNVDACSEHLVAISKLSNEVTSLNAQLKTSKNEFDKLKFVRDAYTIGRHPSIKDGLGFKREAKNLTSHKAPIPAKEKGKAPMANSAQKNHAFIYDRKFSRNVHHDRSCNAYDSNAMFASSSSYVHGRDMPKKNVIHHMPRRNVAQDPRKIVNEPSTIYHACNASFVICRKDKKVYASGGSSWIIDSGCTNHMTGEKKMFTSYVKNKDSQDSIIFGDGNQGKVKGLGKIAISSEHSISIVFLVESLGYNLLSVSQLCNMGYNCLFTNVDVSVFRRSDGSLAFKGVLDVKLYLVDFAKEEAGLDACLIAKTSMGWLWHRRLAHVGMKNLHKHLKGEHVLGLTNVTFEKDRPCAACQAGKQVGNAHHSKNVMTTSRPLELLHMDLFGPVAYLSIGGSKYGLVIVDDFSRFTWVFFLQDKSKTQGTLKRFLRRAQNEYELKVKKIRSDNGYEFKNLQAEEYCHTQVSGAPRPGREHNHQVCWDQVSHI

SEQ ID NO: 10585 - protein, 180 aa, Zea mays
  unsure (1)..(180): unsure at all Xaa locations
  Clone ID: TF_ZmC173187_1.pep
KTTVEVWASLKTRFVGADWVMTARLPTLKGEFDKLCMEDREQLDDYADKISGMSRVTSXLGTMLDDDAMVKKLLNTILDRLFPAVAGIEQFCNVEMMALEEALNGLKVFDERFRRRTRVGGKRREDQLLTEIEWKARQKPKSSIRRCFNCGIRSHFARDCHKPKKEEALLADDGEEATLL

SEQ ID NO: 10586 - protein, 182 aa, Zea mays
  Clone ID: TF_ZM3652.C7.o2.fg.pep
MGMILKINLMGVPLQVDDLFFNIDRKKQRKRGCFVCGEKGHFRDSCPTMVEHKKGRGKGKALTSVKTWDDSSSEEEPPRTRSHRSSSRSSRKCLMARGLLEKFETFANLNCELSTKIAQLESSAPSTATDDGLIKKNEKLKAKLSSSQEAIENLLGKMEILSINNNELTIKPENIGSTQGHL

SEQ ID NO: 10587 - protein, 551 aa, Zea mays
  Clone ID: TF_ZM4328.C2.o1.fg.pep
MSGDHAKREIVTDGNKSASSERTHSRESDHKHKEESSSSIKSQRRGDKKKKMKKVVYYETDSSSPSTSGSDSSSTTSKRHERKKYSKMSLRYSRISKRTPLLSVPLGKPPSFDVRNLGSTKWDDHEMVKVILRSLVFRNPTQVQLIHGDPRYKLMSPKEVIGKFVSFELMIKGSKQIINLEQGGTSTPEVQPVAFKATGEKKEESTSSRLPIDASKLDNEEMALIIKSFCQILKERKGKDYKPRSKKVCYKCGKSGHFIAKCPFSSDRSDDKRGKKKEKKRYYKKKGGDAHVCQEWDSDVGSTDSSDEDAANIAVNKGLLFPNVGHKCLMAKDGKKKKVERLNACIDSIVNLKNDNASLIAKIDKLNESISSLKIESDSLISKARDLNVCNDSISCLRNENATLHAKIEELKSCKPSTSTVTHVSICTRCRDINVDAIHDHLALIKEQNDHIAQLTTKINEHEIQNEKFKFARSMLYNGRRPGIKDGIGFQQGSNVKLNAPTRLSNYVKGKAIMAQDNEGYILYPDGYPEHKIRRIHARKSHSVSHHDFMY

SEQ ID NO: 10588 - protein, 513 aa, Zea mays
  Clone ID: TF_ZmC24260_18.pep
MSGGLRNESASKLEKVEIASTSSFGADVDPRAIDLAMRIAERMFLKMKEDEAKNKIEEENDRWRPNDESTSSQGSSFKSTSHMCFIANGSDSESESEDEEEQESDSEDEDDLQQFFAQLSKKHRMSLLKLMKRAEEQKEMLHKQEDFLIRKIEDLEKLTKEHEKLKCSHDDLVQRYEDISIEQIKVVNHSSYIAQLENKNAMFKNTIERLNIENLALQEKHDMLVCSHNKFMDSHIMLEMAHEVVLTNLKSYQPHICTCTQVETILSCANKCCSQESQSSIELEISGISDISITQENKELKEEVGRLRRSLTLLKGKCHAQPSQDNRDNMVKKLEKGTTVACTKPLQKNTKLSKKGMSKIHGEKINAHIICSNNVPMCFNKERSKRSDRRCYGCKEKGHEIGSCPHMKNQDLARSRKMTIKKDESKRQMHCKDKHRICYNCRERGHLFKVCPKGKTPKPNLSIHSNMLRRPKFDSCARKVMSSPHSRTKAIWVPKSLLANLDGPIMRWVPKCT

SEQ ID NO: 10589 - protein, 455 aa, Zea mays
  unsure (1)..(455): unsure at all Xaa locations
  Clone ID: TF_ZM4986.C1.o4.fg.pep
MDPKGKRMVVNDKEKESFLNEPRDDKPTDSGSSHKKDGKKKRRIKKIVYYDSDGSSSSPRDDDYDEKKKLYGSVFINEQIHKNAQATTVLLASLCRDEYNKVSGLDNAKQIWDTLKISHEGNDATMITKMELVEGELGRFAMIMGEEPTQTYNRLKTLVNKIRSYGSTRWTDHDVVRLMLRSFTVIDPHLVNLIRENPRYTKMTPEEILGKFVSGRMMVKEARYVDGALNGTMPIYEPQPVTLKATSSNREALPSKVAQVEATGLNEDEMALIIKRFKTALKGRKEHPNKSKAKGKCSCFKCGKTGHFIANCLDNANDQEQEKSRKREKKKAYKKAKGEVHLGKEWDSDCSSSDSDDEGLAASAFNKSSLFPXNERHTCLMAKEKXEHVVICNRCKDFDVDACVEHLTSITKLNGEVASLNAQLKTCKNDFDKLKFARDTYTVGRHPSIKDGLGF

SEQ ID NO: 10590 - protein, 120 aa, Zea mays
  Clone ID: TF_ZM4874.C3.o1.fg.pep
MALIIKRFKTTLKGRKEHPNKNKTKGKRSCFKCGKIGHFIANYPDNDSDQEKKSGKWEKKKNYKKAKGEAHLGKEWDSDCSSSDSNNEGLAATAFNKSSLFPNEHHTCLMAREKKVLMMI

SEQ ID NO: 10591 - protein, 1496 aa, Zea mays
  unsure (1)..(1496): unsure at all Xaa locations
  Clone ID: TF_ZM5039.C4.o3.fg.pep
MDPKGKGMVINDKEKESFINEPKDDKPTDSGSSHKKKDGKKKRRIKKIVYYDSDESSSSQRDDDDKKKKTVNSNFSFDYSRIPQNSNAHLLSIPLGKPPHFDGEDYGFWSHKMRSHLFSLHPSIWEIVENGMQFDSTDNPMFINEQIHKNAQATTVLLASLCREEYHNISHEGNDATMITKMELVEGELGRFAMIRGEEPTQTYNRLKTLVNKIKSYGSTRWTDHDVVRLMLRSFTVLDPHPVNSIRENPRXHQDDARGNTRKVXSGRKMIKEARYVDEALNGPMPIHEPQTVALKAISSREGLPSKVAQVEAAGLNEDEMALIIKRFKTVLKGRKEHPNKSKTKGKRSCFKCGKIGHFIANYPDNNSDQEQGKNGKRENKKVYKKAKGEAHLGKEWDSDCSSSDSNDEGLAATAFNKSSLFPNDHHTCLMAKEKKVSTRNTIAYASSSDDESSDDEVDYASLFKGLDRTKIDKINELIDALNEKNRLLERQEDLLYEEHDKFVYASGGSSWIIDSGCTNHMTREKKMFTSYIKNKDSQDSIIFGDGNQGKVKGLVKIAISSEHSISNVFLVESLGYNLLSVSQLCNMGYNCLFTNVDVSVFRRSDGSLAFKGVLYDKLYLVDFAKEEAGLDACLIAKTSMGWLWHRRLAHVGMKNLHKLLKREHVLGLTNVTFEKDRPCAACQAGKQVGSSHHSKNVMTTSRPLELLHIDLFGPVAYLSIGGSKYGLVIVDDFSRFTWVFFLQDKSETQGTLKRFLRRAQNEFELKVKKIRSDNGSEFKNLQVEEYLEEKGIKHEFFAVYTPQQNDVVERKNRTLIDMARTMLGEFKALERFWSEAVNTTCHAINRVYLHRLLKKTSYELLTGNKPNVSYFRVFGSKCYILVKKGRNSKFAPKAVEGFLLGYDSNTKAYRVFNKSSGLVEVSSDVVFDETNGSPSEQVDIDDVDEEDVPTAAIRTMAIGDVRPQEQKEQDQPSSSTMVHPPTQDDGQAHQEEACDQGGAQDDHVMEEEAPQAPPTQVRATIQRNHPVDQILGDISKGDEHGVVTRNKVRLVAKGYAQVVGLDFEETFAPVARLESIRILLAYAAHHSFRLFQIDVKSAFLNGPIKEEVYVEQPPGFEDERYPDHVCKLSKALYGLKQAPRAWYECLRDFLIANAFKVGKADPTLFTKTCDGDLFVCQIYVDDIIFGSTNQKSCEEFSRVMTQKFEMSMMGELNYFLGFQVKQLKDGTFISQTKYTQDLIKRFGMKDAKPAKTPMGTDGHVDLNKGGKSVDQKAYRSMIGCLLYLCASRPDIMLSVCMCPRFQSDPRECHLVAVKRILRYLVATPCFGIWYPKGSTFDLIGYSDSDYAGCKVDRKSTSGTCQFLGRSLVSWSSKKQNSVALSTAEAEYVVAGQCCAQLLWMRQTLRDFGYNLSKVPLLCDNESAIRMADNPVEHSRTKHIDIRHHFLRDHQQKGDIEVFYVSTENQLADIFTKPLDESTFCRLRSELNVLDSRNLD

SEQ ID NO: 10592 - protein, 114 aa, Zea mays
  Clone ID: TF_ZmC18109_16.pep
SFAARAPKTLAPADRGAPLVPATRIKDGSAGASGMVSKSGGKDGSRLNGCSSRASLTSMPPSVKTECEILQSANVKIFTFNNLKAAIGNFVFARFRVLQTYPLNKNLVLEIKKG

SEQ ID NO: 10593 - protein, 519 aa, Zea mays
  unsure (1)..(519): unsure at all Xaa locations
  Clone ID: TF_ZmC824_1.pep
MIHIVMDIFEIMISMINYLLYVIIIMLIYGIKMIWKMPIILTHQKPNVRHFSVSGFAAVLKPDPFDGKNFLIWKAKMVLWLTVMSCFHAAEGKPVNLPPEDEAKFKAEDNLFRGAVISALDTKFQKSYIILPTGKELWNALIGXFGVTDAGSELYLMXQLYDYKMVENRSVVEQAHEFQALAKQLKLFPCPLPHKFVAGGIIAKLPPSWKDFATSLKHKRQEFNVEELIGTLDVEERARTKDSGKGVETSTANVVQKRNFRKFNKKKNQNKQENTNKPVQTAQFKKKKNNNKGKGGCFVCGSDQHWARECPDRKFTHDKKSANVVTTETGDETSGYGNSLPFVLSVCNSPEWWMDSGANIHVCADASMFSSYQVGRSGALLMGNGSHAHVLGVGTVILKFTSGKTVPLKSVQHVPFIKKNLVSASMLCRDGYKVVLESNKCVMSKHGTFVGKGYDCGGLFRLSLHDVCNKMVNSVIRDVPFITHSWMAKFLLCRSVVNSAACFYGLFWTCAFIVSSVCA

SEQ ID NO: 10594 - protein, 262 aa, Zea mays
  unsure (1)..(262): unsure at all Xaa locations
  Clone ID: TF_ZM4511.C1.o4.fg.pep
MRTIDSQLEQILDKSIIPSSYDKKNASEEDQRCIRLYYLAYDILSNSLSKEDYRAFIMRYDEPIHDAHDIWTKIKSKFNESKHVSSYDASTSFSPCETNPLKEKEENERWRPNDESTSPKASKSSFELEFLGIKDDTCQELKEENERLRTSLTQLKGKCTAQPSQDNRDYMVKKFEIGTTVACTKSLEENVKDLRNXSRGRNKRRKSIPLPKTSTKCSECFEKGHFIRSCPYIKENGLILNKDDKRCFKCSKKGHLVKSFPM

SEQ ID NO: 10595 - protein, 1159 aa, Zea mays
  Clone ID: TF_ZM5032.C3.o6.fg.pep
MPPRTRKTVRKSTGPIGVPRHQLAPRHEDSSSGSNDPIGDLEAQVEQLRTELCHRNNVWVEDDELAERDLALDWAVNSHSIAWDKEAKARARVAELSTAVDNLQILSEWELDLLVQRVKPLAEDPLEADEWIRVIEQKFGLLRCTETQKPLFAAQQLRGPASTWWGNYVAIQPAGHQITWDKFRLAFREHYIPEGVLHMKQEEFMKLKQGGTVSQQVQPFVPQKMVTYLDLSYSRAVSTALAVEAKYAGPGKSKGYGGDRPNQGPEKRQRLVIRPFNQNCSSPRPPSYPFKQPVFICPATTPTSTNQPSAPGTRFPALPSSSTGCFNYGKSGHFIKDCPYPKKNRSNDQQSSGSSAQGKGNPANNTSGKNMKKTGRIYYMQMATTPEGEPVLLGTFLMANHPAVILFDSGASHTFISKKFVEQHCIPYNESREGFIIHSPGGQIFTKEVDFHVPVTLAERDFPTNMIVLKGQDIDVILGMNWLAQHKAILNTDLRSIRLSYGQEEVLLSIPVAIPAKPIGRVYEAIIPEIQDIPVVCEFSDVFPEDLPGLPPERDVEFVIGLKPAIFVKKKDQTLRMCVDYRPLNEVTIKNKYPLPRIDILFDQLTGARVFSKIDLRLGYHQIRIRPEDIPKTAFTTRCDEAFEQLKVLLTTAPVLAQPDIEKPFDVYCDASDHKSLKYIFTQSELNMRQRRWLELIKDYELEIHYHPGKANVVADALSRKAFYHCLTMKTSDITLCQEMEKLDLGMIQHETSNHLKLESVLLQRIIDAQRKDEGMKHIHEKMEAGKANCFRRDNQGVVWFNNRIVVPKNDEIRQQILDEAHLSRYFIHPGSTKMYHDLKQHYWWTKMKIEIARYVAKCNTCRRVKAIHMKTAGPLQSLPIPTWKWEDISMDFIMGLPRTAKGYDSVWVIIDRLTKIAHFLPVKVKYPVIAYAELYIARILSLHGVPKTIVSDRGPQFLSKFIEELHKSLGERCFFRSDMEKETEEKVRRIIHNLKEAQARQKSYADKRRQPLHFKVEDHVYLKVSPMKGVSRFGVKGKLAPRYIGHFPILERYGPVAYRLQLPETLSAVHNVFHVSQLKKCLRVPDRTIEVTDVALELDLTYSKHPVQVLDQKDRISQRKTLKFYKIQWNQHTEDEATWETQDFLDKNFPGFIASCKL

SEQ ID NO: 10596 - protein, 355 aa, Zea mays
  Clone ID: TF_ZmC1324486_2.pep
MSTKEFEELALDGHNYPTWASDIEITFASRGIIDAIAAPITGTDPVNEVKKNTALFLLRLYIHKDLKQEYLMERCPHNLWKALKERYEQQKELIWPSANHEWNHLRLQDFKSVAEYNHALHSICSKLKFCEKEPSEADKIEKTLSTMLPEDRILHQQYRSSNFQRYSQLMHTLTQAEKHHELLLKNAQQRPPGSAPLPEVHFNVHKTENKKGFKKNFKNPPGSRKFKKNKFHKKGKGKGKGNDKPLPSKGNRACLKCGTEGHFARDCTCPKHLVLLYQQSLKKPKSDKPGFEAHFNSTEAPIEVGSSSLASGDLKNTLAKEHLNVVDNKPPLLQEDESDDMIIEYMSKDPFGDLA

SEQ ID NO: 10597 - protein, 547 aa, Zea mays
  Clone ID: TF_ZM4353.C2.o2.fg.pep
MSGDHAKREIVTGDKAKSSGRKNEWTPSRESSDKYKEESASSIKSHRKGKPPYFDGKDYCMWSDKMRHHLTSLHESIWDIVEFEVQAPQVGDEDYDSDEAIQIRHFNSQETSILLASLCREEYNKMQGLKNAKEIWDVLKMAHEGDKVTKVPKRETIEGELSRFILNKGEEPQAKYNRLKTMVNQVRNLGSTKWDDYEMVKVILRSLVFLNPTQVQLIYGDPRYKQMSPEEVIGRFVSFELMIKDSKHIVNLEQGATSTLEVQPVAFKATEENKEESTRSRLPIDASKLDNEEITLIIKCFRPILKQKKGKDYKPRSKRLCYRCGKSGHFIAKCPYTTDSDRDDDKKGKKKMEKKRYYKKKGGEAHIGREWDSDESSTDSSDDKDATNIAINKGLLFPNISHKCLMAKNDKRKKVEKCENLSKELNICNDSISCLRDENASLNAKIEELNACNISTSTVEHITICTRCRDVNIDAIDDHLTIIKEQNDHIAKLNAKIAEHELENENFKFDCSMLYNGRHPGIKDGISFQQGSQSNTKLNAPKNRLSN

SEQ ID NO: 10598 - protein, 491 aa, Zea mays
  Clone ID: TF_ZM4678.C6.o4.fg.pep
MDVDLEAPPPPPPTAAAVTRRSPSPSAPMVVGTIAARRGEPHAPSMLRADASSSLAIAQMGWPHLPPPMGGPNGPRSGRHDGRLGGGGGEEARPLRGQWRSALSAALLLDVEQWAGGGSARPEVGPGAACPAERRRRHRPAVRGRGGLAESATSSPSADGEGGSTGTRAMAALGAGKDRHDGHAGPLPPRRGRLHGGATGAQERSLAAAGAGRSLLAPPPGGNMSTKEFEELALDGHNYPTWASDIEITFASRGIIDAIAAPITGTDPVNEPSEADKIEKTLSTMLPEDRILHQQYRSSNFQRYSQLMHTLTQAEKHHELLLKNAQQRPPGSAPLPEVHFNVHKTENKKGFKKNFKNPPGPRKFNKNKFHKKGKGKGNGKPLPSKGNRACLKCGTEGHFARDCTCPKHLVLLYQQSLNKPKSNKPGFEAHFNSTEAPIEVGSSSLASGDLKNTLAKEHLNVVDNKPPLLQEDESDDMIIEYMSKDPFGDLA

SEQ ID NO: 10599 - protein, 144 aa, Zea mays
  Clone ID: TF_LIB3068-010-Q1-K1-C8.pep
GRMMIKEARYVDDALNGPINEPQPFALKATRSKEALPSKVAQIEAVGLNEEEMALIIKRFKTVLKGHKGQPSKTKTKGKRSCFKCGKIGHFIANWPDNDSDQEKENKREKKKHYKKAKGQAHLGNEWASDCSSSDSDNEGLAAT

SEQ ID NO: 10600 - protein, 1429 aa, Zea mays
  unsure (1)..(1429): unsure at all Xaa locations
  Clone ID: TF_ZmC36592_178.pep
TRNSLAPRRTPSWLRIKPSLPPQGLEQGFPRRAEGEVDREESETHLPAPPPLPLDIAQVLANQTRLIEVLTQNLENQRPNGGRPQDRMGDFLRLKPPTFAGSSNPLDADDWMRTIKRKLEAISCPENQRVQLAAHQLSGMALAWWDTFNITIRDATWAEFEAAFREHHVPQGLVQLKEDEFRELTQDGRSISEYVHKFTELSRYAPDDVISEAKKMARFLKWLRPELKTILASQDFLSFSHLSNKAIQVERAREEEKGHLKRKFQVLRAQQQDRHQKTRSFGFPPKGPNFSRPAGPTPSRFSQQSQSSFHSPSVASNQPPVNACWHCGDPSHFKNNCPQLKPQGPAYSNSMNGPKNTSAPAPKAPSAVSQQNKTPYQGRARVNHVDAQEAQQAPGVVLGEFLVEFTPATVLFDSGASHSFIATSFVEKHGIPSTPLEIPLVTRTPGFDLLCQLKCSQVRILLSGVVFLADLTVLPSKGIDVILGMDWLTKHKGIISCADETVLLTDQQGNISVVEEFMDVFPEELPGMPPEREVEFYIDLIPGTAPIAKRPYRMAPTELAELKLQISDLQQKGYIRPSSSPWGAPVLFVSKKDGSMRMCIDYRSLNEVTIKNKYPLPRIDDLFDQLQGAKYFSKIDLRSGYHQLRIKEADIQKTAFVTRYGQYEFTVMLFGLTNAPAFFMNLMNKVFMEELDKFVVVFIDDILIYSKNREDHKRHLRIVLGKLRAHQLYAKLSKCEFWLEKIAFLGHILTAEGIEVDPSKVEAVSKWRQPTNVSEVRSFLGMVGYYRRFIKGFSSIARPMTELLKKDHKFVWTPKCEESFQIIKEKLTTAPVLSLPDIHQDFVVFCDASRQGLGCVLMQNEKVIAYASRLLKPHEQNYPTHDLELAAIVHALKIWRHYLIGNKCHIFTDHKSLRYIFTQPDLNLRQRRWLELIKDYDLEIHYHPGKANVVADALSRKPFGIKGTNFLEDWKEESAQLNACLGNNDSIEVKPMLENLIRKAQHLDPETARLVEKARKEQLPDLRTDNQGVVWFKHRLCVPKGEAREVLLKEAHDSAYSIHPGTTKMYLDLKTRYWWKGMKKEIAQYVARCDICQRTKVEHQKPAGLLQPLPIPEWKWEEIGMDFVTGLPRTQKGNDSIWVIIDRLTKVAHFIPVKTTFGGATLARIYLKEIVKLHGIPRKIVSDRGTQFTSKFWTSLQKAMGTKLDFSTAYHPQTDGQTERTPLMWSNVGEKALEGPAFVKEAEEKVALIRRRLLEAQSRQKSYADNRRRELRFEEGDFVYLKVSPMRGVRRFQVKGKLAPCFVGPYPIIGKVGPAAYRLELPESMSDIHNVFHVSQLRKCLQAPESHLEEETVQIQKDLQYHEKPVKILDLAVRKTRTSEVKLCKVQWSREGEEEATWESEDFLRREYPYLFPNXSKSRGRDSFKWVGL

SEQ ID NO: 10601 - protein, 1548 aa, Zea mays
  Clone ID: TF_ZM3657.C15.o1.fg.pep
MEDSLAIRTSYCSEVEGFPHLLRSCALRMGIRKKPEYVWTEHIEGGMEKCSMAVYLGESRNYPNHPSFQVTITGYRFHDTCQNVARKALRQLCQNYNKVIFETPLHYFPPSNKNTPTWRKRLQALSGGDPIENDPTIVYMAGYLHTLDNQYDDLALHCTSLTSRVESLEQKSLLMAEGEEANTREAYRTLKLDYDKKLKKLAPARKIRKKTKSQGCQTEQKEENPPRNPSDTEEMSLASLDDLLKEFGDTLEKEFGSTLDSTRMASDRTTPTASGIGARLPLGAEGEAGREGGETHLPAPPELPLDLAQVLANQTRLIEVLTRSLENQRPGGGRPQDKMGEFLRLKPPTFAGSSNPLDANDWLRTIKRKLEAIACPENQRVQLAAHQLSGMALAWWDTFSEAVRDATWAEFEAAFREHHFTELARYAPEDVSTEARKMARFLRGLRPELKTILASQDFHSFSHLSNKAIQVERAKEEEKGHIKRKFQVLRAQQQERHQRARPLGLPPRGPSFNKQSGPTPSRYSQQSQSSLQAPSVASNQPPANACWHCGDPSHFKNNCPQLKASGPTYSNSVNGPKIPSAPTPKALPSSSQQSRTQYQGRARVNHVDAQEAQQAPGVVLGASHSFIAAKFVEKHGIPSTPLAIPLVTRTPRSDLLCKLRCSQVRILLSGVVFLADLTILPSQGIDVILGMDWLAKHKGIISCASKTVLLTDHQGKAVSCQAQPPANDPMMFNLIAESMSVIKEFEDVFPEELPGMPPERGVEFYIDLIPGTAPIAKRPYRMAPTELAELKLQISELQEKGYIRPSSSPWGAPVLFVTKKDGSMRMCIDYRSLNEVTIKNKYPLPRIDDLFDQLQGAKYFSKIDLRSGYHQLRIKEADIQKTAFNTRYGQYEFTVMPFGLTNAPAFFMNLMNKVFMEELDKFVVVFIDDILIYSKSRKDHEHHLRIVLGRLRAHQLYAKLSKCEFWLEKIAFLGHILTAEGIEVDPSKVEAVSNWKQPSNVSEVRSFLGMAGYYRRFIKGFSSIAKPMTELLKKDNKFMWTPKCEESFQIIKEKLTTAPVLTLPDIHQDFVIFCDASKQGLGCVLMQNEKAIAYASRLLKPHEQNYPTHDLELAAIVHALKIWRHYLIGNKCHIFTDHKSLKYIFTQPDLNLRQRRWLELIKDYDLEIHYHPGKANVVADALSRKPFGVKGTNFLEDWKRESAQLNACLGDNGGLEVKPNLEDLICKAQRLDAETARLMGRARKEQLPGLRTDEQGVLWFKNRLCVPVGEARGTLLNEAHNSAYSIHPGTTKMYLDLKARYWWKGMKKEIAQYVARCDTCQRTKAEHQKPAGLLQPLPIPEWKWEEIGMDFVTGLPRSQRGNDSIWVIIDRLTKVAHFVPVKTTFGGAALARIYLKEIVRLHGIPRKIVSDRGTQFTSKFWKGLQQAMGTKLDFSTAYHPQSDGQTERVNKVLEDLLRACVLTFDRDWESSLPYAEFSYNNSHQASIKMSPFEALYGRKCQTPLMWSNVGERTLEGPDFVKEAEEKVALIRRRLLEAQSRQKSYADNR

SEQ ID NO: 10602 - protein, 1602 aa, Zea mays
  Clone ID: TF_ZM4489.C3.o4.fg.pep
MEASLAIKSSYCSEVEGFPRLLRSCALRMGIRKKPEYVWTEHLEGGMIRCSMAVYLGESQSYPNQRSFQVTFTEAHFLDACQNVARKALRQLCQNYNKVIIETPLRYFPPSNKNTPTWRKRLQALSGGDPIENDPTIVYMAGYLHTLDNQYDDLALHCTSLTSQVESLEQKVRELSEEKASLQENLSLAEGEEANTREAYRTLKLDYDKKLKKLAPARKTRKKTKSQGCQTEQQEENPPRNQSDPEDMSLASLDDLLLEFGDTLEKEFGGTLATLFPWHMASDRTTPTASGIGARLPLGAEGEAGGEGGETHLPAPPELPLDLAQILANQTRLIEVLTRSLENQRPGGGRPQDRMGEFLRLKPPTFAGSSNPLDADDWLRTIKRKLEAIACPENQRVQLAAHQLSGMALAWWDTFSEAIRDATWAEFEAAFREHHVPQGIVQLKEDEFRELTQGGRTVSEYVHKFTELARYAPEDVSTEARKMARFLRGLRPELKTILASQDFHSFSHLSNKAIQVERAKEEEKGHIKRKFQVLRAQQQERHQRARPFGLPPRGPSFHKQSGPSPSRFSQQSQSSHQAPSVASNQPPANACWHCGDPSHFKNNCPQLKAPGPTYSNSVNGPKVPSAPTPKALPSNSQQSRTQYQGRAREFEDVFPEELPGMPPEREVEFYIDLIPGTAPIAKRPYRMAPTELAELKLQISELQQKGYIRPSSSPWGAPVLFVTKKDGSMRMCIDYRSLNEVTIKNKYPLPRIDDLFDQLQGAKYFSKIDLRSGYHQLRIKEADIQKTAFVTRYGQYEFTVMPFGLTNAPAFFMNLMNKVFMEELDKFVVVFIDDIIIYSKNRKDHEHHLRIVLGRLRAHQLYAKLSKCEFWLEKIAFLGHILTAEGIEVDPSKVEAVSNWKQPSNVSEVRSFLGMAGYYRRFIKGFSSIAKPLTELLKKDNKFVWTPKREESFQIIKEKLTTAPVLTLPDIHQDFVIFCDASKQGLGCVLMQNEKVIAYASRLLKPHEQNYPTHDLELAAIVHALKIWRHYLIGNKCHIFTDHKSLKYIFTQPDLNLRQRRWLELIKDYDLEIHYHPGKANVVADALSRKPFGIKGANFLEDWKKESAQLNACLGDNGSLEVKPNLEDLICKAQRMDAETTKLMERARKEQLPDLRADNQGTLWFRDRLCVPVGETRETLLNEAHNSAYSIHPGTTKMYLDLKARYWWKGMKREIAQYVARCDTCQRTKAEHQKPAGLLQPLPIPEWKWEEIGMDFVTGLPRSQRGNDSIWVIIDRLTKVAHFIPVKTTFGGAALARLYLKEIVRLHGIPRKIVSDRGTQFTSKFWKGLQQAMGTKLDFSTAYHPQSDGQTERVNKVLEDLLRACVLAFDRDWESSLPYAEFSYNNSHQASIKMSPFEALYGRKCQTPLMWSNVGERTLEGPDFVKEAEEKVALIRRRLLEAQSRQKSYADNRRRELRFEEGDFVYLKVSPMRGVKRFQMKGKLAPRFVGPYPIISRIGPVAYRLELPESMSDIHNVFHVSQLRKCLKVPETRIKAEAIQIQKDLQYREKPVKILDSAVRRTRNLEVKLCKVQWSRDGEEEATWESEDFLRREYPYLFPNTV

SEQ ID NO: 10603 - protein, 1480 aa, Zea mays
  Clone ID: TF_ZM4715.C4.o1.fg.pep
MENPWLIRISYCSEEEGFPHLLRSCALRLGIRKKPEYVWKEYRENGIEKCSMAVYLGESQNYPNHPPFQITFIGHSFPDTCQSVARKALKQLCQNYSREISETPLRYFPPSNKNTPTWRKRLQSLSGGDPTEDDPTIVYMAGYLHTLDNHYDELSSHCTHLNSRVESLEQQVKELKQEKASLQESLNIAEGEEANTREAYRTLKMDYDKKLKKLAPKKKIQKKTTNQGCQTEKKKKKAPLALPPPRIDDWSDDEDVSLASLDDLLKAFGDTLDKEFATWWDTFNVTIRDATWAEFEAAFREHHVPQGLVQLKEDEFRELTQDGRSVSEYVHKFTELARYAPDDVSTESKKMARFLKGLRPELKTILASQDFLNFSHLSNKAMQVERAKEEEKGHLKRKFQVLRAQQQDRHQKTRSFGFPPKGPNFSRPAGPTPSRFSQQSQSSFHSPSVASNQPPANACWHCGDPSHFKNNCPQLKVPVPAYSNSVNGPKNTSTSTPKAPSAVSQQNKAPYQGRARVNHVDAQEAQQAPGVVLEELPGMPPEREVEFYIDLIPGTAPIAKRPYRMAPTELAELKLQIVDLQQKGYIRPSSSPWGALVLFVSKKDGSMRMCIDYRSLNEVTIKNKNPLPRIDDLFDQLQGAKYFSKIDLRSGYHQLRIKEADIQKTAFVTRYGQYEFTVMSFGLTNAPTFFMNLMNKVFMEELDKFVVVFIDDILIYSKSREDHKRHLRIVLGKLRAHQLYAKLSKCEFWLEKIAFLGHILTAEGIEVDPSKVEAVSKWRQPTNVSEVRSFLGMAGYYRRFIKGFSSIARPMIELLKKDHKFAWTQKCEGSFQVIKEKLTTALVLSLPDIHQDFVVFCDASRQGLGCVLMQNEKVIAYASRLLKSHEHNYPTHDLELAAIVHALKIWRHYLIGNKCHIFTDHKSLRYIFTQPDLNLRQRRWLELIKDYDLEIHYHPGKANVVADALSRKPFGIKGTNFLEDWKKESAQLNACLGNNDSLEVKPMLEDLICKAQRLDSETARLVEKARKEQLPDLRTDDQGVLWFKHRLCVPKGEAREVLLKEAHDSAYSIHPGTTKMYLDLKTRYWWKGMKNEIAQYVARCDICQRTKAEHQKPAGLLQPLLIPEWKWEEIGMDFVTGLPRTQKGNDSIWVIIDRLTKVAHFIPVKTTFGGATLARIYLKEIVRPHGIPRKIVSDRGTQFTSKFWTSLQKAMGTKLDFSTAYHPQTDGQTERVNKVLEDLLRACVLAFDRSWESSLPYAEFSYNNSYQASIKMSPFEALYGRKCQTPLMWSNVGGKALEGPAFVKEAEEKVALIRRRLLEAQSRQKSYTDNRRRELRFEEGDFVYLKVSPMHGVRRFQVKGKLAPRFVGPYPIIGRVGPAAYRLELPESMSDIHNVFHVSQLRKCLQAPESHLEEETVQIQKDLQYREKPVKILDSAVRKTRTSEVKLCKVQWSREGEEEATWESEDFLRREYPYLFPNPV

SEQ ID NO: 10604 - protein, 930 aa, Zea mays
  Clone ID: TF_ZM4912.C1.o17.fg.pep
MGDFLRLKPPTFAGSSNPLDADDWMHTIKRKLEAIGCPENQRVQLAAHQLSGMALAWWDTFNVTIRDATWAEFEAAFREHHVPQGLVQLKEDKFRELTQDGRSVSNYVHKFTKLARYAPDDVNTESKKMARFLKGLRPELKTILASQDFLNFSHLSNKAMQVERAKEEEKGHLKRKFQVLRAQQQDRHQKTRSFGFPPKGPNFGRPAGPTPSRFSQQSQSSFHSSLVASNQPLANACWHCGDPSHFKNNCPQLKPPGPSYSNSVNGPKNTSATAPKAPSAVSQQNKTPYQGRARVNHVDAQEAQQAPGVVLGEFLVEFTPATVLFDSGASHSFIATSFVEKYGIPSTPLEIPLVTRTPGSDLLCQLKCSQVRILLSGVVYLADLTVLPSKGIDVILGIDWLTKHKSIISCADKTVLLTDQQGKSVSCQAQPPASDPMMFYLTTESISVVEEFMDVFPEELLGMPPEREVEFYIDLIPGTAPIAKRPYRMAPTELAELKLQISDLQQKGYIRPSSSPWGAPVLFVSKKDGSMRMCIDYRSLNEVTIKNKYPLPRIDDLFDQLQGAKYFSKIDLRSGYHQLRIKEADIQKTAFVTRYEQYEFTVMSFGLTNAPAFFMNLMNKVFMEELDKFVVVFIDDILIYSRNREDHKRHLRIVLGKLRAHQLYAKLSKYHLTKVAHFIPVKATFGGATLARIYLKEIVRLHGIPRKIVSDRGTQFTSKFWTSLQKAMGTKLDFSTAYHPQTDGQTERVNKVLEDLLRAYPSHVVQRGGKALEGPAFVKEAEEKVALIRRRLLEAQSRQKSYADNRRRELRFEEGDFVYLKVSPMRGVRRFQVKGKLAPRFVGPYPIIGKLRKCLQAPESHLEEETVQIQKDLQYREKPVKILDSAVRKTRTSEVKLCKVQWSREGEEEATWESEDFLRKEYPYLFPNPV

SEQ ID NO: 10605 - protein, 1261 aa, Zea mays
  Clone ID: TF_ZM4948.C2.o9.fg.pep
MALAWWDTFNVTIRDATWAEFEAAFREHHVPQGLVQLKEDKFRELTQDGRSVSEYVHKFTELARYAPDDVNTESKKMARFLKGLRPELKTILASQDFLNFSHLSNKAVQVERAKEEEKGHLKRKFQVLRAQQQDRHQKTRSFGFPPKGPNFSRPVGPTPSRFSQQSQSSFHSPSVASNQPPANACWHCGDPSHFKNNCPQLKPQGPAYSNSVNGPKNTSAPAPKALSAVSQQNKTPYQGRARVNHVDAQEAQQAPGVVLGEFLVEFTPATVLFDSGASHSFIATSFVEKYGIPSTPLEIPLVTRTPGSDLLCQLKCSQVRILLSGVVFLADLTVLPSKVIDVILGMDWLTKHKGIISCTDKTVLLTDQQGKSVSCQAQPPASDPMMFSITTENISVVEEFMDVFPEELPGMPPEREVEFYIDLIPGTAPIAKRPYRMAPTELAELKLQISDLQQKGYIRPSSSPWGAPVLFVSKKDGSMRMCIDYRSLNEVTIKNKYPLPRIDDLFDQLQGAKYFSKIDLRSGYHQLRIKEADIQKTAFVTRYGQYEFTVMPFGLTNAPAFFMNLMNKVFMDELDKFVVVFIDDILIYSKNREDHKRHLWIVLGKLRAHQLYAKLSKCEFWLEKIAFLGHILTAEGIEVDPSKVEAVSKWRQPTNVSEVRSFLGMAGYYRRFIKGFSSIARPMTELLKKDHKFVWTPKCEESFQIIKEKLTTAPVLSLPDIHQDFVVFCDASRQGLGCVLMQNEKVIAYASRLLKPHEQNYPTHDLELAAIVHALKIWRHYLIGNKCHIFTDHKSLRYIFTQPDLNLRQRRWLELIKDYDLEIHYHPGKSNVVADALSRKPFGIKGTNLLEDWKGESAQLNACLGNNDSLEVKPTLEDLICKAQHLDPETARLVGKARKEQLPDLRTDDQGVLWFKHRLCVPKGEAREKGNDSIWVIIDRLTKVAHFIPVKTTFGGATLARIYLKEIVRLHGIPRKIVSDRGTQFTSKFWTSLQKAMGTKLDFSTAYHPQTDGQTERVNKVLEDLLRACVLAFDRSWESSLPYAEFSYNNSYQSSIKMSPFEALYGRKCQTPLMWSNVGEKALEGPAFVKEAEEKVALIRRRLLEAQSRQKSYADNRRRELRFEEGDFVYLKVSPMRGVRRFQVKGKLAPRFVGPYPIIGKVGPAAYRLELPESMSDIHNVFHVSQLRKCLQASESHLEEETVQIQKDLQYREKPVKILDSAVRKTCTSEVKLCKVQWGREGEEEATWESEDFLRREYEST

SEQ ID NO: 10606 - protein, 941 aa, Zea mays
  Clone ID: TF_ZM5108.C7.o8.fg.pep
MSPEKPSDSYVRTTTNNKNIPTWRKRLQALSGGDPIENDPTIVYMAGYLHTLDNQYDDLALHCTSLTSRVESLEQKVRELSEEKASLQESLSLAEGEETNTREAYRTLKMDYDKVLKKLAPARKIRKKTRSQGCQTEQQEENPPRNQSDTEDMSLASLDDLLKEFGDTLEKEFGATLFPWQMASDRTTPTASGIGARLPLGAEGEAGGEGGETHLPAPPELPLDLAQILANQTRLIEVLTRSLENQRPGGERPQDRMGEFLRLKPPTFAGSSNPLDADDWLRTIKRKLEAIACPENQRIQLAAHHLSGMALAWWDTFSEAIRDATWAEFEAAFREHHVPQGIVQLKEDEFRELTQGGRTISEYVHKFTELARYAPEDVSTEARKMARFLRGLRPELKTILASQDFHSFSHLSNKAIQVERAKEEEKGHIKRKFQVLRAQQQERHQRARPFGLPPRGPSFHKQSGPSPSRYSQQSQSSHQAPSVASNQPPANACWHCGDPSHFKNNCPQLKAPGPTYSNSVNGPKIPSAPTPKAFPSSSQQSRAQYQGRARVNHVDAQEAQQAPGVVLGEFLVEFTPASVLFDSGASHSFIAAKFVEKHGIPSTPLAIPLVTRTPGSDLLCKLRCSQVRILLSGVVFLADLTILPSQGIDVILGMDWLAKHKGVISCASKTVLLIDHQGKAVSCQAQPPANDPMIFNLAVESMSVIKEFEDVFPEELPGMPPEREGLQQAMGTKLDFSTAYHPQSDGERTLEGPDFVKEAEEKVALIRRRLLEAQSRQKSYADNRQRELRFEEGDFVYLKVSPMRGVKRFQMKGKLAPRFVGPYPVISRIGPVAYRLELPESMSDIHNVFHVSQLRKCLEVPETRIEAEAIQIQKDLQYREKPEKILDSAVRRTRNSEVKLCKVQWSRDGEEEATWESEDSLRKEYPYLFSSPVRISRARFL

SEQ ID NO: 10607 - protein, 551 aa, Zea mays
  Clone ID: TF_ZmC10872_15.pep
MITGDKPEASGRKNNERTMSKEVGDKHKGDKKKKKRKKSASSIKSQRKGDKKKKKMKKVVYYETDSSSPSTSSVESTTLKRQERKKYKEEPQAMYNRLKAMVNQVRNLGSTKWDDHEMIKMSPEEIISKFVSFELMIKNSKHIVNLDQCATSTPEVQPVAFKVMEEKKEESTPSRLPIDVSKLDNEEMALIIKGFRQILKQRKGKDYKPCSKRVCYRCGKSGHYIAKCPYTSDSDRDDDKKGKKKMENKRYYKRKGGEAHMGREWDSDESSTNSSSDKDAANIAINKGLLFPNVGHKCLMAKDGKRRSGCTNHMKEEKRMFSSYEKNEDPQRAITFGDGNQGLVKDSLDYNLLSVSQLCKMGYSCLFTDVGVTVFRKNNDSIAFKGVLDGQLYLVDFDDNNVELDTCLIAKTNMGWLWHRRLAHVGMKNLHKLLKGEHILGLTNEKSQTQDTLKRFLRWAQNEFGLRIKKIRSNNGTEFKNSQIEGFLEDEGIKHEFSSPYTPQQNGVVKRKNRTLLDMARTMLDEYKTLDRFWAEAINTACYSINRLYLH

SEQ ID NO: 10608 - protein, 1716 aa, Zea mays
  Clone ID: TF_ZmC36592_123.pep
MEDSLAIKSSYCSEVEGFPRLLRSCALRMGIRKKPEYVWTEHFEGGMIRCSMAVYLGESQSYPNQRSFQVTFTGVHFLDACQNVARKALRQLCQNYNKVIIETPLRYFPPSNKNTPTWRKRLQALSGGDPIENDPTIVYMAGYLHTLDNQYDDLALHCTSLTSQVESLEQKVRELSEEKASLQESLSLAEGEEANTREAYRTLKTDYDKVLKKLAPARKIRKKTKSQGCQTERQEENPPRNQSDTEDMSLASLDDLLKEFGDTLEKEFGATLFPWQMASDRTTPTASGIGARLPLGAEGEAGGEGGETHLPAPPELPLDLAQILANQTRLIEVLTRSLENQRPGGGRAQDRMGEFLRLKPPTFAGSSNPLDADDWLRTIKRKLDAIACPENQRIQLAAHQLSGMALAWWDTFSEAIRDATWAEFEAAFREHHVPQGIVQLKEDEFRELTQGGRTVSEYVHKFTELARYAPEDVSTEARKMARFLRGLRPELKTILASQDFHSFSHLSNKAIQVERAKEEEKGHIKRKFQVLRAQQQERHQRARPFGLPPRGPSFHKQSRPSPSRYSQQSQSSHQAPSVASNQPLANACWHCGDPNHFKNNCPQLKAPGPTYSNSVNVPKVPSAPTPKAFPSSSQQSRAQYQGRARVNHVDAQEAQQAPGVVLGEFLVEFTPASVLFDSGASHSFIAAKFVEKHGIPSTPLAIPLVTRTPGSDLLCKLRCSQVRILLSGVVFLADLTILPSQGIDVILGMDWLARHKGVISCASKTVLLIDHQGKAVSCQAQPPANDPMIFNLAVESMSVIKEFEDVFPEELPGMPPEREVEFYIDLIPGTAPIAKRPYRMAPTELAELKLQISELQQKGYIRPSSSPWGAPVLFVTKKDGSMRMCIDYRSLNEVTIKNKYPLPRIDDLFDQLQGAKYFSKIDLRSGYHQLRIKEADIQKTAFVTRYGQYEFTVMPFGLTNAPAFFMNLMNKVFMEELDKFVVVFIDDILIYSKSRKDHEQHLRTVLGRLRAHQLYAKISKCEFWLEKIAFLGHILTAEGIEVDPSKVEAVSNWKQPSNVSEVRSFLGMAEYYRRFIKGFSSIAKPMTELLKKDNKFVWTPKCEESFQIIKEKLTTAPVLTLPDIHQDFVIFCDASKQGLGCVLMQNEKVIAYASRLLKPHEQNYPTHDLELAAIVHALKIWRHYLIGNKCHIFTDHKSLKYIFTQPDLNLRQRRWLELIKDYDLEIHYHPGKANVVADALSRKPFGVKGANFLEDWKKESAQLNACLGDNGSLEVKPNLEDLICKAQRLDAETTKLIERARKEQLPDLRTDNQGALWFKDRLCVPMGETRETLLDEAHNSAYSIHPGTTKMYLDLKTRYWWKGMKREIAQYVARCDTCQRTKAEHQKPAGLLQPLPIPEWKWEEIGMDFVTGLPRSQRGNDSIWVIIDRLTKVAHFIPVKTTFGGAALARLYLKEIVRLHGIPRKIVSDRGTQFTSKFWKGLQQAMGTKLDFSTAYHPQLDGQTERVNKVLEDLLRACVLAFDRDWESSLPYAEFSYNNSHQASIKMSPFEALYGIKCQTPLMWSNVGERTLEGPDFVKEAEEKVALIRRRFQMKGKLAPRFVGPYPVISRIGPVAYRLELPGSMSDIHSVFHVSQLRKCLKVPETRIEAETIQIQKDLQYREKPVKILDSAVRRTRNSEVKLCKVQWSRDGEEEATWESEDSLRKEYPYLFSSPV

SEQ ID NO: 10609 - protein, 1442 aa, Zea mays
  Clone ID: TF_ZM4158.C1.o1.fg.pep
MASDRTTPTASGIGARLPLGAEGEAGGEGGETHLPAPPELPLDLAQILANQTRLIEVLTRSLENQRPGGGRPQDRMGEFLRLKPPTFAGSSNPLDADDWLRTIKRKLEAIACPENQRVQLAAHQLSGMALAWWDTFSEAIRDATWAEFEAAFREHHVPQGIVQLKEDEFRELTQGGRTVSEYVHKFTELARYAPEDVSTEARKMARFLRGLRPELKTILASQDFHSFSHLSNKAIQVERAKEEEKGHIKRKFQSAESELPSGTLRCKQPAASKCLLALRGPQSLQEQLPPVEGTRTNLHQLGEWPQGSIRTHPKAFPSSSQQSRAQYQGRARVNHVDAQEAQQAPGVVLGEFLVEFTPASVLFDSGASHSFIAAKFVEEHGIPSTPLAIPLVTRTPGSDLLCKLRCSQVRILLSGVVFLADLTILPSQGIDVILGMDWLARHKGVISCASKTVLLIDHQGKAVSCQAQPPANDPMIFNLAVESMSVIKEFEDVFPEELPGMPPEREVEFYIDLIPGTAPIAKRPYRMAPTELAELKLQISELQQKGYIRPSSSPWGAPVLFVTKKDGSMRMCIDYRSLNEVTIKNKYPLPRIDDLFDQLQGAKYFSKIDLRSGYHQLRIKEADIQKTAFVTRYGQYEFTVMPFGLTNAPAFFMNLMNKVFMEELDKFVVVFIDDILIYSKSRKDHEQHLRTVLGRLRAHQLYAKLSKCEFWLEKIAFLGHILTAEGIEVDPSKVEAVSNWKQPSNVSEVRSFLGMAGYYRRFIKGFSSIAKPMTELLKKDNKFVWTPKCEESFQIIKEKLTTAPVLTLPDIHQDFVIFCDASKQGLGCVLMQNEKVIAYASRLLKPHEQNYPTHDLELAAIVHALKIWRHYLIGNKCHIFTDHKSLKYIFTQPDLNLRQRRWLELIKDYDLEIHYHPGKANVVADALSRKPFGVKGANFLEDWKKESAQLNACLGDNDGLEVKPNLEDLIRKAQRLDAETTKLLERARKEQLPDLRTDNQGALWFKDRLCVPVGETRETLLDEAHNSAYSIHPGTTKMYLDLKTRYWWKGMKREIAQYVARCDTCQRTKTEHQKPAGLLQPLPIPEWKWEEIGMDFVTGLPRSQRGNDSIWVIIDRLTKVAHFIPVKTTFGGAALARLYLKEIVRLHGIPRKIVSDRGTQFTSKFWKGLQQAMGTKLDFSTAYHPQSDGQTERVNKVLEDLLRACVLAFDRDWESSLPYAEFSYNNSHQASIKMSPFEALYGRKCQTPLMWSNVGERTLEGPDFVKEAEEKVALIRRRLLEAQSRQKSYADNRRRELRFEEGDFVYLKVSPMRGVKRFQMKGKLAPRFVGPYPIISRIGPVAYRLELPESMSDIHNVFHVSQLRKCLKVPETRIEAEAIQIQKDLQYREKPVKILDSAVRRTRNSEVKLCKVQRSRDGEEEATWESEDSLRKEYPYLFSNPV

SEQ ID NO: 10610 - protein, 1046 aa, Zea mays
  Clone ID: TF_ZM4163.C12.o4.fg.pep
MARFLRGLRPELKTILASQDFHSFSHLSNKAIQVERAKEEEKGHIKRKFQVLRAQQQERHQRARPFGLPPRGPSFHKQSGPSPSRYSQQSQSSHQAPSVASNQPPANACWHCGDPNHFKNNCPQLKAPGPTYSNSVNGPKVPSAPTPKAFPSSSQQSRAQYQGRARVNHVDAQEAQQAPGVVLGASHSFIAAKFVEKHGIPSTPLAIPLVTRTPGSDLLCKLRCSQVRILLSGVVFLADLTILPSQGIDVILGMDWLARHKGVISCASKTVLLIDHQGKAVSCQAQPPANDPMIFNLAVESRSVIKEFEDVFPEELPGMPPEREVEFYIDLIPGTAPIAKRPYRMAPTELAELKLQISELQQKGYIRPSSSPWGAPVLFVTKKDGSMRMCIDYRSLNEVTIKNKYPLPRIDDLFDQLQGAKYFSKIDLRSGYHQLRIKEADIQKTAFVTRYGQYEFTVMPFGLTNAPAFFMNLMNKVFMEELDKFVVVFIDDILIYSKSRRDHEQHLRTVLGRLRAHQLYAKLSKCEFWLEKIAFLGHILTAEGIEVDPSKVEAVSNWKQPSNVSEVRSFLGMAGYYRRFIKGFSSIAKPMTELLKKDNKFVWTPKCEESFQIIKEKLTTAPVLTLPDIHQDFVIFCDASKQGLGCVLMQNEKVIAYASRLLKPHEQNYPTHDLELAAIVHALKIWRHYLIGNKCHIFTDHKSLKYIFTQPDLNLRQKRWLELIKDYDLEIHYHPGKANVVADALSRKPFGVKGANFLEDWKKESAQLNACLGDNGSLEVKPNLEDLICKAQRLDAETTKLIERARKGQLPDLRTDNQGALWFKDRLCVPMGETRETLLDEAHNSAYSIHPGTTKMYLDLKTRYWWKGMKREIAQYVAQCDTCQRTKAEHQKPAGLLQPLPIPEWKWEEIGMDFVTGLPRSQRGNDSIWVIIDRLTKVAHFIPVKTTFGGAALARLYLKEIVRLHGIPRKIVSDRGTQFTSKFWKGLQQAMGTKLDFSTAYHPQSDGQTERVNKVLEDLLRACVLAFDRDWESSLPVGDLFSNAMN

SEQ ID NO: 10611 - protein, 256 aa, Zea mays
  Clone ID: TF_ZM4181.C3.o3.fg.pep
MACYLEVVDLGVWRVTHDGMKPPKNPEKLTTNNELVRYMYSRLNLIINELNYIGIKKLGDADIMGQEEQTSSMPYAFACDEKKDKKKAATPSSSSEEEEEKERDDDDQPSTSSLKDKETIQCVGKVEDLLLNINRKKQKRYDASYARRRATSRTTVQIWSNPQRGGAKGYPDYHPKTCLTLKDVIRAHSLRMKGSGSASPEVPLRGLPKNSASLEPNLGEGVSSGGSLPHSRPSHSRAAMFTSPEPVSGDKDKTCE

SEQ ID NO: 10612 - protein, 411 aa, Zea mays
  Clone ID: TF_ZM5106.C1.o3.fg.pep
MSPEKPSDSCARTTTNNKNTPTWRKRLQALSGGDPIENDPTIVYMAGYLHTLDNQYDDLALHCTSLTSQVESLEQKVRELSEEKASLQESLSLAEGEETNTREAYRTLKMDYDKMASDRTTPTASGIGARLPLGAEGEAGGEGGMALAWWDTFSEAIRDATWAEFEAAFREHHVPQGIVQLKEDEFRELNQGGRTVSEYVHKFTELARYAPEDVSTEARKMARFLRGLRPELKTILASQDFHSFSHLSNKAIQVERAKEEEKGHIKRKFQVLRAQQQERHQRARPFGLPPRGPSFHKQSGPSPSRFSQQSQSSHQAPSVASNQPPANACWHCGDPNHFKNNCPQLKAPGPTYSNSVNGPKVPSAPTPKAFPSSSQQSRAQYQGRARVNHVDAQEAQQAPGVVLGVPKSEFF

SEQ ID NO: 10613 - protein, 1104 aa, Zea mays
  Clone ID: TF_ZmC951_452.pep
MSGDHAKREIVTGGDKSASSGRTHSRESDHKHKEESASSIKSQRRGDKKKKMKKWSTTRPTLRHPPPPASNHRPSLLSAMSVRSIVPKVRDKDYDSDEADQIRHFNSQATTILLASLCREEYNKVQGLKTAKEIWDVLKTTHEGDEVTKITKRETIEGELSRFILNQEEEPQSMYNRLMTLVNQVRNLGSTKWDDHEMVKVILRSLVFHNPTQVQLIRGDPRYKLMSPEEVIGKFVSFELMIKGSKHIVNLEQGGTSTPEVQPVTFKAAEEEKKESTPSRIPIDVSKLDNEEMTLIIKSFRQILKQRKGKDYKLRSKRVCYKCGKPSHFIANCLMSSDSDRGDDKRGKRKEKKKYYKKKGGDAHVCREWDSDESSTDSSSDEDATNIAVNKGLLFPNVGHKCLMEKDGKRKSDEGSSSEDEDNLLALFANLNMQQKEKLNELIGAIHEKDELLDSQEEFLIKENKKHVKVKNAYAQEVEKNKNLTKELSICHDTISNLRTENANLFAKVENLKTETKDLNGCNDSISCLRNENAILHAKIEELNACKPSTSNVDHVTICTRCRDINVDAIHDRLALIKQQNDHIAQLTSKINEHKIENEKFKFARSMLYNGRHPGIKDGIGFQQGRNVKLNAPKILSNFVKGKAPMAQDNEGYILYPVGYPEHKIRRIHARKSHSVSHHAFMYKNETSSSSHSTHVKMPKKKSSTASNDHNISFKTFDASYVLINKSDKVVYASGGSSWIIDSGCTNHMTGEKKMFSSYEINEDPKRTITFGDGNQGVTFFRRSNDSVAFKGVLEGQLYLVYFNRAELDTCLIAKTNMGWLWHRRLAHVGMQNLHKLLKGEHILGLTNVQFEKDRVCSACQAGKKVGSHHPHKNITTTDRPLELLHMDLFGSIAYISIGGSKYCLVIVDDYSRFTWVFFLQQKSQTQETLKGFLRRAQNEFGLRIKKIRSDNWTEFKNSQIEGFLEEEGIKHEFSSPYTPQQNGVVERKNRTLLDMARTMLDEYKTPDRFWEEAINTACYSINRLYLHQILFKTSYELLTGKKPNVSYFSVFGSKCFILVKRGRKSKFAPKVVEGFLLGYDSNTRAYRVFNKSTGVGVSRPGGP

SEQ ID NO: 10614 - protein, 1546 aa, Zea mays
  Clone ID: TF_ZM5028.C2.o1.fg.pep
MSGDHAKREIVTGGDKSASSGKTHSREFGHKHKEESASSIKSQRRGEKKKKMKKVVYYETDSSSPSTFGSELSSVTSKRHERKKYMRNLGSTKWDDHEMVKVILRSLIFHNPTQVQLIHGDPRYKLMSPEKVIVKFVSFELMIKGSKQIVEQGGTSTPEMQPVVFKATEEKKEESTSSRLPIDASKLDNEKMALIIKSFCQILKQRKGKDYKPRSKKVCYKCGKSDHFIAKCPISSDSDRGADKRGKKKEKKRYYKKKGGDAHVCWEWDSDMSSTDSSSDEDAANIAVNKGLLFPNVGHKRLMENDDKKKKKEKLNELISAIHEKDELLDSQEEFLIKENKKHVKVKNAYAQEVEKNENLTKELSIRHDTISNLRDENTSLIAKVEKSKVCHDSIDNLRNENASLFAKIDKLNESIASLKTENDKLISKAKDLNVCNVSISNLRNENAMLHAKIDELNACKPSTSNVNHVTICTRCRDINVDAIHDHLALIKQQNDHIAQLTAKINEHEIENENFKFARSMLYNGRRPDIKDGIGFQQGDNVKLNAPKKLSNFVKGKAPMAQDNEGYILYPAGYPEHKIRRIHARKSHSVFHHVFMYKNEASSSRHSTHAKMPKKKTPIASNDPNVSFKTFDASYVLTNKSGKVVAKYVGGKHKGSKTCVWVPKVYASGGSSWIIDSGCTNHMTGEKKMFSSYEKNEDPQRAITFGDGNQDSLDYNLLFVSQLCKMGYNYLFTDIGVTVFRRSDDSLAFKGVLEGQLYLVNFNRAKLDTCLIAKTNMGWLWHRRLAHVGMNNLHKLLKGEHILGLTNVHFEKDREKSQTQETLKGFLRRAQNEFELRIKKIRSDNGTEFKNSQTEGFLEEEGIKHEFSSPYTPQQNGVVERKNRTLLDMARTMLDEYKTPDRFWAEAINTACYSINRLYLHRILKKTSYELLTGKKPNVSYFRVFGSKCFILVKRGRKSKFAPKVVEGFLLGYDSNTRAYRVFNKSTGLVEVSYDIVFDENNGSQVEQVDLDELDDEEAPCVVLRNMSIGDVCPKESEEPTQAQDQPSSSMQASPPTQDEDQAQDDENEDQEDEPPQEEDNDQGGDEANKDKEDDQEQRPPHPRVHQAIQRDHPVNSILGDIHKGVTTRSQVTHFCQHYSFVFSIEPYKVEDALRDSDWVLAMQEELNNFTRNEVWHLVPRPNQNVVGTKWVFRNKQDEHGVMTRNKARLVAKGYSHVEGLDFGETYAPVARLESIRILFAYATYHGFKLYQMDVKSAFLNGPIKEGDFKSSNSKRAPSSTKLNTFQDILTKFGMKDAKPIKTPMGTNGHLDLDTGGKSVDQKVYRSMIGSLLYLCASRPYIMLSVCMCARFQADPKEVHFKAVKRIMRYLVYTPKFGLWYPEGSTFDLIGYSDADWAGCKIDRKSTSRTCQFLGRSLVSWASKKQNSVALSTAKAKYIVAGHCCAQLLWMRQTLRDYSYKLSNVPLLCDNESAIHMADNPVEHSRTKHIDIRYHFLRDRQQRGDIEIAYVSTKEQLADIFTKPLDEKTFTKLRNELNILDSQNFD

SEQ ID NO: 10615 - protein, 573 aa, Zea mays
  Clone ID: TF_ZmC119_782.pep
MSIEQMFLMQTQAVQAIGQTLAAIQQQQQQQQQQAPPQPQMPQMPRDKCAEFMRGHPPTFAHSSDPMDAEDWLHTVERELHTAPCDDREKVLYGPRLLRGAAQSWWESYLATHANPDAITWEEFRGSFRQYHVPAGLMTVKKEEFLALKQGSMSVSEYRDRFLQLSRYAPEDVNIDAKRQYRFLKGLVDPLHYQMMNHTFPTFQHLIDRAIMTKRKRKEMEDRKRKISGPQPGSSNRPRFSGNQPQQFRQNQRPPQQHQQFQRQYPHHQYQNRQNNQSGGANQQNNQAAPAQVGNRACFHCGEQGHWVMQCPKKATQQQLGPNAPAKQNVSQPGAGNRSQPRYNHGRLNHLEAEAVQETPDMIVAFPANLIVMGTQGIDVILGMNWLDKYQAVISCDTRTIKLVSPLGEEVVTELVPPEPKKASCYQMVVDSREADPIERIKIVSEFPDVFPKDLPGMPPERKVEFAIELLSGTAPIFKRAYRISGPELVELKKQIDELSEKGYIQPSTSPWAAPVLLKGKCALGPFLSILVIECQLKCLKCEFMQWMNKVQIKIKGMFLSLSTLVLCTNILV

SEQ ID NO: 10616 - protein, 1276 aa, Zea mays
  Clone ID: TF_ZmC12418_1.pep
MTSFNACSADMMSENRRRGGRRAQQERAAQQEEVPQQQHLPPPPPMSIEQMFLMQTQAVQAIGQTLAAIQQQQQQQQQATPQPQMPQMPRDKRAEFMRGHPPTFAHSSDPMDAEDWLRTVERELHTAQCDDREKVLYGPRLLRGAARSWWESYLATHAHPDAITWEEFRGSFRQYHVPAGLMTVKKDEFLALKQGSSSISEYRDRFLQLSRYAPEDVNTDAKRQYRFLRGLVDPLQYQLMNHTFPTFQHLIDRAIMTERKRKEMEDPAQQNSQAAPAQVGNRACFHCGEQGHWVMQCPKKAAQQQSGPNAPAKQNVSQPGAGNRPQPRYNHRRLNHLEAEAVQETPSMIVGMFPVDSHIAEVLFDTGATHSFITASWVEAHNLPITTMSTPIQIDSAGGRIRADSICLNVSVEIRGIAFPANLIVMGTQGIDVILGMNWLDKFQAVISCDKRTIKLVSPLGEEVVTELVPPEPKKGSCYQIAIDSSEADPIESIKVVSEFPDVFPKDLPGMPPERKVEFAIALLPGTSPIFKRAYRISGPELVELKEQIYELSEKGYIRPSTSPWAAPVLFVEKKDGTKRMCIDYRALNEVTIKNKYPLPRIEDLFDQLRGASVFSKIDLRSAFFMNLMNSVFMDYLDKFVVVFINDILIYSQSEKEHASHLRMVLQRLREHQLYAKLSKCEFWINEVLFLGHIINKEGLAVDLKKVADILNWKAPTDARGIKSFIGMAGYYRRFIEGFSKIAKPMTVLLGNKVELKWTQKCQEAFEALKGKLTTAPVLVLPDVHKPFLVYCDACYTGLGCVLMQEGRVVAYSSRQLKVHEKNYPIHDLELAAVVHALKTWRHYLCGQKCDVYTDHKSLKYIFTQSELNMRQRRWLELIKDYELEIHYHPGKANVVADALSRKSQVNLMVARPMPYELAKEFDRLSLGFLNNSRGVTVELEPTLEREIKEAQKNDEKISEIRRLILEGKGKDFREDAKGVIWFKDCLCVPNVQSIRELILKEAHETAYFDSPWHSAYHPQTDGQTGRTNQILEDMLRACALQDQSGWDKRLPYAEFSYNNSYQDSLKMSPFQALYGRSCRTPLQWDQPGEKQVFGPDILLEAEENIRMVRENLKISQSRQRSYADTRRRELSFEVGDFVYLKVSPIRGVRRFGVKGKLAPRYIGPYQILSRRGEVAYQLSLPENLSAVHDVFHVSQLKKCLRVPEEQLPVEGLEVQKDLTYVEKPVQILEVADRVTRRKTIRMCKVKWNHHSEEEATWEREDDLLAKYPELFASQP

SEQ ID NO: 10617 - protein, 248 aa, Zea mays
  Clone ID: TF_ZmC3792_100.pep
LERKRKEMEDRKRKISGPQPGSSSRPRFSSNQPQQFRQNQRPPQQHQQRQQYQQFQRQYPQHQYQNRQSNQSGGGQFQKQNQQAPHLPAPANQQNSQAAPAQVGNRACFHCGEQGHWVMQCPKKAAQHQSGPNAPAKQNVSHGDDSSSHDTDFSANPEPEGWVARPITRDAATGDRERGIPRKGSFSAKEPGSEPPITDQGFEGWPPEGSTVASDRVGPTPTTGQGFEGQPPEGLHGRLRLLGLRAHY

SEQ ID NO: 10618 - protein, 1489 aa, Zea mays
  Clone ID: TF_ZmC3792_18.pep
MSIEQMFLMQTQAVQAIGQTLAAIQQQQQQQQQAPPQPQMPQMPRDKRAEFMRGHPPTFAHSSDPMDAEDWLRTVERELHTAQCDDREKVLYGPRLLRGAAQSWWESYLATHAHPDAITWEEFRGSFRQYHVPAGLMTVKKEEFLALKQGPLSVSEYRDKFLQLSRYAPEDVNTDAKRQYRFLRGLVDPLQYQLMNHTFPTFQHLIDRAIMTERKRKEMEDRKRKISGPQPGSSNRPRFSSNQPQQFRQNQRPPQQRQQHQQFQRQYPQNQYQNRQSNQSGGQFQRQNQQVPRLPAPANQQNNQVAPAQVGNRACFHCGEQGHWVMQCPKKAAQQQSGPNAPAKQNVPQPGAGNRSQPRYNHGRLNHLEAEAVQETPGMIVGMFPVDSHIAEVLFDTGATHSFITASWVEAHNLPTTTMSTPIQIDSAGGRIRADSICLNISVKIRGIAFPANLIVMGTQGIDVILGMNWLDKYQAVISCDKRTIKLVSPLGKEVVTELVPPEPKKGSCYQMAVDSSEADPIESIKVVSEFPDVFPKDLPGMPPERKVEFAIELLPGTAPIFKRAYRISGPELDELKKQIDELSEKGYIRPSTSPWAAPVLFVEKKDGTKRMCIDYRALNEVTIKNKYPLPRIEDLFDQLRGASVFSKIDLRSGYHQLRIRPSDIPKTAFISKYGLYEFTVMSFGLTNAPAFFMNLMNSVFMDYLDKFVVVFIDDILIYSQSEEEHADHLRMVLQRLREHQLYAKLSKCEFWISEVLFLGHIINKEGLAVDPKKVADILNWKAPTDARGIKSFIGMAGYYRRFIEGFSKIAKPMTALLGNKVEFKWTQKCQEAFEALKEKLTTAPVLVLPDVHKPFSVYCDACYTGLGCVLMQEGRVVAYSSRQLKVHEKNYPIHDLELAAVVHALKTWRHYLYGQKCDVYTDHKSLKYIFTQSELNMRQQRWLELIKDYELEIHYHPGKANVVADALSRKSQVNLMVARPMPYELAKEFDRLSLGFLNNSRGVTVELEPTLEREIKEAQKNDEKISEIRRLILDGKGKDFREDAEGVIWFKDRLCVPNVQSIRELILKEAHETAYSIHPGSEKMYQDLKKKFWWYGMKREIAEHVAMCDSCRRIKAEHQRPAGLLQPLQIPQWKWDEIGMDFIVGLPRTRAGYDSIWVVVDRLTKSAHFIPVKTSYNSAVLAELYMSRIVCLHGVPKKIVSDRGTQFTSHFWQQLHEALGTHLNFSSAYHPQTDGQTERTNQILEDMLRACALQDQSGWDKRLPYAEFSYNNSYQASLKMSPFQALYGRSCRTPLQWDQPGEKQVFGPDILLEAEENIKMVRENLKIAQSRQRSYADTRRRELSFEVGDFVYLKVSPIRGVRRFGVKGKLAPRYIGPYQILARRGEVAYQLSLPENLSAVHNVFHVSQLKKCLRVPEEQLPVEGLEVQEDLTYVEKPAQILAIADRVTRRKTIRMCKVRWSHHSEEEATWEREDDLVAKYPELFASQP

SEQ ID NO: 10619 - protein, 1527 aa, Zea mays
  Clone ID: TF_ZmC3792_19.pep
MSENRRRGGRRAQQERAAPQDEVPQQQHLPPPPPMSIEQMFLMQTQAVQAIGQTLAAIQQQQQQQQQQAPPQPQMPQMPRDKRAEFMRGHPPTFAHSSDPMDAEDWLRTVERELHTAQCDDREKVLYGPRLLRGAAQSWWDSYLATHANPDTITWEEFRGSFRQYHVPAGLMTVKKEEFLALKQGSSSVSEYRDRFLQLSRYAPEDVNTDAKRQYRFLRGLVDPLQYQLMNHTFPTFQHLIDRAIMTERKRKEMEDRKRKISGPQPGSSSRPRFSGNQPQQFRQNQRPPQQHQQRQQYQQFQRQYPQNQYQNRQSNQSGGQFQKQNQQAPRLPAPTNQQSSQAAPAQVGNRACFHCGEQGHWVMQCPKKAAQQQSGPNAPAKQNVSQPGAGNRSQQRYNHGRLNHLEAEAVQETPDMTVGMFPVDSHIAEVLFDTGATHSFITASWVEAHNLPTTTMSTPIQIDSAGGRIRADSICLNVSVEIRGIAFPANLIVMGTQGIDVILGMNWLDKYQAVISCDKRTIKLVSPLGEEVVTELVPPEPKKGSCYQMAVDSSGADPIESIKVVSEFPDVFPKDLPGMPPERKVEFAIELLPGTAPIFKRAYRISGPELDELKKQIDELSEKGYIRPSTSPWAAPVLFVEKKDGTKRMCIDYRALNEVTIKNKYPLPRIEDLFDQLRGASVFSKIDLRSGYHQLRIRPSDIPKTAFITKYGLYEFTVMSFGLTNAPAFFMNLMNSVFMDYLDKFVVVFIDDILVYSQSEEEHADHLKMVLQRLREHQLYAKLSKCEFWISEVLFLGHIINKEGLAVDPKKVADILNWKAPTDARGIKSFIGMAGYYRRFIEGFSKIAKPMTALLGNKVEFKWTQKCQEAFEALKEKLTTAPVLVLPDVHKPFSVYCDACYTGLGCVLMQEGRVVAYSSRQLKVHEKNYPIHDLELAAVVHALKTWRHYLYGQKCDVYTDHKSLKYIFTQSELNMRQRRWLELIKDYELEIHYHPGKANVVADALSRKSQVNLMVARPMPYELAKEFDRLSLGFLNNSRGVTVELEPTLEREIKEAQKNDEKISEIRRLILDGKGKDFREDAEGVVWFKDRLCVPNVQSIRELILKEAHETAYSIHPGSEKMYQDLKKKFWWYGMKREIAEHVAMCDSCRRIKAEHQRPAGLLQPLQIPQWKWDEIGMDFIVGLPRTRAGYDSIWVVVDRLTKSAHFIPVKTNYNSAVLAELYMSRIVCLHGVPKKIVSDRGTQFTSHFWQPLHEALGTHLNFSSAYHPQTDGQTERTNQILEDMLRACALQDQSGWDKRLPYAEFSYNNSYQASLKMSPFQALYGRSCRTPLQWDQPGEKQVFGPDILLEAEENIKMVRENLKIAQSRQRSYADTRRRELSFEVGDFVYLKVSPIRGVRRFGVKGKLAPRYIGPYQILARRGEVAYQLSLPENLSAVHDVFHVSQLKKCLRMPEEQLPVEGLEVQEDLTYVEKPAQILEVADRVTRRKTVRMCKVRWSHHSEEEATWEREDDLMAKYPELFASQP

SEQ ID NO: 10620 - protein, 1346 aa, Zea mays
  Clone ID: TF_ZmC3792_32.pep
MDAEDWLRTVERELHTAQCDDREKVLYGPRLLRGAAQSWWESYLATHAHPNAITWEEFRGSFRQYHVPAGLMTVKKEEFLALKQGSSSVSEYRDRFLQLSRYAPEDVNTDAKRQYRFLRGLVDPLHYQLMNHTFPTFQHLIDRAIMTERKRKEMEDPNQQNSQAAPAQVGNRACFHCGEQGHWVMQCPKKAAQQQSGPNAPAKQNVPQPGAGNRPQPRYNHGRLNHLEAEAVQETPGMIVGMFPVDSHIAEVLFDTGATHSFITASWVEAHNLPITTMSTPIQIDSAGGRIRADSICLNISVEIRGIAFPANLIVMGTQGIDVILGMNWLDKYQAVISCDKRTIKLVSPLGEEVVTELVPPEPKKGSCYQIAVDSNEADPIESIKVVSEFPDVFPKDLPGMPPERKVEFAIELLPGTAPIFKRAYRISGPELVELKEQIDELSEKGYIRPSTSPWAAPVLFVEKKDGTKRMCIDYRALNEVTIKNKYPLPRIEDLFDQLRGASVFSKIDLRSGYHQLRIRPSDIPKTAFITKYGLYEFTVMSFGLTNAPAFFMNLMNSVFMDYLDKFVVVFIDDILIYSQSEEEHADHLRMVLQRLREHQLYAKLSKCEFWISEVLFLGHIINKEGLVVDPKKVATILNWEAPTDARGIKSFIGMAGYYRRFIEGFSKIAKPMTALLGNKVEFKWTQKCQEAFEALKEKLTTAPVLVLPDVHKPFSVYCDACYTGLGCVLMQEGRVVAYSSRQLKVHEKNYPIHDLELAAVVHALKSWRHYLYGQKCDVYTDHKSLKYIFTQSELNMRQRRWLELIKDYELEIHYHPGKANVVADALSRKSQVNLMVARPMPYELAKEFDRLSLGFLNNSRGVTVELEPTLEREIKEAQKNDEKISEIRRLILDGRDKDFRVDAESVIWFKDRLCVPNVQSIRELILKEAHETTYSIHPGSEKMYQDLKKKFWWYGMKREIAEHVARCDSCRRIKAEHQRPAGLLQPLQIPQWKWDEIGMDFIVGLPRTRAGYDSIWVVVDRLTKSAHFIPVKTNYNSAVLAELYMSQIVCLHGVPKKIVSDRGTQFTSHFWWQLHEALGTHLNFSSAYHPQTDGQTERTNQILEDMLRACALQDQSGWDKRLPYAEFSYNNSYQASLKMSPFQALYGRSCRTPLQWDQPGEKQVFGPDILLEAEENIKMVRENLKIAQSRQQSYADTRRRELSFEVGDFVYLKVSPIRGVRRFGVKGKLAPRYIGPYQILARRGEVAYQLSLPENLSAVHNVFHVSQLKKCLRVPEEQLPVEGLEVQEDLTYVEKPVQILEIADRVTRRKTIRMCKVRWNHHSEEEATWEREDDLMAKYPELFAS

SEQ ID NO: 10621 - protein, 1855 aa, Zea mays
  Clone ID: TF_ZmC3792_4.pep
MARLRHTARKSVIPFLPSRLAERPLRRPVAGQSSHLERLHHRLREEQERRRQEQRSSSLSLHQEIESVRSCSPVLPLEPPPAPPLGAPASGVAAGGDPDNGGGDDSSSHDTDFSANPEPEGWVARPITRDAARGCHFHDALDTLLRRAFDRHTWSVEYRCVVYQHSRGVYPDRWEATCLVRCPENSLQGAEACSEHYSISERDSAEAAMQDAARRALSHYCSVFGGAADGLDLKYYPRRSSGSTGGVIVSPVGEGNPRLSSTVNLAAVLNTELDHALDELSRARAEIALLRAERAERRYLDGGSPAPVGTQHPVWVSPAFWFTYYVNKMSENRRRGGRRAQQERAAPQDEVPQQQHLPPPPPMSIEQMFLMQTQAVQAIGQTLAAIQQQQQQQQQQAPPQPQMPQMPRDKRAEFMRGHPPTFAHSSDPMDAEDWLRTVERELHTAQCDDREKVLYGPRLLRGAAQSWWESYLATHANPDTITWEEFRGSFRQYHVPAGLMTVKKEEFLALKQGSSSVSEYRDRFLQLSRYAPEDVNTDAKRQYRFLRGLVDPLQYQLMNHTFPTFQHLIDRAIMTERKRKEMEDRKRKISGPQSGSSSRPRFSGNQPQQFRQNQRPPQQHQQRQQYQQFQRQYPQNQYQNRQSNQSGGQFQRQNQQTPRLPAPANQQNSQAAPAQVGNRACFHCGEQGHWVMQCPKKAAQQQSGPNAPAKQNVPQPGAGNRSQQRYNHGRLNHLEAEAVQETPGMTIGMFPVDSHIAEVLFDTGATHSFITASWVEAHNLPITTMSPPIQIDSAGGRIRADSICLNISVKIRGIAFPANLIVMGTQGIDVILGMNWLDKYQAVISCDKRTIKLVSPLGEEVVTELVPPEPKKGSCYQMTVDSSEADPIESIKVVSEFPDVFPKDLPGMPPERKVEFAIELLPGTAPIFKRAYRISGPELDELKKQIDELSEKGYIRPSTSPWAAPVLFVEKKDGTKRMCIDYRALNEVTIKNKYPLPRIEDLFDQLRGASVFSKIDLRSGYHQLRIRPSDIPKTAFITKYGLYEFTVMSFGLTNAPAFFMNLMNSVFMDYLDKFVVVFIDDILVYSQSEEEHADHLRMVLQRLREHQLYAKLSKCEFWISEVLFLGHIINKEGLAVDPKKVADILNWKAPTDARGIKSFIGMAGYYRRFIEGFSKIAKPMTALLGNKVEFKWTQKCQEAFEALKEKLTTAPVLVLPDVHKPFSVYCDACYTGLGCVLMQEGRVVAYSSRQLKVHEKNYPIHDLELAAVVHALKTWRHYLYGQKCDVYTDHKSLIHIFAQSELNMRQRRWLELIKDYELEIHYHPGKANVVADALSRKSQVNLMVARPMPYELAKEFDRLSLGFLNNSRGVTVELEPTLEREIKEAQKNDEKISEIRRLILEGKGKDFREDAEGVVWFKDRLCVPNVQSIRELILKEAHETAYSIHPGSEKMYQDLKKKFWWYGMKREIAEHVAMCDSCRRIKAEHQRPAGLLQPLQIPQWKWDEIGMDFIVGLPRTRAGYDSIWVVVDRLTKSAHFIPVKTNYNSAVLAELYMSRIVCLHGVPKKIVSDRGTQFTSHFWQQLHEALGTHLNFSSAYHPQTDGQTERTNQILEDMLRACALQDQSGWDKRLPYAEFSYNNSYQASLKMSPFQALYGRSCRTPLQWDQPGEKQVFGPDILLEAEENVKMVRENLKIAQSRQRSYADTRRRELSFEVGDFVYLKVSPIRGVRRFGVKGKLAPRYIGPYQILARRGEVAYQLSLPENLSAVHDVFHVSQLKKCLRMPEEQLPVEGLEVQEDLTYVEKPAQILEIADRVTRRKTVRMCKVRWSHHSEEEATWEREDDLMAKYPELFASQP

SEQ ID NO: 10622 - protein, 1449 aa, Zea mays
  Clone ID: TF_ZmC3792_46.pep
MPQMPRDKRAEFMRGHPPAFAHSSDPMDAEDWLRTVERELHTAQCDDREKVLYGPRLLRGAAQSWWESYLATHANPDAITWEEFRGSFRQYHVPAGLMTVKEEFLALKQGPSSVSEYRDRFLQLSRYAPEDVNTDAKRQYRFLRGLVDPLQYQLMNHTFPTFQHLIDRAIMTERKRKEMEDRKRKISGPQPGSSSRPRFSGNPPQQFRQNQRPPQQRQLHRQFPRHQPQHRYQNRQSNQSGGQFQRQNQQAPRLPTPANQQNSQAAPAQVGNRACFHCGEQGHWVMQCPKKAAQQQSGPNAPAKQNVSQPGAGNRPQQRYNHGRLNHLEAEAVQETPGMIVGMFPVDSHIAEVLFDTGATHSFITASWVKAHNLPTTTMSTPIQIDSAGGRIRADSICLNITVEIRGIAFPANLIVMGTQGIDVILGVNWLDKYQAVISCDKRTIKLVSPLGKEVVTELVPPEPKKGSCYQMAVDSSEADPVESIKVVSEFPDVFPKDLPGMPPERKVEFAIELLPGTAPIFKRAYRISGPELVELKKQIDELSEKGYTRPSTSPWAAPVLFVEKKDGTKRMCIDYRALNEVTIKNKYPLPRIEDLFDQLRGASVFSKIDLRSGYHQLRIRPSDIPKTAFITKYGLYEFTVMSFGLTNAPAFFMNLMNSVFMDYLDKFVVVFIDDILIYSQSEEEHADHLRMVLQRLREHQLYAKLSKCEFWISEVLFLGHIINKEGLAVDPKKVADILNWKAPTDARGIKSFIGMAGYYRRFIEGFSKIAKPMTALLGNKVEFKWTQKCQEAFEALKEKLTTSPVLILPDVHKPFSVYCDACYTGLGCVLMQEGRVVAYSSRQLKVHEKNYPIHDLELAAVVHALKTWRHYLYGQKCDVYTDHKSLKYIFTQTELNMRQRRWLELIKDYELEIHYHPGKANVVADALSRKSQVNLMVARPMPYELAKEFDRLSLGFLNNSRGVTVELEPTLEREIKEAQKNDEKISEIRRLILDGRGKDFREDAEGVIWFKDRLCVPNVQSIRELILKEAHETAYSIHPGSEKMYQDLRKKFWWYGMKRKIAEHVAKCDSCRRIKAEHQRPAGLLQPLQIPQWKWDEIGMDFIVGLPRTRAGYDSIWVVVDRLTKSAHFIPVKTSYNSAVLAELYMSRIVCLHGVPKKIVSDRGTQFTSHFWQQLHEALGTHLNFSSAYHPQTDGQTERTNQILEDMLRACALQDQSGWDKRLPYAEFSYNNSYQASLKMSPFQALYGRSCRTPLQWDQPGEKQVFGPDILLEAEENIKMVRENLKIAQSRQQSYADTRRRELSFEVGDFVYLKVSPIRGVRRFGVKGKLAPRYIGPYQILSKRGEVAYQLSLPENLSVVHDVFHVSQLKKCLRVPEEQLPVEGLEVQEDLTYVEKPAQILEIADRVTRRKTIRMCKVRWNHHSEEEATWEREDDLVAKYPELFASQP

SEQ ID NO: 10623 - protein, 1490 aa, Zea mays
  Clone ID: TF_ZmC3792_6.pep
MSIEQMFLMQTQAVQAIGQTLAAIQQQQQQQAPPQPQMPQMPRDKRAEFMRGHPPTFAHSSDPMDAEDWLRTVERELHTAQCDDREKVLYGPRLLRGAAQSWWESYLATHANPDAITWEEFRGSFRQYHVPAGLMTVKKEEFLALKQGSSSVSEYRDRFLQLSRYAPEDVNTDAKRQYRFLRGLVDPLQYQLMNHTFPTFQHLIDRAIMTERKRKEMEDRKRKISGPQPGSSSRPRFSGNQPQQFRQNQRPPQQHQQRQQYQQFQRQYPQHQYQNRQSNQSGGQFQKQNQQAPRLPAPANQQNSQAAPAQVGNRACFHCGEQGHWVMQCPKKAAQQQSGPNAPAKQNVSQPGAGNRPQPRYNHGRLNHLEAEAVQETPGMTVGMFPVDSHIAEVLFDTGATHSFITASWVEAHNLPITTMSTPIQIDSAGGRIRADSICLNVSVEIRGIAFPANLIVMGTQGIDVILGMNWLDKYQAVISCDKRTIKLVSPLGEEVVTELVPPEPKKGSCYQMAVDSSEADPIESIKVVSEFPDVFPKDLPGMPPERKVEFAIELLPGTAPISKRAYRISGPELVELKKQIDELSEKGYIRPSTSPWAAPALFVEKKDGTKRMCIDYRALNEVTIKNKYPLPRIEDLFDQLRGASVFSKIDLRSGYHQLRIRPSDIPKTAFITKYGLYEFTVMSFGLTNAPAFFMNLMNSVFMDYLDKFVVVFIDDILVYSQSEEEHADHLRMVLQRLREHQLYAKLSKCEFWISEVLFLGHIINKEGLAVDPKKVADILNWKAPTDARGIKSFIGMAGYYRRFIEGFSKIAKPMTALLGNKVEFKWTQKCQEAFEALKEKLTTAPVLVLPDVHKPFSVYCDACYTGLGCVLMQEGRVVAYSSRQLKVHEKNYPIHDLELAAVVHALKTWRHYLYGQKCDVYTDHKSLKYIFTQSELNMRQRRWLELIKDYELEIHYHPGKANVVADALSRKSQVNLMVARPMPYELAKEFDRLSLGFLNNSRGVTVELEPTLEREIKEAQKNDEKISEIRRLILDGRGKDFREDAEGVVWFKDRLCVPNVQSIRELILKEAHETAYSIHPGSEKMYQDLKKKFWWYGMKREIAEHVAMCDSCRRIKAEHQRPAGLLQPLQIPQWKWDEIGMDFIVGLPRTRAGYDSIWVVVDRLTKSAHFIPVKTNYNSAVLAELYMSRIVCLHGVPKKIVSDRGTQFTSHFWQQLHEALGTHLNFSSAYHPQTDGQTERTNQILEDMLRACALQDQSGWDKRLPYAEFSYNNSYQASLKMSPFQALYGRSCRTPLQWDQPGEKQVFGPDILLEAEENIKMVRENLKIAQSRQRSYADTRRRELSFEVGDFVYLKVSPIRGVRRFGVKGKLAPRYIGPYQILARRGEVAYQLSLPENLSAVHDVFHVSQLKKCLRVPEEQLPVEGLEVQEDLTYVEKPAQILEVADRVTRRKTVRMCKVRWSHHSEEEATWEREDDLMAKYPELFASQP

SEQ ID NO: 10624 - protein, 1493 aa, Zea mays
  Clone ID: TF_ZmC3792_8.pep
MSIEQMFLMQTQAVQAIGQTLAAIQQQQQQQQQQAPPQPQMPQMPRDKRAEFMRGHPPTFAHSSDPMDAEDWLRTVERELHTAQCDDREKVLYGPRLLRGAAQSWWESYLATHANPDTITWEEFRGSFRQYHVPAGLMTVKKEEFLALKQGSSSVSEYRDRFLQLSRYAPEDVNTDAKRQYRFLRGLVDPLQYQLMNHTFPTFQHLIDRAIMTERKRKEMEDRKRKISGPQPGSSSRPRFSGNQPQQFRQNQRPPQQHQQRQQYQQFQRQYPQNQYQNRQSNQSGGQFQKQNQQAPRLPAPANQQNSQAAPAQVGNRACFHCGEQGHWVMQCPKKAAQQQSGPNAPAKQNVSQPGAGNRPQPRYNHGRLNHLEAEAVQETPDMTVGMFPVDSHIAEVLFDTGATHSFITASWVEAHNLPTTTMSTPIQIDSAGGRIRADSICLNVSVEIRGIAFPANLIVMGTQGIDVILGMNWLDKYQAVISCDKRTIKLVSPLGEEVVTELVPPEPKKGSCYQMAVDSSEADPIESIKVVSEFPDVFPKDLPGMPPERKVEFAIELLPGTAPISKRAYRISGPELVELKKQIDELSEKGYIRPSTSPWAAPVLFVEKKDGTKRMCIDYRALNEVTIKNKYPLPRIEDLFDQLRGASVFSKIDLRSGYHQLRIRPSDIPKTAFITKYGLYEFTVMSFGLTNAPAFFMNLMNSVFMDYLDKFVVVFIDDILVYSQSEEEHADHLRMVLQRLREHQLYAKLSKCEFWISEVLFLGHIINKEGLAVDPKKVADILNWKAPTDARGIKSFIGMAGYYRRFIEGFSKIAKPMTALLGNKVEFKWTQKCQEAFEALKEKLTTAPVLVLPDVHKPFSVYCDACYTGLGCVLMQEGRVVAYSSRQLKVHEKNYPIHDLELAAVVHALKTWRHYLYGQKCDVYTDHKSLKYIFTQSELNMRQRRWLELIKDYELEIHYHPGKANVVADALSRKSQVNLMVARPMPYELAKEFDRLSLGFLNNSRGVTVELEPTLEREIKEAQKNDEKISEIRRLILDGRGKDFREDAEGVVWFKDRLCVPNVQSIRELILKEAHETAYSIHPGSEKMYQDLKKKFWWYGMKREIAEHVAMCDSCRRIKAEHQRPAGLLQPLQIPQWKWDEIGMDFIVGLPRTRAGYDSIWVVVDRLTKSAHFIPVKTNYNSAVLAELYMSRIVCLHGVPKKIVSDRGTQFTSHFWQQLHEALGTHLNFSSAYHPQTDGQTERTNQILEDMLRACALQDQSGWDKRLPYAEFSYNNSYQASLKMSPFQALYGRSCRTPLQWDQPGEKQVFGPDILLEAEENIKMVRENLKIAQSRQRSYADTRRRELSFEVGDFVYLKVSPIRGVRRFGVKGKLAPRYIGPYQILARRGEVAYQLSLPENLSAVHDVFHVSQLKKCLRVPEEQLPVEGLEVQEDLTYVEKPAQILEVADRVTRRKTVRMCKVRWSHHSEEEATWEREDDLMAKYPELFASQP

SEQ ID NO: 10625 - protein, 1885 aa, Zea mays
  Clone ID: TF_ZM3392.C2.o1.fg.pep
MRLVMIMLMVMMARLRHTARKSVIPFLPSRLAERPLRRPVAGQSSHLERLHHRLHEEQERRRQGQQGSSFSLQQEIESVRSCSPVLPLEAPPAPPLGAPASGVAAGGDLDDGDDDDSLSHDTDFPADHEPEGWVARPITRDAARGCHFHDALDTLLRRALDRRTWSIEYRCVVYQHSRGVYPYRWEATCLVRRPENSLQGAEACSEHYSISERDSAEAAMQDAARRALSHYCLVFGGVADGLDLKYYPRRPSGSTGGVIVSPVGEGNPRLSSTVNLAVVLNTELDHALDELSRARAEIALLRAERAERRHLDDGSPAPVGTQHPYRSPRRGRQSYDNPDLLLKNSILFSYAARVARSVLMCGCVLQMSENRRRGGRRAQQERAAPQDEVPQQQHLPPPPPMSIEQMFLMQTQAVQAIGRTLAAIQQQQQQQQAPPQPQMPQMPRDKRAEFMRGHPPTFAHSSDPMDAEDWLRTVERELHTAQCDDREKVLYGPRLLRGAAQSWWESYLATHANPDAITWEEFKGSFRQYHVPAGLMTVKKEEFLALKQGSSSVSEYRDIFLQLSRYAPEDVNTDAKRQYRFLRGLVDPLHYQLMNHTFPTFQHLIDRAIMTERKRKEMEDRKRKISGPQPGSSSRPRFSGNQPQQSRQNQRPPQQHQQSQRQYPQHQYQNRQNNQSGGQFQRQNQQAPRLPAPASQQNNQAAPAQVGNRACFHCGEQGHWVMQCPKKAAQQQSGPNAPAKQNVPQPGAGNRSQSRYNHGRLNHLEAEAVQETPGMIVGMFPVNSRIAEVLFDTGATHSFITASWVEAHNLPITTMSTPIQIDSAGGRIRTDSICLNISVEIRGIAFPANLIVMGTQGIDVILGMNWLDKYQAVISCDKRTIKLVSPLGEEVVTELVPPEPKKGSCYQMAVDSSEADPIESIKVVSEFPDVFQKDLPGMPPERKVEFAIELLPGTAPIFKRAYRIPGPELVELKKQIDELSEKGYIRPSTSPWAAPVLFVEKKDGTKRMCIDYRALNEVTIKNKYPLPRIEDLFDQLRGASVFSKIDLRSGYHQLRIRPSDIPKTTFITKYGLYEFTVMSFGLTNAPAFFMNLMNSVFMDYLDKFVVVFIDDILVYSQSEEKHADHLRMVLQRLREHQLYAKLSKCEFWISEVLFLGHIINKEGLAVDPKKVADILNWKAPTDARGIKSFIGMAGYYRRFIEGFSKIAKPMTALLGNKVEFKWTKKCQEAFEALKEKLTTAPVLVLPDVHKPFSVYCDACYTGLGCVLTQEGRVVAYSSRQLKVHEQNYPIHDLELAAVVHALKTWRHYLYGQKCDVYTDHKSLKYIFTQSELNMRQRRWLELIKDYELEIHYHPGKANVVADALSRKSQVNLMVARLMPYELAKEFDRLSLGFLNNSRGVTVELEPTLEREIKEAQKNDEKISEIRRLILDGRGKDFREDAEGVIWFKDRFCVPNVQSIRELILKEAHETAYSIHPGSEKMYQDLKKKFWWYGMKREIAEYVAMCDSCRRIKAEHQRSAGLLQPLQIPQWKWDEIGMDFIVGLPRTRAGYDSIWVVVDRLTKSAHFIPVKTNYSSVVLAELYMSRIVCLHGVPKKIVSDRGTQFTSHFWQQLHEALGTHLNFSSAYHPQTDGQTERTNQILEDMLRACALQDQSGWDKRLPYAEFSYNNSYQASLKMSPFQALYGRSCRTPLHWDQPGEKQVFGPDILLEAEENIKMVRENLKIAQSRQRSYADTRRRELSFEVRDFVYLKVSPIRGVRRFGVKGKLAPRYIGPYQILARRGEVAYQLSLPENLSAVHDFFHVSQLKKCLRVPEEQLLVEGLEVQEDLTYVEKPAQILEVADRVTQRKTIRMCKVKWKHHSEEEATWEREDDLMAKYPELFASQP

SEQ ID NO: 10626 - protein, 1358 aa, Zea mays
  Clone ID: TF_ZM3641.C5.o1.fg.pep
MSIEQMFLMQTQAVQAIGQTLAAIQQQQQQQQQAPPQPQMPQMPRDKRAEFMRGHPPTFAHSSDPMDAEDWLRTVERELHTAQCDDREKVLYGPRLLRGAAQSWWESYLATHAHPDAITWEKFRGSFRQYHVPAGLMTVKKEEFLALKQGPLSVSEYRDKFLQLSRYAPEDVNTDAKRQYRFLRGLVDPLQYQLMNHTFPTFQHLIDRAIMTERKRKEMEDPNQQSSQAAPAQVGNRACFHCGEQGHWVMQCPKKAAQQQSGPNAPAKQNVPQPGAGNRSQPRYNHGRLNHLEAEAVQETPGMIVGMFPVDSHIAEVLFDTGATHSFITASWVEAHNLLITTMSTPIQIDSAGGRIRADSICLNISVEIRGIAFPANLIVMGTQGIDVILGMNWLDKYQAVISCDKRTIKLVSPLGGEVVTELVPPEPKKGSCYQIAVDSSEADPIESIKVVSEFPDVFPKDLPGMPPERKVEFAIELLPGTAPIFKRAYRISGPELDELKKQIDELSEKGYIRPSTSPWAAPVLFVEKKDGTKRMCIDYRALNEVTIKNKYPLPRIEDLFDQLRGASVFSKIDLRSGYHQLRIRPSDIPKTAFISKYGLYEFTVMSFGLTNAPAFFMNLMNSVFMDYLDKFVVVFIDDILVYSQSEEEHANHLRMVLQRLREHQLYAKLSKCEFWISEVLFLGHIINKEGLAVDPKKVADVLNWKAPTDARGIKSFIRMAGYYRRFIEGFSKIAKPMTALLGNKVEFKWTQKCQEAFEALKEKLTTAPVLVLPDVHKPFSVYCDACYTGLGCVLMQEGRVVAYSSRQLKVHEKNYPIHDLELSAVVHALKSWRHYLYGQKCDVYTDHKSLKYIFTQSELNMRQRRWLELIKDYELEIHYHPGKANVVADALSRKSQVNLMVARPMPYELAKEFDRLSLGFLNNSRGVTVELEPTLEREIKEAQKNDEKISEIRRLILEDKGKDFRKDAEGVIWFRDRLCVPNVQSIRELILKEAHETAYSIHPSSEKMYQDLKKKFWWYGMKREIAEHVAMCDSCRRIKAEHQRPAGLLQPLQIPQWKWDEIGMDFIVGLPRTRAGYDSIWVVVDRLTKSAHFIPVKTNYSSAVLAELYMSRIVCLHGVPKKIVSDRGTQFTSHFWQQLHEALGTHLNFSSAYHPQTDGQTERTNQILEDMLRACALQDQSGWDKRLPYAEFSYNNSYQASLKMSPFQALYGRSCRTPLQWDQPGESKGVRRFGVKGKLAPRYIGPYQVLARRGEVAYQLSLPENLSVVHDVFHVSQLKKCLRVPEEQLPVEGLEVQEDLTYVEKPVQILEIADRVTRRKTIRMCKVRWNHHSEEEATWEREDDLMAKYPELFASQP

SEQ ID NO: 10627 - protein, 1063 aa, Zea mays
  Clone ID: TF_ZM3651.C4.o2.fg.pep
MSIEQMFLMQTQAVQAIGQTLAAIQQQQQQQQQAPPQPQMPQVPRDKRAEFMRGHPPTFAHSSDPMDAEDWLRTVERELHTAQCDDREKVLYGPRLLRGATQSWWESYLATHANPDTITWEEFRGSFRQYHVPAGLMTVKKEEFLALKQGSSSVSEYRDRFLQLSRYAPEDVNTDAKRQYRFLRGLVDPLQYQLMNHTFPTFQHLIDRAIMTERKRKEMEDRKRKISGPQSGSSSRPRFSGNQPQQFRQNQRPPQQHQQRQQYQQFQRQYPQNQYQNRQSNQSGGQFQKQNQQAPRLPAPANQQNSQAAPAPVGNRACFHCGEQGHWVMQCPKKAAQQQSGPNAPAKQNVSQPGAGNRSQQRYNHGRLNHLEAEAVQETPDMTVGMFPVDSHIAEVLFDTGATHSFITASWVEAHNLPTTTMSTPIQIDSAGGRIRADSICLNISVKIRGIAFPANLIVMGTQGIDVILGMNWLDKYQAVISCDKRTIKLVSPLGEEVVTELVPPEPKKGSCYQMTVDSSEADPIESIKVVSEFPDVFPKDLPGMPPERKVEFAIELLPGTAPIFKRAYRISGPELDELKKQIDELSEKGYIRPSTSPWAAPVLFVEKKDGTKRMCIDYRALNKVTIKNKYPLPRIEDLFDQLRGASVFSKIDLRSGYHQLRIRPSDIPKTAFITKYGLYEFTVMSFGLTNAPAFFMNLMNSVFMDYLDKFAVVFIDDILIYSQSEEEHADHLRMVLQRLREHQLYAKLSKCEFWISEVLFLGHIINKEGLAVDPKKVADILNWKAPTDARGIKSFIGMAGYYRRFIEGFSKIAKPMTALLGNKVEFKWTQKCQEAFEALKEKLTTAPVLVLPDVHKPFSVYCDACYTEMRCLHRPQESEVHIHSIRIEHEATKMVRENLKIAQSRQRSYADTRRRELSFEVGDFVYLKVSPIRGVRRFGVKGKLAPRYIGPYQILARRGEVAYQLSLPENLSAVHDVFHVSQLKKCLRVPEEQLPVEGLEVQEDLTYVEKPAQILEVADRVTRRKTVRMCKVRWSHHSEEEATWEREDDLKAKYPELFASQP

SEQ ID NO: 10628 - protein, 1456 aa, Zea mays
  Clone ID: TF_ZM4166.C3.o1.fg.pep
MESHDLRAERESRLVGGNEIDGFGYDYGTGKWYSFRLERMARLRHTARKSVIPFLPSRLAERPLRRPVAGQSSRLERLHHCLHEEQERRRQEQQGSSFSLQQEIESVRSCSPVLPLEAPLAPPLDAPASGVAAGGDSDDGGGDDSSSHDTDFSADQEPEGWVARPITRDAARGCHFHDALGTLLRWALKRCTWSIEYRCVVYQHSRGVYPDRWEATCLMSENRRRGGRRAQQEQAAQQEEVPQQQQLPPPPPMSIEQMFLMQTQAVQAIGQTLAAIQQQQQAPPQPQMPQMPRDKRAEFMRGLMTVKKEEFLALKQGSSSVSEYRDRFLQLSRYAPKDVNTDAKRQYRFLRGLVDPLQYQLMNHTFPTFQHLIDRAIMTERKRKEMEDRKRKISGPPPGSSNRPRFSGNQPQQFRQNQHPPQYQQFQRQYPQHQYQNRQNNQSGGGQFQRQNQQTPRLPAPAAQQNSQAAPAQIGNRACFHCGEQGHWVMQCPKKAAQQQSGPNAPAKQNVSQPGAGNRSQPRYNQGRLNHLEAEAVQKTPGMIVGIFPVDSHIAEVLFDTGATHSFITASWVEAHNLPITTMSTPIQIDSAGGTIRADSICLNVSVEIRGIAFSANLIVMGTQGIYVILGMNWLDKYQAVISCDKRTIKLVSPLGEEVVTELVPPEPKKGSCYQMVVDSSEADPIESIKVVSEFPDVFPKDLPGMPPERKVEFAIELLPGTAPIFKRAYRVSGPELVELKKQIDELSEKGYIRPSTSPWAAPVLFVEKKDGTKRMCIDYRALNEVTIKNKYPLPRIEDLFDQLRGASVFSKIDLRSGYHQLRIRPSNIPKTAFVTKYGLYEFTVMSFGLTNAPAFFMNLMNSVFMDYLDKFMVVFIDDILIYSQSEEEHADHLRMVLQRLREHQLYPKLSKCEFWISEVLFLGFSKIAKPMTALLGNKVEFKWTQRCQEAFEALKEKLTTAPVLVLPDVHKPFSVYCDACYTGLGCKANVVADALSRKSQVNLMVARPMPYELAKEFDRLSLGFLNNSRGVTVELEPTLEREFKEAQKNDEKISEIRRLILDGRGKDFWEDAEGVVWFKDRLCVPNVQSIRELILKEAHETAYSIHPGSEKMYQDLKKKFWWYGMKREIAEHVAMCDSCRRIKAEHQRPTGLLQPLQIPQWKWDEIGMDFIVGLPHTRAGYDSIWVVVDRLTKSAHFIPVKTNYSSVVLVELYMSRIVCLHGVPKKIVSDRGTQFTSHFWQQLHEALGTHLNFSSAYHPQTDGQTERTNQILEDMLRACALQDQSGWDKRLPYAEFSYNNSYQASLKMSPFQALYGRSCRTPLQWDQPGEKQVFGPDILLEAKENIKMVRENLKIAQSRQRSYADTRRRELSFEVGDFVYLKVSPIRGVRRFGVKGKLAPRYIGPYQILARRGEVAYQLSLPENLSAVHDVFHVSQLKKCLRVPEEQLPVEGLEV

SEQ ID NO: 10629 - protein, 1422 aa, Zea mays
  Clone ID: TF_ZM4276.C3.o1.fg.pep
MSIEQMFLMQTQTVQAIGQTLAAIQQQQQQQQQAPPQPQPQMPRDKRAEFMRGHPPTFAHSSDPMDAEDWLRTVERELHTAQCDDREKVLYGPRLLRGAAQSWWESYLATHAHPDAITWEEFRGSFRQYHVLAGLMTVKKEEFLALKQGPSSVSEYRDRFLQLSRYAPEDVNTDAKRQYRFLRGLVDPLQYQLMNHTFPTFQHLIDRAIMTERKRKEMEDRKRKISGPQPGSSNRPRFSGSQPQQFRQNQRPPQQHQQFQWQYPQHQYQNRQSNQSGGQFQRQNQQAPRLPAPAAQQNSQAAPAQVGNRACFHCGEQGHWVMQCPKKATQQQSGPNAPAKQNVPQPGAGNRSHTRYNHGRLNHLEAEAVQETPGMIVGMFPVDSHIAEVLFDTGATHSFITASWVEAHNLPITTMSTPIQIDSAGGRIRADSICLNISVEIRGIAFPANLIVMGTQGIDVILGMNWLDKYQAVISCDERTIKLVSPLGEEVVTKLVPPGPKKGSCYQMAVDSSEADPIESIKVVSEFPNVFPKDLPGMPPERKVEFAIELLPGTAPIFKRAYRISGPELVELKEQIDELSEKGYIRPSTSPWAAPVLFVEKKDGTKRMCIDYRALNEVTIKNKYPLPRIEDLFDQLRGASVFSKIDLRSGYHQLRIRPSDIPKTAFISKYGLYEFTMMSFGLTNAPAFFMNLMNSVFMDYLDKFVGVFIDDILIYSQSEEEHADHLRMVLQRLREHQLYTKLSKCEFWISEVLFLGHIINKEGLAVDPKKVADILNWKAPTDARGIKSFIGMAGYYRRFIEGFSKIAKPMTALLGNKVEFKWTQKCQEAFEALKEKLTTVPVLVLPDVHKPFSVYCDACYTGLGCVLMQEGRVVAYSSRQLKVHEKNYPIHDLELAAVVHALKTWRHYLYGQKCDVYTDHKSLKYIFTQSELNMRQRRWLELIKDYELEIHYHPGKANVVADALSRKSQVNLMVARPMPYELAKEFDRLSLGFLNNSRGVTVELEPTLEREIKEAQKNDEKISEIRRLILDGRGKDFREDAEGVIWFKVRLCVPNVQSIRELILKEAHETAYSIHPGSEKMYQDLKKKFWWYGMKREIAEHVAMCGSCRRIKAEHQRPAGLLQPLQIPQWKWDEIGMDFIVGLPRTRAGYDSIWVVVDRLTKSAHFIPVKTNYSSAVLAELYMSRIVCLHGVPKTIVSDRGTQFTSHFWQQLHEALGTHLNFSSAYHPQTDGQTERTNQILEDMLRASEENIKMVRENLKIAQSRQRSYADTRRRELSFEVGDFVYLKVSPIRGVRRFGVKGKLAPRYIGPYQILARRGEVAYQLSLPENLSAVHDVFHMSQLKKCLRVPEEQLPVEGLEVQEDLTYVEKPVQILEVADRVTRRKTIRMCKVRWNHHSEEEATWEREDDLMAKYPELFASPP

SEQ ID NO: 10630 - protein, 1442 aa, Zea mays
  Clone ID: TF_ZM4452.C4.o1.fg.pep
MSIEQMFLMQTQAVQAIGQTLAAIQQQQQQQQQAPPQPQMPQMPRDKRAEFMRGHPPTFAHSSDPMDAEDWLRTVEWELHTAQCDDREKILYGPRLLRGAAQSWWESYLATHAHPDAITWEEFRGSFRQYHVPVGLMTVKKEEFLALKQGSLSVSEYRDKFLQLSRYAPEDVNTDAKRQYRFLRGLVDPLQYQLMNHTFPTFQHLIDRAIMTERKRKEMEDRKRKISGPQPGSSNRPRFSGNQPQQFRQNQRPPQQHQQFQRQYPQHQYQNRQSNQSGGQFQRQNQQAPRLPAPANQQNSQAAPAQVGNRACFHCGEQGHWVMQCPKKAAQQQSGPNAPAKQNVSQPGSGNRSQPRYNHGRLNHLEAEAVQETPSMIVGMFPVDSHIAEVLFDTGATHSFITASWVEAHNLPITTMSTPIQIDSAGGRIRADSICLNISVKIRGIAFPANLIVMGTQGIDVILGMNWLDKYQAIISCDKRTIKLVSPLGEEVVTELVPPEPKKGSCYQLAVDSSEADPIESIKVVSEFPDVFPKDLPGMPPERKVEFAIELLPGTAPIFKRAYRISGPELVELKEQIDELLEKGYIRPSTSPWAAPVLFVEKKDGTKRMCIDYRALNEATIKNKYPLPRIEDLFDQLRGASVFSKIDLRSGYHQLRIRPSDIPKTAFISKYGLYEFTVMSFGLTNAPAFFMNLMNSVFMDYLDKFVVVFIDDILIYSQSEEEHADHLRMVLQRLREHQLYAKLSKCEFWINEVLFLGHIINKEGLAVDPKKVADILNWKAPTDARGIKSFIGMAGYYRRFIEGFSKIAKPMTALLGNKVEFKWTQKCQEAFEALKEKLTTAPVLVLPDVHKPFSVYCDACYTGLGCVLMQEGRVVAYSSRQLKVHERNYPIHDLELAAVVHALKSWRHYLYGQKCDVYTDHKSLKYIFTQSELNMRQRRWLELIKDYELEIHYHPGKANVVADALSRKSQVNLMVARPMPYELAKEFDRLSLEFLNNSRGVTVELEPTLEREIKEAQKNDEKISEIRRLILEGKGKDFRKDAEGVIWFRDRLCVPNVQSIRELILKEAHETAYSIHPGSEKMYQDLKKKFWWYGMKREIAEHVAMCDSCRRIKAEHQRPVGLLQPLQIPQWKWDEIELYMSRIVCLHGVPKKIVSDRGTQFTSHFWQQLHEALGTHLNFSSAYHPQTDGQTERTNQILEDMLRACALQDQSGWDKRLPYAEFSYNNSYQASLKMSPFQALYGRSCRTPLQWDQPGEKQVFGPDILLEAEENIKMIRENLKIAQSRQRSYADTRRRELSFEVGDFVYLKVSPIRGVRRFGVKGKLAPRYIGPYQVLARRGEVAYQLSLPENLSAVHDVFHVSQLKKCLRVPEEQLPVEGLEVQEDLTYVEKPVQILEVADRVTRRKTIRMCKVRWDHHSEEEATWEREDDLMAKYPELFASQP

SEQ ID NO: 10631 - protein, 620 aa, Zea mays
  unsure (1)..(620): unsure at all Xaa locations
  Clone ID: TF_ZM4455.C2.o1.fg.pep
MGLGVCGSLCQGGDEDDGFGYDYGTSKWYSFRLERMARLRHTARKSVIPFLPSRLAKRPLRRPVTGQSSHLERLHHRLQEEQEGRRQELEQQDSSFSLQQEIESVRSCSPVLPLGAPPAPPLSAPAAGVAAGGDPDDEGGDSSSSHNTDLSEEQELEGWVARPITRDVARGCHFHDALDTLLHRALDRRTWSIEYRCVVFQHSRGVYPDRWEATCLVPRPENSLQGAGVCSEHYSISERDSTKADMQEAARRALSHYCSVLGGVADGLNLNCGLSARSIITWRMAPPLPSGLSTRTAHLSVDTMLKMSDNRRRGGRRAQQEQAAPQDEAPHQQLPPPPLMMIERMFLMQTQVVQAIGQTLAAIQQQQPPPQPQMPRDKRAEFMRGLMTVKKEEFLALKQGPMSVSEYRDKFLQLSRYAPEDVNTDAKRACFHCGEQGHWVMQCPKKAAQQQSGPSAPAKQNVSQPGPGNRSQPHYNHGRLNHLEAEAVQETPGGEVVAELISPEPRKGSCHQMATDSKEPDSLEIIKVVSEFSDVFPEDLPGMPPERKVEFAIELLSGTAPISKRAYRVSGPELVELKKQINELSEKGYIRPSTSPWXCPVLFVEKKDGTRRMCIDYRAL

SEQ ID NO: 10632 - protein, 1521 aa, Zea mays
  Clone ID: TF_ZM4455.C2.o4.fg.pep
MLICSVLLKNSILFPYAARFARSVLMCGCILQMSENRRRGGRRAQQERAAQQDEVPQQQHLPPPPPISIEQMFLMQTQAVQAIGQTLAAIQQQQQQQQAPPQPQMPQMPRDKRAEFMRGHPPTFAHSSDPMDAEDWLRTVERELHTAQCDDREKVLYGPRLLRGAAQSWWESYLATHANPDTITWEEFRGSFRQYHVPAGLMTVKKEEFLALKQGPLSVSEYRDKFLQLSRYAPEDVNTDAKRQYRFLRGLVDPLQYQLMNHTFPTFQHLIDRAIMTERKRKEMEDRKRKISGPQPGSSNRPRFSGNQPQQFRQNQRPPQQHQQFQRQYPQHQYQNRQSNQSGGQFQRQNQQAPRLPAPANQQNSQAAPAQVGNRACFHCGEQGHWVMQCPKKAAQQQSGPNAPAKQNVPQPGAGNRPQQRYNHGRLNHLEAEAVQETPGMIVGMFPVDSRIAEVLFDTGATHSFITASWVEAHNLPITTMSTPIQIDSAGGRIRADSICLNISVEIRGIAFPANLIVMGTQGIDVILGMNWLDKYQAVISCDKRTIKLVSPLGKEVVTELVPPEPKKGSCYQMAVDSSEADPIESIKVVSEFPDVFPKDLPGMPPERKVEFAIELLPGTAPIFKRAYRISGPELVELKKQIDELSEKGYIRPSTSPWAAPVLFVEKKDGTKRMCIDYRALNEVTIKNKYHLPRIEDLFDQLRGAIDLRSGYHQLRIRPSDIPKTAFITKYGLYEFTVMSFGLTNAPAFFMNLMNSVFMDYLDKFVVVFIDDILVYSQSEEEHADHLRMVLQRLREHQLYAKLSKCEFWISEVLFLGHIINKEGLAVDPKKVADILNWKAPTDARGIKSFIGMAGYYRRFIEGFSKIAKPMTALLGNKVEFKWTQKCQEAFEALKEKLTTTPVLVLPDVHKPFSVYCDACYTGLGCVLMQEGRVVAYSSRQLKVHEKNYPIHDLELAAVVHALKTWRHYLYGQKCDVYTDHKSLKYIFTQSELNMRQRRWLELIKDYELEIHYHPGKANVVADALSRKSQVNLMVARPMPYELAKEFDRLSLGFLNNSRGVTVELEPTLEREIKEAQKNDEKISEIRRLILEGKGKDFREDAEGVIWFKDRLCVPNVQSIRELILKEAHETAYSIHPGSEKMYQDLKKKFWWYGMKREIAEHIPQWKWDEIGMDFIVGLPRTRAGYDSIWVVVDRLTKSAHFIPVKTSYNSAVLAELYMSQIVCLHGVPKKIVSDRGTQFTSHFWQQLHEALGTHLNFSSAYHPQTDGQTERTNQILEDMLRACVLQDQSGWDKRLPYAEFSYNNSYQASLKMSPFQALYGRSCRTPLQWDQPGEKQVFGPDILLEAEENIKMVRENLKIAQSRQRSYADTRRRELSFEVGDFVYLKVSPIRGVRRFGVKGKLAPRYIGPYQILARRGEVAYQLSLPEKLSAVHDVFHVSQLKKCLRVPEEQLPVEGLEVQEDLTYVEKPAQILEIADRVTRRKTIRMCKVRWNHHSEEEATWEREDDLMAKYPELFASQP

SEQ ID NO: 10633 - protein, 720 aa, Zea mays
  Clone ID: TF_ZM4545.C13.o2.fg.pep
MSIEQMFLMQTQAVQAIGQTLAAIQQQQQQQQQAPPQPQMPRDKRAEFMRGHPPTFAHSSDPMDAEDWLRTVERELHTAQCDDREKVLYGPRLLRGAAQSWWESYLATHAHPDAITWEEFRGSFRQYHVPAGLMTVKKEEFLALKQGPSSISEYRDKFLQLSRYAPEDVNTDAKRQYRFLRGLVDPLQYQLMNHTFPTFQHLIDRAIMTERKRKEMEDRKRKISGPQPGSSNRPRFSGNQPQQFRQNQRPPQQHQQFQRQYPQHQYQNRQSNQSGGQFQRQNQQAPRLPAPTAQQNNQAAPAQVGNRACFHCGEQGHWVMQCPKKAAQQQSGPNAPAKQNVPQPGAGNRSQPRYNHGRLNHLEAEAVQETPDMIVVGLPRTRAGYDSIWVVVDRLTKSAHFIPVKTNYSSAVLAELYMSRIVCLHGVPKKIVSDRGTQFTSHFWQQLHEALGTHLNFSSAYHPQTDGQTERTNQILEDMLRAYALQDQSGWDKRLPYAEFSYNNSYQASLKMSPFQALYGRSCRTPLQWDQPGEKQVFGPDILLEAEENIKMVRENLKIAQSRQRSYADTRRRELSFEVGDFVYLKVSPIRGVRRFGVKGKLAPRYIGPYQILARRGEVAYQLSLPENLSAVHDVFHVSQLKKCLRVPEEQLPVEGLEVQEDLTYVEKPVQVLEVADRVTRRKTIRMCKVRWNHHSEEEATWEREDDLMAKYPELFASQP

SEQ ID NO: 10634 - protein, 1434 aa, Zea mays
  Clone ID: TF_ZM4578.C2.o10.fg.pep
MSIEQMFLMQTQAVQAIGQTLAAIQQQQQQQQQAPPQPQMPQMPRDKRAEFMRGHPPTFAHSSDPMDAEDWLRTVERELHTAQCDDREKVLYGPRLLRGAAQSWWESYLATHAHPDAITWEEFRGSFRQYHVPAGLMTVKKEEFLALKQGSLSVSEYRDRFLQLSRYAPEDVNTDAKRQYRFLRGLVDPLQYQLMNHTFPTFQHLIDRAIMTERKRKEMEDRKRKISGPQPGSSNRPRFSGNQPQQFRQNQRPPQQHQQFQRQYPQHQYQNRQSNQSGGQFQRQNQQAPRLPAPASQQNSQAAPAQVGNRACFHCGEQGHWVMQCPKKAAQQQSGPNAPAKQNVPQPGAGNRSQSRYNHGRLNHLEAEGVQETPGMIVGMFPVDSHIAEVLFDTRATHSFITASWVEAHNLPITTMSTPIQIDSAGGRIRADSICLNISVEIRGIAFSANLIVMGTQGIDVILGMNWLDKYQAVISCDKRTIKLVSPLGEEVVTELVPPEPKKGSCYQIAVDSSEADPIERIKVVSEFPDVFPKDLPGMPPERKVEFAIELLPGTAPIFKRAYRISGPELVELKKQIDELSEKGYIRPSTSPWAAPVLFVEKKDGTKRMCIDYRALNEVTIKNKYPLPRIEDLFDQLRGASVFSKIDLRSGYHQLRIRPSDIPKTAFISKYGLYEFTVMSFGLTNVPAFFMNLMNSVFMDYLDKFVVVFIDDILVYYQSEEEHADHLRMVLQRLREHQLYAKLSKCEFWISEVLFLGHIINKEGLAVDPKKVADILNWKAPTDARGIKSFIGMAGYYRRFIEGFSRIAKPMTALLGNQVEFKWTQKCQEAFEALKEKLTTTPVLVLPDVHKPFSVYYDACYTELAAVVHALKTWRHYLYGQKCDVYTDHKSLKYIFTQSELNMRQRRWLELIKDYELEIHYHPGKANVVADALSRKSQVNLMVTRPMPYELAKEFDRLSLGFLNNSRGVTVELEPTLEREIKEAQKNDEKISEIRRLILDGRGKDFREDAEGVIWFKDRLCVPNVQSIRELILKEAHETAYSIHPGSEKMYQDLKKKFWWYGMKREIAEHVAMCDSCRRIKAEHQRPAGLLQPLQIPQWKWDEIVVDRLTKSAHFIPVKTNYSSAVLAKLYMSRIVCLHGVPKKIVSDRGTQFTSHFWQQLHEALGTHLNFSSAYHPQTDGQTERTNQILEDMLRACALQDQSGWDKRLPYVEFSYNNSYQASLKMSPFQALYGRSCRTPLQWDQPKEKQVFGPEILLEAEENIKMVRENLKIAQSRQRSYADTRRRELSFEVGDFVYLKVSPIRGVRRFGVKGKLAPRYIGPYQILARRGEVAYQLSLPENLSVVHDVFHVSQLKKCLRVPEEQLLVEGLEVQEDLTYVEKPVQILEVADRVTRRKTIRMCKVRWNHHSEEEATWEREDDLMAKYPELFASQP

SEQ ID NO: 10635 - protein, 1846 aa, Zea mays
  Clone ID: TF_ZM4581.C2.o8.fg.pep
MMARLRHTARKSVIPFLPSRLAERPLRRPVAGQSSHLERLHHHLHEEQEHRRQEQQGSSFSLQQEIESVRSCSPVLPLEAPPAPPLGAPAPGVAAGGDPDDGGGDDSSSHDTDFSADQEPEGWVARPITRDAARGCHFHDALDTLLRRALDRRTWSIEYRCVVYQHSRGVYPDHWEATCLVRRPDNILQGAKVCSEHYSISERDSAEAAMQDAARRALSHYCSVLGGMSENRRRGGRRAQQEQAAQQEEVPQQQQLPPPPPMSIEQMFLMQTQAVQAIGQTLAAIQQQQQQPPPQPQMPQMPRDKCAEFMRGHPPTFAHSSDPMDAEDWLRMWNGNCIPLSAMTGRKFCLMTVKKEEFLALKQGSSSLSEYRDRFLQLPCYAPEDVNTDAKRQYRFLRGLVDPLQQNQRPPQHQQFQRQYPQHQYQNRQNNQSGGGQFQRQNQQAPRLPAPATQQNSQVAPAQVGNRACFHCGEQGHWVMQCPKKAAQQQSGPNAPAKQNVSQPGAGNRSQPRYNHGRLNHLEAEAVQETPDMIICMFPVDSHIAEVLFDTGATHSFITASWVEAHSLPITTMSTPIQIDSAGGRIRADSICLNVSVEIRGIAFPANLIVMGTQGIDVILGMNWLDKYQAFISCDKRTIKLVSPLGEEVVTELVPPKPKKGSCYQMAVDSSEADPIESIKVVSEFPDVFPKDLPGMPPERKVEFAIELLPGTAPILKRAYRVSGPELVELKKQIYELSEKGYIRPSTSPWAAPVLFVEKKDGTRRMCIDYRALNEVTIKNRYPLPRIEDLFDQLRGASVFSKIDLRSGYHQLMIRPSDIPKMAFITKYGLYEFTVMSFGLTNAPAFFMNLMNSVFMDYLDKFVVVFYDDILIYSQGEEEHADHLRMVLQILREHQLYANLSKCEFWISEVMFLGHIINKEGLAVDSKKVADILNWKAPTDARGIKSFVGMAGYYRRFIEGFSKVAKPMTALLGNKLKVHEKNYPIHDLELAAVVHALKTWRHYLYGQKCDVYTDHKSLKYIFTQSELNMRQRRWLELIKDYELEIHYHPGKANVVADALSRKSQVNLMVACPMPYELAKEFHRLSLGFLNNTRGVTIELEPTLEREIKEAQKNDEKISEIRRLILDGKGKDFREDAEGVIWFKDRLCVPNVQSIRELILKEAHETAYSIHHGSEKMYQDLKKKFWWILPGPLLCAHFICLRANIRRYPGDWCRTGGGSQISSPSMAPTSGSGSGTQANRPPLSSRGAATRRGRVTSNRSTINRADAAGTPTSTPTPSADPSSAGDATASGTPTPSSSTNAPPAAAQPQSGIDNVIVEDDDTVIVGTKRKLKSDVWLEFEQVTVGGKLKAQCNWCKKQLVGDSKAGTTHLHSHLGSCQSRQVRKGLKQATLKLSKDEHGAIIVDKYVFDQQVARKELAIMICVHEYPLSMVDHVGFRRFCAALQPLFKTMSRNTIKKDILDMFIYVPAPHTGEIISDVLYEVLQDWQIEKKVSTVTLDNCTTNDNLMCCMQDKLPLSSLMLDGKLYLEEPTLPRTQELDIISWWQHAGIKYPTLRKIARDIMAIPVTTVASESVFSTGGRCTALCVAVQQSKTKTCVADLLLLSKEKHVLLSKLLSKLQRKSLLSKEMKPKISLFSAYHPQTDGQTKRTNQILEDMLRACALQDQSGWDKRLPYAEFSYNNIYQASLKMSPFQALYGRSCRTPLQWDQPGEKQVFGPDILLEAEENIKMVRENLKIAQSRQRSYADTRRRELSFEVGDFVYLKVSPIRGVRRFGVKGKLAPRYIGLYQILARRGEVAYQLSLPENLSAVHDVFHVSQLKKCLRVPEEQLPVEGLEVQEDLTYIEKPA

SEQ ID NO: 10636 - protein, 1484 aa, Zea mays
  Clone ID: TF_ZM4632.C2.o2.fg.pep
MSIEQMFLMQTQAVQAIGQTLAAIQQQQQQQAPPQPQMPQMPKDKRAEFMRGHPPTFAHSSDPMDAEDWLRTVERELHTAQCDDREKVLYGPRLLRGAAQSWWESYLATHAHPDAITWEEFRGSFRQYHVPAGLMTVKKEEFLALKQGPLSVSEYRDRFLQLSRYAPEDVNTDAKRQYRFLRGLVDPLQYQLMNHTFPTFQHLIDRAIMTERKRKEMEDRKRKISGPQPGSSSRPRFSGNQPQQFRQNQRPPQQHQQFQRQYPQNQYQNRQSNQSGGQFPKQNQQAPRLPAPANQQNSQAAPVQVGNRACFHCGEQGHWVMQCPKKAAQQQSGPNAPAKQNVSQPGAGNRSQPRYNHGRLNHLEAEAVQETPGMIVGMFPVDSHIAEVLFDTGATHSFITASWVEAHNLPITTMSTPIQIDSAGGRIRADSICLNISVKIRGIAFPANLIVMGTQGIDVILGMNWLDKYQAVISCDKRTIKLVSPLGKEVVTELVPPEPKKGSCYQMVVDSSEADPIESIKVVSEFSDVFPKDLPGMPPERKVEFAIELLPGTAPIFKRAYRISGPELDELKKQIDELSEKGYIRPSTSPWAAPVLFVEKKDGTKRMCIDYRALNEVTIKNKYPLPRIEDLFDQLRGASVFSKIDLRSGYHQLRIRPSDIPKTAFISKYGLYEFTVMSFGLTNAPAFFMNLMNSVFMDYLDKFVVVFIDDILVYSQSEEEHADHLRMVLQRLREHQLYAKLSKCEFWISEVLFLGHIINKEGLAVDPKKVADILNWKAPTDAKGIKSFIGMAGYYRRFIEGFSKIAKPMTALLGNKVEFKWTQKCQEAFEALKEKLTTAPVLVLPDVHKPFSVYCDACYTGLGCVLMQEGRVVAYSSRQLKVHEKNYPIHDLELAAVVHALKTWRHYLYGQKCDVYTDHKSLKYIFTQSELNMRQRRWLELIKDYELEIHYHPGKANVVADALSRKSQINLMVARPMPYELAKEFDRLSLGFLNNSRGVTVELEPTLEREIKEAQKNDEKISEIRRLILDGKGKDFREDAEGVIWFKDRLCVPNVQSIRELILKEAHETAYSIHPGSEKMYQDLKKKFWWYGMKREIAEHVAMCDSCRRIKAEHQRPAGLLQPLQTPQWKWDEIGMDFIVGLPRTRAGYDSIWVVVDRLTKSAHFIPVKTNYNSAVLAELYMSRIVCLHGVPKKIVSDRGTQFTSHFWQQLHEALGTHLNFSSAYHPQTDGQTERTNQILEDMLRACALQDQSGWDKRLPYAEFSYNNSYQASLKMSPFQALYGRSCRTPLQWDQPGEKQVFGPDILLEAEENIKMVRENLKIAQSRQRSYADTRRRELSFEVGDFVYLKVSPIRGVRRFGVKGKLAPRYIGPYQILAKRGEVAYQLSLPENLSAVHNVFHVSQLKKCLRVPEEQLPVEGLEVQEDLTYVEKPAQILEIADRVTRRKTIRMCKVRWNHHSEEEATWEREDDLVAKYPELFASQP

SEQ ID NO: 10637 - protein, 1823 aa, Zea mays
  Clone ID: TF_ZM4640.C7.o1.fg.pep
MKLWKETSRSSKITTSSRCGLAATPSRLPVKAAMARLRHTARKSVIPFLPSRLAERPLRRPVAGQSSHLERLHHRLREEQERRRQEQQGSSFSLHQEIESVRSCSPVLPLEAPPAPPLGAPASGVAAGGDPDDGDGDDSSSHDTDFSANPEPEGWVARPITRDAARGCHFHDALDTLLRRAFDRHTCRGVYPDRWEATCLVRCPENSLQGAEACSEHYSISERDSAEAAMQDAARRALSHYCSVFGGAADGLDLKYYPRRPSGSTGGVIVSPVGEGNPRLSSTVNLAAVLNTELDHALDELSRARAEIALLRAERAERHHLDGGSPAPMSENRRRGGRRAQQERAAQQDEVPQQQHLPPPPPMSIEQMFLMQTQAVQAIGQTLATIQQQQQQQQQAPPQPQMPQIPRDKRAEFMRGHPPTFAHSSDPMDAEDWLRTVERELHTAQCDDREKVLYGPRLLRGAAQSWWESYLATHAHPDAITWEEFRGSFRQYHVPAGLMTVKKEEFLALKQGSSSVSEYRDRFLQLSRYAPEDVNTDAKRQYRFLRGLVDPLQYQLMNHTFPTFQHLIDRAIMTERKRKEMEDRKRKISGPQPGSSNRPRFSGNQSQQFRQNQRPPQQHQQFQRQYPPHQYQNRQSNQSGGQFQRQNQQAPRLPAPANQQNSQAAPAQVGNRACFHCGEQGHWVMQCPKKAAQQQSGPSAPAKQNVPQHGVGNRSQPRYNHGRLNHLEAEAVQDTPGMIVGMFPVDSHIAEVLFDTGATHSFITASWVEAHNLPITAMSTPIQIDSAGGRIRADSICLNISVEIRGIAFPANLIVMGTQGIDVILGMNWLDKYQAVISCDKRTIKLVSPLGKEVVTELVPPEPKKGSCYQIAVDSSEADPIESIKVVSEFPDVFPKDLPGMPPERKVEFAIELLPGTAPIFKRAYRISGPELDELKKQIDELSEKGYIRPSTSPWAAPVLFVEKKDGTKRMCIDYRALNEVTIKNKYPLPRIEDLFDQLRGASVFSKIDLRSGYHQLRIRPSDIPKTAFISKYGLYEFTVMSFGLTNAPAFFMNLMNSVFMDYLDKFVVVFIDDILVYSQSEEEHEDHLRMVLQRLREHQLYAKLSKCEFWISEVLFLGHIINKEGLAVDPKKVADILNWKAPTDARGIKSFIGMAGYYRRFIEGFSKIAKPMTALLGNKVEFKWTQKCQEAFEALKEKLTTAPVLVLPDVHKPFSVYCDACYTGLGCVLMQEGRVVAYSSRQLKVHEKNYPIHDLELAAVVHALKTWRHYLYGQKCDVYTDHKSLKYIFTQSELNMRQRRWLELIKDYELEIHYHPGKANVVADALSRKSQVNLMVARPMPYELAKEFDRLSLGFLNNSRGVTVELEPTLEREIKEAQKNDEKISEIRRLILDGRGKDFREDAEGVIWFKDRLCVPNVQSIRELILKEAHETAYSIHPGSEKMYQDLKKKLWWYGIKREIAEHIPQWKWDEIGMDFIVGLPRTRAGYDSIWVVVDRLTKSAHFIPVKTNYSSAVLAELYMSWIVCLHGVPKKIVSDRGTQFTSHFWQQLHEALGTHLNFSSAYHPQTDGQTERTNQILEDMLRACALQDQSGWDKRLPYAEFSYNNSYQASLKMSPFQALYGRSCRTPLQWDQPGEKQVFGPDILLEAEENIKMVRENLKIAQSRQRSYADTRRRELSFEVGDFVYLKVSPIRGVRKFGVKDKLAPRYIGPYQILARRGEVAYQLSLPENLSAVHNVFHVSQLKKCLRVPEEQLPVEGLEVQEDLTYVEKPVQILEVADRVTRRKTIRMCKVRWNHHSEEEATWEREDDLMAKYPELFASQP

SEQ ID NO: 10638 - protein, 1490 aa, Zea mays
  Clone ID: TF_ZM4679.C3.o2.fg.pep
MSIEQMFLMQTQAVQAIGQTLAAIQQQQQQQQQQAPPQPQMPQMPRDKRAEFMRGHPPTFAHSSDPMDAEDWLRTVERELHTAQCDDMEKVLYGPRLLRGAAQSWWESYLATHANPDTITWEEFRGSFRQYHVPAGLMTVKKEEFLALKQGSSSVSEYRDRFLQLSRYAPEDVNTDAKRQYRFLRGLVDPLQYQLMNHTFPTFQHLIDRAIMTERKRKEMEDRKRKISGPQPGSSSRPRFSGNQPQQFRQNQRPPQQRQQHQQFQRQYPQHQYQNRQSNQSGGQFQRQNQQAPRLPAPANQQNSQAAPAQVGNRACFHCGEQGHWVMQCPKKAAQQQSGPNAPAKQNVSQPGAGNRPQQRYNHGRLNHLEAEAVQETPGMIVGMFPVDSHIAEVLFDTGATHSFITASWVEAHNLPTTTMSTPIQIDSAGGRIRADSICLNISVEIRGIAFPANLIVMGTQGIDVILGMNWLDKYQAVISCDKRTIKLVSPLGKEVVTELVPPEPKRGSCYQMAVDSSEADPVESIKVVSEFPDVFPKDLPGMPPERKVEFAIELLPGTAPIFKRAYRISGPELVELKKQIDELSEKGYIRPSTSPWAAPVLFVEKKDGTKRMCIDYRALNEVTIKNKYPLPRIEDLFDQLRGASVFSKIDLRSGYHQLRIRPSDIPKTTFITKYGLYEFTVMSFGLTNAPAFFMNLMNSVFMDYLDKFVVVFIDDILIYSQSEEEHADHLRMVLQRLREHQLYAKLSKCEFWISEVLFLGHIINKEGLAVDPKKVADILNWKAPTDARGIKSFIGMAGYYRRFIEGFSKIAKPMTALLGNKVEFKWTQKCQEAFEALKEKLTTSPVLVLPDVHKPFSVYCDACYTGLGCVLMQEGRVVAYSSRQLKVHEKNYPIHDLELAAVVHALKTWRHYLYGQKCDVYTDHKSLKYIFTQTELNMRQRRWLELIKDYELEIHYHPGKANVVADALSRKSQVNLMVARPMPYELAKEFDRLSLGFLNNSRGVTVELEPTLEREIKEAQKNDEKISEIRRLIPDGRGKDFREDAEGVIWFKDRLCVPNVQSIRELILKEAHETAYSIHPGSEKMYQDLKKKFWWYGMKREIAEHVAKCDSCRRIKAEHQRPAGLLLPLQIPQWKWDEIGMDFIVGLPRTRAGYDSIWVVVDRLTKSAHFIPVKTSYNSAVLTELYMSRIVCLHGVPKKIVSDRGTQFTSHFWQQLHEALGTHLDFSSAYHPQTDGQTKRTNQILEDMLRACALQDQSGWDKRLPYAEFSYNNSYQASLKMSPFQALYGRSCRTPLQWDQPGEKQVFGPDILLEAEENIKMVRENLKIAQSRQRSYADTRRRELSFEVGDFVYLKVSPIRGVRRFGVKGKLAPRYIGPYQILSKRGEVAYQLSLPENLSAVHDVFHVSQLKKCLRVPEEQLPVEGLEVQEDLTYVEKPAQILEIADRVTRRKTIRMCKVRWNHHSEEEATWEREDDLVAKYPELFASQP

SEQ ID NO: 10639 - protein, 1399 aa, Zea mays
  Clone ID: TF_ZM4716.C1.o4.fg.pep
MSIEQMFLMQTQAVQAIGQTLAGIQQQQQQQQAPPQPQMPQMLRDKRGLMTVKKEEFLALKQGSSSVNEYRDRFLQLSRYAPEDVNTDAKRQYRFLRGLVDPLQYQLMNHTFPTFQHLIDRVIMTERKRKEMEDRKRKISGPQPRSNSRPRFSGNQPQQFRQNQRPPQQHQQFQRQYPQHQYQNRQSNQSGGQFQRQNQQAPHLPAPANQQNNQAAPAQVGNRACFHCGEQGHWVMQCPKKAAQQQSGPNAPAKQNVPQPGAGNRSQPRYNHGRLNHLEAEAAQETPGMIVGMFPVDSHIAEVLFDTGAMHSFITALWVEAHNLPITTMSTPIQIDSAGGRIRADSICLNVSVEIRGIAFPANLIIMGTQGIDVILGMNWLDKYQAVISCDKRTIKLVSPLGEEVVTELVPPEPKKGSCYQMAVDSSEADPIERIKVVSEFPDVFPKDLPGMPPERKVEFAIELLPGTAPIFKRAYRISGPELVELKKQIDELSEKGYIRPSTSPWAAPVLFVEKKDGTKRMCIDYRALNEVTIKNKYPLPRIEDLFDQLRGASVFSKIDLRSGYHQLRIRPSDIPKTAFITKYGLYEFTVMSFGLTNAPAFFMNLMNSVFMDYLDKFVVVFIDDILIYSQSEEEHADHLRMVLQRLREHQLYAKLSKCEFWINEVLFLGHIINKEGLAVDPKKVADILNWKAPTDARGIKSFIGMAGYYRRFIEGFSKIAKPMTALLGNKVEFKWTQKCQQAFEALKEKLTTAPVLVLPDVHKPFSVYCDACYTGLGCVLMQEGRVVAYSSRQLKVHEKNYPIHDLELTAVVHALKTWRHYLYGQKCDVYTDHKSLKYIFTQSELNMRQRRWLELIKDYELEIHYHPGKANIVADALSRDSQVNLMVARPMPYELAKEFDRLSLEFLNNSRGVTVELEPTLEQEIKEAQKNDEKISEIRRLILDGRGKDFREDAEGVIWFKDRLCVPNVQSIRELILKEAHETAYSIHPGSEKMYQDLKNKIWWYGMKREIAEHVAMCDSCRRIKAEHQRPAGLLQPLQIPQWKWDEIGMDFIVGLPRTRAGYDSIWVVVDRLTKSAHFIPVKTNYSSAVLAELYMSRIVCLHGVPKKIVSDRGTQFTSHFWQQLHEALGTHLNFSSAYHPQTDGQTERTNQILEYMLRACALQDQSGWDKRLPYAEFSYNNSYQASLKMSPFQALYGRSCRTLLQWDQPGEKQVFGPDILLEAEENIKMVRENMKIAQSRQRSYADTRRRELSFEVGDFVYLKVSPIRGVRRFGVKGKLAPRYIGPYQIISRRGEVAYQLSMPENLSAVHDVFHVSQLKKCLRVPEEQLPVEGLEVQEDLTYVEKPVQILEVADRVTRRKTIRMCKVKWNHHSEEEATWEREDDLMAKYPELFASQP

SEQ ID NO: 10640 - protein, 1481 aa, Zea mays
  Clone ID: TF_ZM4786.C2.o2.fg.pep
MSIEQMFLMQTQAVQAIGQTLAAIQQQQQQQQQQAPPQPQMPQMPRDKRAEFMRGHPPTFAHSSDPMDAEDWLRTVERELHTAQCDDREKVLYGPRLLRGAAQSWWESYLATHANPDTITWEEFRGSFRQYHVPAGLMTVKKEEFLALKQGSSSVSEYRDRFLQLSRYAPEDVNTDAKRQYRFLRGLVDPLQYQLMNHTFPTFQHLIDRAIMTERKRKEMEDRKRKISGPQPGSSSRPRFSGNQPQQFRQNQRPPQQHQQRQQYQQFQRQYPQNQYQNRQSNQSGGQFQKQNQQAPRLPAPANQQNSQAAPAQVGNRACFHCGEQGHWVMQCPKKAAQQQLGPNAPGKQNRYNHGRLNHLEAEAVQETPGMIVGMFPVDSHIAEVLFDTGATHSFITASWVEAHNLPTTTMLTPIQIDSAGGRIRADSICLNVSVEIRGIAFPANLIVMGTQGIDVILGMNWLDKYQAVISCDKRTIKLVSPLGEEVVTELVPPEPKKGSCYQMAVDSSEADPIESIKVVSEFPDVFPKDLPGMPPERKVEFAIELLPGTAPISKRAYRISGPELVELKKQIDELSEKGYIRPSTSPWAAPVLFVEKKDGTKRMCIDYRALNEVTIKNKYPLPRIEDLFDQLRGASVFSKIDLRSGYHQLRIRPSDIPKTAFITKYGLYEFTVMSFGLTNAPAFFMNLMNSVFMDYLDKFVVVFIDDILVYSQSEEEHADHLRMVLQRLREHQLYAKLSKCEFWISEVLFLGHIINKEGLAVDPKKVADILNWKAPTDARGIKSFIGMAGYYRRFIEGFSKIAKPMTALLGNKVEFKWTQKCQEAFEALKEKLTTAPVLVLPDVHKPFSVYCDACYTGLGCVLMQEGRVVAYSSRQLKVHEKNYPIHDLELAAVVHALKTWRHYLYGQKCDVYTDHKSLKYIFTQSELNMRQRRWLELIKDYELEIHYHPGKANVVADALSRKSQVNLMVARPMPYELAKEFDRLSLGFLNNSRGVTVELEPTLEREIKEAQKNDEKISEIRRLILDGRGKDFREDAEGVVWFKDRLCVPNVQSIRELILKEAHETAYSIHPGSEKMYQDLKKKFWWYGMKREIAEHVAMCDSCRRIKAEHQRPAGLLQPLQIPQWKWDEIGMDFIVGLPRTRAGYDSIWVVVDRLTKSAHFIPVKTNYNSAVLAELYMSRIVCLHGVPKKIVSDRGTQFTSHFWQQLHEALGTHLNFSSAYHPQTDGQTERTNQILEDMLRACALQDQSGWDKRLPYAEFSYNNSYQASLKMSPFQALYGRSCRTPLQWDQPGEKQVFGPDILLEAEENIKMVRENLKIAQSRQRSYADTRRRELSFEVGDFVYLKVSPIRGVRRFGVKGKLAPRYIGPYQILSKRGEVAYQLSLPENLSAVHDVFHVSQLKKCLRVPEEQLPVEGLEVQEDLTYIEKPAQILEVADRVTRRKTIRMCKVRWNHHSEEEATWEREDDLMAKYPELFASQP

SEQ ID NO: 10641 - protein, 1492 aa, Zea mays
  Clone ID: TF_ZM4888.C3.o2.fg.pep
MSIEQMFLMQTQAVQAIGQTLAAIQQQQQQQQQAPPQPQMPQVPRDKRAEFMRGHPPTFAHSSDPMDAEDWLRTVERELHTAQCDDREKVLYGPRLLRGAAQSWWESYLATHANPDTITWEEFRGSFRQYHVPAGLMTVKKEEFLALKQGSSSVSEYRDRFLQLSRYAPEDVNTDAKRQYRFLRGLVDPLQYQLMNHTFPTFQHLIDRAIMTERKRKEMEDRKRKISGPQSGSSSRPRFSGNQPQQFRQNQRPPQQHQQRQQYQQFQRQYPQNQYQNRQSNQSGGQFQKQNQQAPRLPAPANQQNSQAAPAQVGNRACFHCGEQGHWVMQCPKKAAQQQSGPNAPAKQNVPQPGAGNRSQQRYNHGRLNHLEAEAVQETPDMTVGMFPVDSHIAEVLFDTGATHSFITASWVEAHKLPITTMSTPIQIDSAGGRIRADSICLNISVKIRGIAFPANLIVMGTQGIDVILGMNWLDKYQAVISCDKRTIKLVSPLGEEVVTELVPPEPKKGSCYQMTVDSSEADPIESIKVVSEFPDVFPKDLPGMPPERKVEFAIELLPGTAPIFKRAYRISGPELDELKKQIDELSEKGYIRPSTSPWAAPVLFVEKKDGTKRMCIDYRALNEVTIKNKYPLPRIEDLFDRLRGASVFSKIDLRSGYHQLRIRPSDIPKTAFITKYGLYEFTVMSFGLTNAPAFFMNLMNSVFMDYLDKFVVVFIDDILVYSQSEEEHADHLRMVLQRLREHQLYAKLSKCEFWISEVLFLGHIINKEGLAVDPKKVADILNWKAPTDARGIKSFIGMAGYYRRFIEGFSKIAKPMTALLGNKVEFKWTQKCQEAFEALKEKLTTAPVLVLPDVHKPFSVYCDACYTGLGCVLMQEGRVVAYSSRQLKVHEKNYPIHDLELAAVVHALKTWRHYLYGQKCDVYTDHKSLKYIFTQSELNMRQRRWLELIKDYELEIHYHPGKANVVADALSRKSQVNLMVARPMPYELAKEFDRLSLGFLNNSRGVTVELEPTLEREIKEAQKNDEKISEIRRLILDGRGKDFREDAEGVVWFKDRLCVPNVQSIRELILKEAHETAYSIHPGSEKMYQDLKKKFWWYGMKREIAEHVAMCDSCRRIKAEHQRPAGLLQPLQIPQWKWDEIGMDFIVGLPRTRAGYDSIWVVVDRLTKSAHFIPVKTNYNSAVLAELYMSRIVCLHGVPKKIVSDRGTQFTSHFWQQLHEALGTHLNFSSAYHPQTDGQTERTNQILEDMLRACALQDQSGWDKRLPYAEFSYNNSYQASLKMSPFQALYGRSCRTPLQWDQPGEKQVFGPDILLEAEENIKMVRENLKIAQSRQRSYADTRRRELSFEVGDFVYLKVSPIRGVRRFGVKGKLAPRYIGPYQILARRGEVAYQLSLPENLSAVHDVFHVSQLKKCLRVPEEQLPVEGLEVQEDLTYVEKPAQILEIADRVTRRKTVRMCKVRWSHHSEEEATWEREDDLKAKYPELFASQP

SEQ ID NO: 10642 - protein, 1486 aa, Zea mays
  Clone ID: TF_ZM4897.C1.o18.fg.pep
MQDAARRALLHYCLVLGGVADGLDLKYYPRCPSGSIGGVIVSPVGEDNPRLNSTVNLAAVLNTELDHALDELSRARAEIALLRAERAERRHLDDGSPAPVGTQHPYRSPRCQRTGAEEEGVLSRSEPLSRKRCPSNSICRPPPPMSIEQMFLMQTQAVQAIGQTLAAIQQQQQQQQQAPPQPQMPQMPTDKRAEFMRGHPPTFAHSSDPMDAEDWLRTVERELHTAQCDDREKVLYGPRLLREAAQSWWESYLATHAHLDAITWEEFRGSFRQYHVPAGLMTVKKEEFLALKQGPLSVSEYRDRFLQLSRYAPEDVNTDAKRQYRFLRGLVDPLQAIMTERKRKEMEDRKRKISGPQPGSTNRPRFSGNQPQQFRQNQRPPQQHQQFQRQYPQHQYQNHQSNQSGGQLQRQNQQAPRLPSPANQQNNQAAPAQVGNRACFHCGEQGHWVMQCPKKAAQQQSGPMPSKAECVSAWKVLFDTGATHSFITASWVQAHNLPITTMSTPIQIDSAGGRIRADSICLNISVEIRGIAFPANLIVMGTQGIDVILGMNWLDKYQAVISCDKRTIKLVSPLGEEVVTELVPSEPKKGSCYQIAVDSSEADPIESIEVVSEFPDVFPKDLPGMPPERKVEFAIELLPGTAPIFKRAYRISGPELVELKEQIDELSEKGYIRPSTSPWAAPVLFVEKKDGTKRMCIDYRALNEVTIKNKYPLPRIEDLFNQLRGASVFSKIDLRSGYHQLRIRPSDIPKTAFITKYGLYEFTVMSFGLTNAPAFFMNLMNSVFMDYLDKFVVVFIDDILIYSQSEEEHADHLKMVLQRLREHQLYAKLSKCEFWINEVLFLGHIINKEGLAVDPKKVADILNWKAPTDARGIKSFIGMAGYYRRFIEGVFEDCETNNKVEFKWTQKCQEAFEALKEKLTTAPVLVLPDVHKPFSVYCDACYTGLGCVLMQEGRVVAYSSRQLKVHEKNYPIHDLELAVVVHALKTWRHYMYGQKCDVYTDHKSLKYIFTQSELNMRQRRWLELIKDYELEIHYHPGKANVVADALSRKSQVNLMVARPMPYELAKEFDKLSLGFLNNSRGVTVELEPTLEREIKEAQKNDEKISEIRRLILDGRGKDFREDAEGVIWFKDRLCVPNVQSIRELILKEAHETAYSIHPGSEKMYQDLKKKFWWYGLKREIAEHVAMCDSCRRIKAEHQRPAGLLQPLQIPQWKWDEIGMDFIVGLPRTRAGYDSIWVVVDRLTKSAHFIPVKTNYSSAVLAELYMSRIVCLHGVPKKIVSDRGTQFTSHFWQQLHEALGTHLNFSSAYHPQIDGQTERTNQILEDMLRACALQDQSGWDKRLPYAEFSYNNSYQASLKMSPFQALYGRSCRTPLQWDQPGEKQVFGLDILLEAEENIKMVRENLKIVQSRQRSYADTRRRELSFEVGDFVYLKVSPIRGVRRFGVKGKLAPRYIGPYQILSRRGEVAYQLSLPENLSAVHDVFHVS

SEQ ID NO: 10643 - protein, 1371 aa, Zea mays
  Clone ID: TF_ZM4906.C4.o1.fg.pep
MSENRRRGGRRAQQEQAAQQEEVPQQQQLPPLPPMSIEQMFLMQTQAVQAIGQTLATIQQQQQQAPPQPQMPRDKRAEFMRGLMTVKKEEFLALKQGSSSVSEYRDRFLQLSRYALEDVNTDAKRQYRFLRGLVDPLQYQLMNHTFSTFQHLIDRAIMTERKRKEMEDRKRKISGPQPGSSIRPRFSGNQSQQFRQNQRPPQQHQQFQRQYPQHQYQNRQNNQSRGGQFQRQNQQTLRLPALAAQQNSQAAPAQVGNRACFHCGEQGHWVMQCPKKTAQQQSGPNAPAKQNVSQPGAGNRSQPRYNHGRLNHLEAEAIQETPDMIVGMFPVDSHIAEVLFDAGATHSFITASWVEAHNLPITTMSTPIQIDSAGGRIRANSICLNVCVEIRGIAFPANLIVMGTQGIDVILGMNWLDKYQAVISCDKRTIKLVSPLGDEVVTELVPPEPKKGSCYQMVVDSSEADPIESIKIVSEFPDVFPKDLPGMPPERKVEFAIELLPGTAPIFKRAFRISVPELVELKKPIDELSEKGYIRPSTSPWAAPVLFVEKKDGTKRMCIDYRALNEVTIKNKYPLPRIEDLFDQLRGASVFSKIDLRSGYHQLRIRPSDIPKTAFITKYGLYEFTVMSFGLTNAPAFFMNLMNSVFMDYLDKFVVVFIDDILIYSQSEEEHASHLRMKVADILNWKAPTDAQGIKSFIGMAGYYRRFIEGFSKIAKPMTALLGNKVEFKWTRKCQEAFEALKEKLTTTPILVLPDVHKPFSVYCDACYTGLGCVLMQEGRVVAYSSRQLKVHEKNYPIHDLELAAVVHALKTWRHYLYGQKCDVYIDHKSLKYIFTQSELNMRQRRWLELIKDYELEIHYHPGKANVVADALSRKSQINLMVARPMPYELAKEFDRLSLGFLNNTRGVTVELEPTLEWEIKEAQKNDEKISEIRRLILDGRGKDFREDAEGVIWFKDRLCVPNVQSIRELILKEAHETAYSIHPGSEKMYQDLKKKFWWYGMKREIAEHVAMCDSCRRIKAEHQRPAGLLQPLQIPQWKWDEIGMDFIVGLPRIRAGYDSIWVVVDRLTKSAHFIPVKTNYSSAVLAELYMSRIVCLHGVPKKIVSDRGTQFTSHFWQQLHEALGTHLNFSSAYHPQTDGQTERTNQILEDMLRACALPDQSGWDKRLPYAEFSYNNSYQASLKMSPFQALYGRSCRTPLQWDQPGEKQVFGPDILLEAEENIKMVRENLKIAQSRQRSYADTRRRELSFEVGDFVYLKVSPISGVRRFGVKGKLAPRYIGPYQILARRGELKKCLRVPEEQLPVEGLEVQEDLTYTEKPAQILEIADIVTRRKTIRMCKVKWDHHSEEEATWEREDDLMAKYPELFASQP

SEQ ID NO: 10644 - protein, 293 aa, Zea mays
  Clone ID: TF_ZM4999.C2.o18.fg.pep
MDAEDWLRTMERELHTAQCDDGEKVLYGPRLLRGVAQSWWESYLATHANLDTITWEEFRGSFRQYHVPAGLMTMKKEEFLALKQGSSSYQLMNHTFPTFQHLIDRAIMTERKRKEMEDCKRKISGPQPGSSNRPRFSSNQPQQFRQNQRPPQQQQFQRQFPQHQNRQNNQSGGGQFQRQNQQAPRLPAPANQQNSQAAPAQVGNRACFHCGEQGHWVMQCPKKAAQQQSGPNAPAKQSVSQPGAGNCSQPRYNHGRLNHLEAEAVQETPGMIVGMFLVDSHIAEVLFDTGAMH

SEQ ID NO: 10645 - protein, 1696 aa, Zea mays
  Clone ID: TF_ZM5011.C3.o1.fg.pep
MESHDLRAEWESRLVGGYEIDDSGYDYGAGKWYSFRLERMARLRHTARKSVIPFLPSRLAERPLRRPVAGQSSHLERLHHRLREDQERRRQEQQGSSFSLQQEIESVRSCSPVLPLEAPPAPPLGAPASGVAAGGDPDDGGGDDSSSHDTDFSANPEPEGWVARPITRDFSAFWFIYYVNEMSENRRRGGRRAQQERAAQQEEVPQQQHLPPPPPMSIEQMFLMQTQAVQAIGQTLAAIQQQQQAPPQPQMPQMPRDKRAEFMRGHPPTFAHSSDPMDAEDWLRTVERELHTAQCDDREKVLYGPRLLRGAAQSWWESYLATHAHPDAITWEEFRGSFRQYHVPAGLMTVKKEEFLALKQGPLSVSEYRDRFLQLSRYAPEDVNTDAKRQYRFLRGLVDPLQYQLMNHTFPTFKHLIDRAIMTERKRKEMEDRKRKISGPQPGSSNRPRFSGNQPQQFRQNQRPPQHQQFQRQYPQHQYQNRQSNQSGGQFQRQNQQAPHLPAPANQQNSQAAPAQVGNRACFHCGEQGHWVMQCPKKAAQQQSGPNAPAKQNVSQPGSGNRSQPRYNHGRLNHLEAEAVQETPGMIVGMFPVDSHIAEVLFDTGATHSFITASWVEAHNLPITTMSTPIQIDSAGGRIRADSICLNISVKIRGIAFPANLIVMGTQGIDVILGMNWLDKYQTVISCDKRTIKLVSPLGEEVVTELVPPEPKKGSCYRIAVDSSGADPIESIKVVSEFSDVFPKDLPGMPPERKVEFAIELLPGTAPIFKRAYRISGPELVELKEQIDELSEKGYIRPSTSPWAAPVLFVEKKDGTKRMCIDYRALNEVTIKNKYPLPRIEDLFDQLRGASVFSKIDLRSGYHQLRIRPSDIPKTAFISKYGLYEFTVMSFGLTNAPAFFMNLMNSVFMDYLDKFVVVFIDDILVYSQSEEEHADHLRMVLQRLREHQLYAKLSKCEFWISEVLFLGHIINKEGLAVDPKKVADILNWKAPTDARGIKSFIGMAGYYRRFIEGFSKIAKPMTALLGNKVEFKWTQKCQEAFEALKEKLTTAPVLVLPDVHKPFSVYCDACYTGLGCVLMQEGRVVAYSSRQLKVHEKNYPIHDLELAAVVHALKTWRHYLYGQRCDVYTDHKSLKYIFTQSELNMRQRRWLELIKDYELEIHYHPGKANVVADALSRKSQVNLMVARPMPYELAKEFDRLSLRFLNNSRGVTVELEPTLEREIKEAQKNDEKISEIRRLILDGRGKDFREDAEGVIWFKDRLCVPNVQSIRELILKEAHETAYSIHPGSEKMYQDLKKKFWWYGMKREIAEHVAMCDSCRRIKAEHQRPAGLLQPLQIPQWKWDEIGMDFIVGLPRTRAGYDSIWVVVDRLTKSAHFIPVKTNYSSAVLAELYMSRIVCLHGVPKKIVSDRGTQFTSHFWQQLHEALGTHLNFSSAYHPQTDGQTERTNQILEDMLRACALQDQSGWDKRLPYAEFSYNNSYQASLKMSPFQALYGRSCRTPLQWDQPGEKQVFGPDILLEAEENIKMVRENLKIAQSRQRSYADTRRRELSFEVGDFVYLKVSPIRGVKRFGVKGKLAPRYIGPYQVLARRGEVAYQLSLPENLSAVHDVFHVSQLKKCLRVPEEHLPVEGLEVQEDLTYVEKPVQILEVADRVTRRKTIRMCKVRWDHHSEEEATWEREDDLMAKYPELFASQP

SEQ ID NO: 10646 - protein, 1370 aa, Zea mays
  Clone ID: TF_ZM5011.C5.o1.fg.pep
MSIEQMFLMQTQAVQAIGQTLAAIQLQQQQQQQAPPQPQMPQMLRDKRAEFMRGHPPTFAHSSDPMDVEDWLRTVERELHTAQCDDREKVLYGPRLLRGAAQSWWESYLATHAHPDAITWEEFRGSFRQYHVPAGLMIVKKEEFLALKQGPLSVNEYRDRFLQLSRYAPEDVNTDAKRQYRFLRGLVDPLQYQLMNHTFPTFQHLIDRAIMTERKRKEMEDCKRKISGPQPGSSNRPRFSGNQPQQFRQNQRPPQQHQQFQRQYPQHQYQNRQSNQSGGQFQRQNQQAPRLPAPANQQNSQAAPAQVGNRACFHCGEQGHWVMQCPKKAAQQQSGPNAPAKQNVPQPGAGNRSQPRYNHGRLNHLEAEAVQETPDMIVGMFPVDSHIAEVLFDTGATHSFITASWVEAHNLPITTMSTPIQIDSAGGRIRADSICLNISVEIRGIAFAANLIVMGTQGIDVILGMNWLDKYQAVISCDKRTIKLVSPLGEEVVTELVPPEPKKGSCYQLAVDSSEADPIESIRVVSEFPDVFPKDLPGMPPERKVEFAIELLPGTAPIFKRAYRISGPELVELKEQIDELSEKGYIRPSTSPWAAPVLFVEKKDGTKRMCIDYRALNEVTIKNKYPLPRIEDLFDQLRGASVFSKIDLRSGYHQLRIRPSDIPKTAFITKYGLYEFTVMSFGLTNAPAFFMNSMNSVFMDYLDKFVVVFIDDILVYSQSEEEHADHLKMVLQRLREHQLYAKLSKCEFWISEVLFLGHIINKEGLAVDPKKVADILNWKAPTDARGIKSFIGMAGYYRRFIEGFSKIAKPMTALLGNKVEFNWTQKCQEAFEALKEKLTTAPVLVLPDVHKPFSVYCDACYIGLGCVLMQEGRVVAYSSRQLKVHEKNYPIHDLELAAVKCDVYTDHKSLKYIFTQSELNMRQRRWLELIKDYELEIHYHPGKANVVADALSRKSQVNLMVARPMPYELAKEFDRLSLGFLNNSRGVTVELEPTLEREIKEAQKNDEKISEIRRLILDGRGKDFREDAEGVIWFKDRLCVPNVQSIRELILKEAHETSYSIHPGSEKMYQDLKKKFWWYGMKREIAEHVAMCDSCRRIKAEHQRPAGLLQPLQIPQWKWDEIGMDFIVGLPRTRAGYDSIWVVVDRLTKSAHFIPVKTNYSSVVLAELYMSRIVCLHGVPKKIVSDRGTQFTSHFWSAYHLQTDGQTERTNQILEDMLRACALQDQSGWDKRLPYAEFSYNNSYQASLKMSPFQALYGRSCRTPLQWDQPGEKQVFGPDILLEAEENIKMLKKCLRVPEEQLPVEGLEVQEDLTYVEKPVQILEVADRVTRRKTIRMCKVRWNHHSEEEATWEREDDLMAKYPELFASQP

SEQ ID NO: 10647 - protein, 1501 aa, Zea mays
  Clone ID: TF_ZM5030.C4.o1.fg.pep
MLICSVLLKNSILFPYAARFARSVLMCGCILQMSENRRRGGRRAQQERAAQQEEVPQQQHLPPPPPMSIEQMFLMQTQAVQAIGQTLAAIQQQQQQQAPPQPQMPQMPRDKRAEFMRGHPPTFAHSSDPMDAEDWLRTVERELHTAQCDDREKVLYGPRLLRGAAQSWWESYLATHAHPDAITWEEFRGSFRQYHVPAGLMTVKKEEFLALKQGPLSVSEYRDKFLQLSRYAPEDVNTDAKRQYRFLRGLVDPLQYQLMNHTFPTFQHLIDRAIMTERKRKEMEDRKRKISGPQPGSSSRPRFSGNQPQQFRQNQRPPQQHQQFQRQYPQNQYQNRQSNQSGGQFQRQNQQPPRLPAPANQQNSQAAPAQVGNRACFHCGEQGHWVMQCPKKAAQQQSGPNAPAKQNVPQPGAGNRSQPRYNHGRLNHLEAEAVQETPGMIVGMFPVDSHIAEVLFDTGATHSFITASWVEAHNLPITTMSTPIQIDSSGGRIRADSICLNISVKIRGIAFPANLIVMGTQGIDVILGMNWLDKYQAVISCDKRTIELVSPLGEEVVTELVPPEPKKGSCYQMAVDSSEADPIESIKVVSEFPDVFPKDLPGMPPERKVEFAIELLPGTAPIFKRAYRISGPELDELKKQIDELSEKGYIRPSTSPWAAPVLFVEKKDGTKRMCIDYRALNEVTIKNKYPLPRIEDLFDQLRGASVFSKIDLRSGYHQLRIRPSDIPKTAFISKYGLYEFTVMSFGLTNAPAFFMNLMNSVFMDYLDKFVVVFIDDILIYSQSEEEHADHLRMVLQRLREHRLYAKLSKCEFWISEVLFLGHIINKEGLSVDPKKVADILNWKAPTDARGIKSFIGMAGYYRRFIEGFSKIAKPMTALLGNKVEFKWTQRCQEAFEALKEKLTTTPVLVLPDVHKPFSVYCDACYTGLGCVLMQEGRVVAYSSRQLKVHEKNYPIHDLELAAVVHALKSWRHYLYGQKCDVYTDHKSLKYIFTQSELNMRQRRWLELIKDYELEIHYHPGKANVVADALSRKSQVNLMVARPMPYELAKEFDRLSLGFLNNSRGVTVELEPTLEREIKEAQKNDEKISEIRRLILEGKGKDFREDAEGVIWFKDRLCVPNVQPIRELILKEAHEIAYSIHPGSEKMYQDLKKKFWWYGMKREIAEHVARSLSGNGMKSSAHFIPVKTNYNSAVLAELYMSRIVCLHGVPKKIVSDRGTQFTSHFWQQLHEALGTHLNFSSAYHPQTDGQTERTNQIREDMLRACALQDQSGWDKRLPYAEFSYNNSYQASLKMSPFQALYGRSCRTPLQWDQPGEKQVFGPDILLEAEENIKMVRENLKIAQSRQRSYADTRRRELSFEVGDFVYLKVSPIRGVRRFGVKGKLAPRYIGPYQILARRGEVAYQLSLPENLSAVHNVFHVSQLKKCLRVPEEQLPVEGLEVQEDLTYVEKPVQILEIADRVTRRKTIRMCKVRWNHHSEEEATWEREDDLMAKYPELFASQP

SEQ ID NO: 10648 - protein, 1516 aa, Zea mays
  Clone ID: TF_ZM5033.C3.o1.fg.pep
MSENRRRGGRRAQQERAAQQDEVPQQQHLPPPPPMSIEQMFLMQTQAVQAIGQTLVAIQQQQQAPPQPQMPQMPRDKRAEFMRGHPPTFAHSSDPMDAEDWLRTVERELHTAQCDDREKVLYGPRLLRGAAQSWWESYLATHAHPDAITWEEFRGSFRQYHVPAGLMTVKKEEFLALKQGPLSVSEYRDRFLQLSRYAPEDVNTDAKRQYRFLRGLVDPLQYQLMNHTFPTFQHLIDRAIMTERKRKEMEDRKRKISGPQPGSSNRPRFSGNQPQQFRQNQRPPQQYQQFQRQYPQHQYQNRQSNQSGGQFQRQNPQAPRLPAPANQQNNQAAPAQVGNRACFHCGEQGHWVMQCPKKAAQQQSGLNAPAKQNVPQPGSGNRSQPRYNHGRLNHLEAEAVQETPGMIVGMFPVDSHIAKVLFDTGATHSFITTSWVEAHNLPITTMSTPIQIDSAGGRIRADSICLNISVEIRGIVFPANLIVMGTQGIDVILGMNWLDKYQAVISCDKRTIKLVFPLGEEVVTELVPPEPKKGSCYQIAVDSREADPIERIKVVSEFPDVFPKDLPGMPPERKVEFAIELLPGTAPIFKRAYRISGPELVELKKQIDELSEKGYIRPSTSPWAAPVLFVEKKDGTKRMCIDYRALNEVTIKNKYPLPRIEDLFDQLRGASVFSKIDLRSGYHQLRIRPSDIPKTAFISKYGLYEFTVMSFGLTNAPAFFMNLMNSVFMDYLDKFVVVFIDDILIYSQSEEEHADHLRMVLQRLREHQLYAKLSKCEFWISEVLFLGHIINKEGLAVDPKKVADILNWKAPTDARGIKSFIGMAGYYRRFIEGFSKIAKPMTALLGNKVEFKWTQKCQETFEALKEKLTIAPVLVLPDVHKPFSVYCDACYTGLGCVLMQEGRVVAYSSRQLKVHEKNYPIHDLELAAVVHALKTWRHYLYGQKCDVYTDHKSLKYIFTQSELNMRQRRWLELIKDYELEIHYHLGKANVVADALSRKSQINLMVARPMPYELAKEFDKLSLGFLNNSRGVTVELEPTLEREIKEAQKNDEKISEIRRLILDGRGKDFREDAEGVIWFKDRLCVPNVQSIRELILKEAHETAYSIHPGSEKMYQDLKKKFWWYGMKREIAEHVAMCDSCRRIKAEHQRPAGLLQPLQIPQWKWDEIGMDFIVGLPRTRAGYDSIWVVVDRLTKSAHFIPVKTNYSSAVLVELYMSRIVCLHGVPKKIVSDRGTQFTSHFWQQLHEALGTHLNFSSAYHPQTDGQTERTNQILEDMLRACALQDQSGWDKRLPYAEFSYNNSYQASLKMSPFQALYGRSCRTPLQWDQPGEKQVFGPGILLEAEENIKMVRENLKIAQSRQRSYADTRRRELSFEVGDFVYLKVSPIRGVRRFGVKGKLAPRYIGPYQILARHGEVAYQLSLPENLSAVHDVFHVSQLKKCLRVPEEQLPVEGLVVQEDLTYVEKPVQILEVADRVTRRKTIRMCKVKWNHHSEEEATWEREDDLMAKYPELFASQP

SEQ ID NO: 10649 - protein, 1428 aa, Zea mays
  Clone ID: TF_ZM5035.C1.o2.fg.pep
MRLTPCYVGHLTGILGPSSIAVWSTSTVAGSTRTAGRQPAWCAVRRTVSRVLRSAQSTILSLSGTQLRQPCKMLHGVRFRTTARFSMSENRRRGGRRAQQERAAPQDEVPQQQHLPPPPPMSIEQMFLMQTQAVQAIGQTLAAIQQQQQQQQQQQAPPQPQMPQMPRDKRAEFMRGHPPTFAHSSDPMDAEDWLRTVERELHTAQCDDREKVLYGPRLLRGAAQSWWESYLATHAHPDAITWEEFRGSFCQYHVPAGLMTVKKEEFLALKQGPLSVSEYRDRFLQLSRYAPEDVNTDAKQQYRFLRGLVDPLQYQLMNHTFPTFQHLIDKAIMTERKRKEMEDPNQQNSQAAPAQVGNRACFHCGEQGHWVMQCPKKAAQQQSGPNAPAKQNVPQPGADNRPQPRYNHGRLNHLEAEAVQETPGMIVAGGRIRADSICLNISVEIRGIAFPANLIVMGTQGIDVILGMNWLDKYQAVISCDKRTIKLVSPLGEEVVTELVPPEPKKGSCYQIAVDSSEADPIERIKVVSEFPDVFPKDLPGMPPERKVEFAIELLPGTAPIFKRAYRISGPELDELKKQIDELSEKGYIRPSTSPWAAPVLFVEKKDGTKRMCIDYRALNEVTIKNKYPLPRIEDLFDQLRGASVFSKIDLRSGYHQLRIRPSDIPKTAFISKYGLYEFTVMSFGLTNAPAFFMNLMNSVFMDYLNKFVVVFIDDILVYSQSEEEHADHLKMVLQRLREHQLYAKLSKCEFWISEVLFLGHIINKEGLDVDPKKVADILNWKAPTDARGIKSFIGMAGYYRRFIEGFSKIAKPMTALLGNKVEFKWTQKCQEAFEALKEKLTTAPVLVLPDVHKPFSVYCDACYTGLGCVLMQEGRVVAYSSRQLKVHEKNYPIHDLELAAVVHALKSWRHYLYGQKCDVYTDHKSLKYIFTQSELNMRQRRWLELIKDYELEIHYHPGKANVVADALSRKSQVNLMVARPMPYELAKEFDRLSLGFLNNSRGVTVELEPTLEREIKEAQKNDEKINEIRRLILDGRGKDFREDAESVIWFKDRLCVPNVQSIRELILKEAHETAYSIHPGSEKMYQDLKKKFWWYGMKREIAEHVAMCDSCRRIKAEHQRPAGLLQPLQIPQWKWDEIGMDFIVGLPRTRAGYDSIWVVVDRLTKSAHFIPVKTNYSSAVLAELYMSRIVCLHGVPKKIVSDRGTQFTSHFWQQLHEALGTHLNFSSAYHPQTDGQTERTNQILEDMLKACALQDQSGWDKRLPYAEFSYNNSYQASLKMSLFQALYGRSCRTPLQWDQPGEKQVFGPDILLEAEENIKMVRENLKIAQSRQQSYADTRRRELSFEVGDFVYLKVSPIRGVRRFRVKGKLPPRYIGPYQILARRGEVAYQLSLPENLSAVHDVFHVSQLKMCLRVPEEQLPVEGLEV

SEQ ID NO: 10650 - protein, 646 aa, Zea mays
  Clone ID: TF_ZM5061.C1.o5.fg.pep
MDTHRPPHFDATNFPYYSARMACYLEAVDLGVWRVTRDGMKPLNNREKPTTSEEKEIHLNARAKNCLYEYLSMDIFNQVFTLKTANEIWLKLHELHNGTSNVREQKHCLVLNEYNSFAMKDDELVRDMYSRLNLIINELNSIGINKLGDADIVRKIISLLPQQRYGSIITILHNMEDLSNMTPTIVIGKIAAFEMSRKMSRGEEPTSSRPYAFACDERKGKKKAPTPSSSSEEEEEEESDDDEDNQPCTSSSEDEETVEDLLFNIDRKKQRKRGCFACGEKGHFRDNCPNMAKPKKERSKGKALTSVRTWDDSSSEDEPPRTHSHQSSSRSSRSSHKCLMARGNKSIPSSSDESSSDDEGEGKPSLDELAEAVEFFQDVCTKQKAQLKTLKNKLVSSQNDYKGLLEKFETFANLNNELSTKIELLESSAPSTATDDGLIKKNEKLKAKLASSQEAIENLLEKMEILSIHNNELTTKLENIGSTPAASLVEIPEIIKKDASTSCFDLIDDSNPCNQVVVENIVVETCSDEVAKENEQLKQEVARLGKALLCHMEGHKSFQCKAMTGDKQRQKLKQKPSSKISNTYIKKVNKKDATPYLIKKKKNGKVIAIKANKQTNKGKGAKRIWVPKEIISTMKSTKKVWIPKGK

SEQ ID NO: 10651 - protein, 1638 aa, Zea mays
  unsure (1)..(1638): unsure at all Xaa locations
  Clone ID: TF_ZmC951_374.pep
MSEDHAKKEMVTGEKPATSHGKAPSRESGNKKKEGSPSRNRTHKSGEKKKKMKKVVYYETDSSSPSTSGSDAASITSKRQEPKKYSKIPLRYPRIPKHTPILSVPLDKPPTFDGEDYSRWSDMVRYHLTSLHKSIWDVVEFGVQVPSVGDEDYDEDEVAQIEHFNSQATTILLTSLSREEYIKVQGLKSVKEIWDVLKTAHEEDEVTKITKRETIEGELGRFMLNQGEDPQAMYNRLKTLVNQVRNLGSSKWDDHEMVNVILRSLVFLNPTQVQLIRGDPRYKLMSPEEVIGKFVSFELMIKGSKKIIEQGASSTPDVQPVAFKATEEKKEDSTPSRVPIDASKLDNEEMALIIKSIRQILKQRRGKDYKSRSKKVCYKYGKPGHFIAKCPLSSDSDRDNDKKGKRREKKRYYKKKGGDAHVCREWDSDESSTDSSSDDDAANIAVTKGLLFPNVGHKCLMAKDDKRKKVKSRASTKYATSSDEASSSDDEDDLLTLFANLNMQQKEKLNELISAIHEKDEFLDSQEDFLVKENKKHVKVKNAYALEVEKCEKLSSELSTCHDVISNLRNENAKLIAKVEKSNICDDSIDNLRNDNASSIAKIEKLNASLASLRNENEKLIAKAKELDVCNVSIFNLRDENDILHAKIVELNSCRPSTSTVEHVTICTRCRDVNIDAIHDHIAMIKQKNDHIAKLDAKIAEHELENEKFKFARSILYSGRRPGIKDDIGFQKGGNVKLNAPPKRLSNFVKGKAPMPQDNEGYILYPTGYPEHKIRRIHSRKSHSGSNHAFMYKSEASSSRQSTRAKLPKKKTHIASNEHNISFKTFDASYVLTNKSGKVVAKYVGAKHKGSKTCIWVPKVYASGGSSWIIDSGCTNHMTREKKIFSSYEXNHDPQRAITFGDGNQGKXSQTQETLKGFLRWAQNEFGLRIKKIRSNNGTEFKNSQIESFLEEEGIKHEFSSPYMPQQNGVVERKNRTLLDMARTMLDEYKTSNRFWAEAVNTACYAINRLYLHRILKKTSYELLTGKKPNVSYFRVFGSKCFILVKRGRKSKFAPKAIEGFLLGYDSNTRTYRVFNKSSGLIEVSCDIVFDETNGSQVEQVDLDELDDEEAPCVALRNMSIGDVCPKESEEPPHAQDQPSSSMQASPPTQDEDQAQDDDDEDQEEPPQEEDNDQGGNDNDQDKEDDEGPRPPHPRVHQAIQRDHPVNTILGDIHKGXALQDSDWVLATQXELNNFTRNEVWHLVPRPNQNVVGTKWVFRNKQDEHGVVTRNKARLVAKGYSQVKGLDFGETYAPVARLESIRILLAYAIYHGFKLYQMDVKSAFLNGPIKEEVYVEQPPGFEDSEYPNHVYKLSKALYGLKQAPRAWYECLRDFLITNGFKVGKADPTLFTKTLANDLFICQIYVDDIIFGSTNESTCEEFSRIMTQKFKMSMMGELKYFLGFQVKQLQEGTFISQTKYIQDILTKFGMKDAKPIKTPMGTNGHLDLDTGGCKINRKSTLGTFQFLGRSLVSWASKKQNSVALSTAEAEYIAAGHCCAQLLWMRQTLRDYGYKLTKVHLLCDNESAIRMADNPVEHSRTKHIAIRYHFLRDHQQKGDIEISYINTKEQLADIFTKPLDEQTFTKLRHELNILDSRNFD

SEQ ID NO: 10652 - protein, 1161 aa, Zea mays
  Clone ID: TF_ZM4351.C4.o2.fg.pep
MTLIIKSFRQILKQRRGKDYKSRSKKVCYKYGKPGHFIAKCPLSSDSDRGDDKRKEKKRYYKKKGGDAHFNYLSIDVCVTFRNMNVSHTQFLFVHTAAIMGDRRDWMYEGFKKGYKVWYLHGESRLERVAEVEVDDGEDDVDRMDQMLEDLQPELAPDHHDSPTPEVQKFFDLLKASEEPLHGHTNSKFAFSINCYKELVDLISEVLPTGHKMPKDMYQSKKLLEGLGMEYEKIDVCQDNCMLFWKEHGREQKCLKCGKSRYVELVNEDGEKVVTKVAHKQLRYMPLTPRVKHLFLSRKTAMHMRWHKDCTNRQDGLMVHPSDGDAWKALNKFDPDFASDARNVRISLATDGFMSFNMTAASYSCWPVIAIPYNLPSALCMKYEFMFLCLVIPGPEHPGVRLNVMLQPLIEELKKLWQGVEAYDCFKKQKFNLRVAYLFSVHDFMAYGIFSGWSVHGRLTCPYCAKDTYCFRLSAGGKICYFDCHRCFLPFNHPFRRQRKEFRKGTIVTKGPPKRRSGIEITEEHMKLVLDESGKRYQGFGEEHNWTHICGLWELPYAKSLILMHNIDVMHQESNFCQDLINTCMDFPDKTKDNDKARMDLAVICDRPTQVLRENGGKPKADYCLKSKQRKEVMKWMKDINFPDGYAAGFRRSVNLKTMKMNGLKSHDFHIIMERLMPVMFRGYISEAVWKTLAEVSYFYRQLCAKGIRRDVMEQLEEEAPVLLCKLEKIFPPGFFNPMQHLFIHLPYEAKVGGPVQYRWMFHIERALKKLRAMMGNKARVEGCIAEQFKLKEVAHFTSCYFAEEHNVFARKKRYHDDEREMPPCSDLSIFQTNGKAVGPPKAYHLSMEERKSALLYMFTNMPEVEKYFVEFDEQNMRCLGRPTARDIDKLRRDGMHGRPNFIMWLWDRVMVPWMAPVPDAYYAWCRYWASEGFQKVLAHHRQCRGTNPNHKFGGDDMIRKAKRMEATSGQKPSDIEVYQEGHKGPDPNNPDQLCSQTATDRLAAYGEEMVRRHGPDFDWRHEPVDPLVVYTLFDGFIDSSSDLEIMRMREEMRQQHEFMEACNAHNQAMYQLMQQQGMATNFPPPPQWSQFANTLVPPPQFNTPPTHIPAPGDRVTPEAGGSGSDPAVGTGFVDSLFAFPPPGGGGDSGQSSNHPSGGYL

SEQ ID NO: 10653 - protein, 784 aa, Zea mays
  Clone ID: TF_ZM4904.C4.o1.fg.pep
MSGDHAKKEMVTSEKPTTSHGKAPSGESDNKVKGSPSHDKSRRSGEKKKKMKKVVYYETDSSSPSTSGSDTPSVTSKRHERKKFSKPPMFDGEDYNMWSDKMRHHLTSLHTSIWDVVEIGVQVQGLKSAKEIWDVVKTAHEGDEVTKITKRETIEGELGRFMLHQGEEPQAMYNRLKTLVNQVRNLGSTKWDDHEMVKVILRSLIFLNPTQVHLIRDDPRYKLMYPDEVIGKFVSFELMIKGSKKIIEQGASSTPDVQPVAFKATEEKKEDSTPSRVPIDASKLDNEEMTLIIKSFRQILKQRRGKDYKSCSKKVCYKYGKPGHFIAKCPLSSDSYRDNDKRGKKKEKKRYYKKKGGDAHVCREWDSGESSTDSSSNEDAANIAVNKGLLFPNVGHKFLMAKDGKKKKVKSRSSTKYAISSDEDNSSDDEDNLLTLFANLNMQQKEKLNELISAIHEKDELLDSQEDFLIKENKKHVKVKNAYALEVEKSNVCDDSIVNLRNENTSLIAKIDKSNASLSSLRNENEKLIAKAKDLDVCNVSITNLRDENAILHAKIVELNDCKPSTSTIDHASICTRCRDVNIDAIHDHFAMIKQQNDHIAKLDAKIAEHELENEKFKFARSMLYSGRCPGIKDGIGFQQGDNVKLNAPPKRLSNFVKGKAPMPQDNEGYILYPTGYPEDKIRRIHAKKTHSHHAFIYKNEASSSRRSTHVKMPKKKTPIASNEPNVSFKTFDASYVLTNKSGKVVAKYVGGKHKGSKTCVWVPKVLVSNVKGPKTVWVLKNKA

SEQ ID NO: 10654 - protein, 105 aa, Zea mays
  Clone ID: TF_ZM4636.C4.o12.fg.pep
MLSPAKAPPRRPRHPFCLPPAPSRCFRCLAADHQVRDCRDPVRCRGCSRFGHRHKSCPMLIARVLTPHPRRCSSSPAPAPCVPVSAAPSLRSPRCRRARPPPPHR

SEQ ID NO: 10655 - protein, 518 aa, Zea mays
  Clone ID: TF_ZM4269.C2.o4.fg.pep
MAALIVGSLDTLSRTVPIQSKINQILNRLLGTRLKAREMWPTLQRAKIQGKLGESTTTSEGEPVMMGNPRDVFPEDLLGLPPERDVEFVIELKLARVFSKIDLRSGYHLIRIRPENIPKTAFTTRFIPDFSKIVKPITKLLKNDVKFDWSPKCKEAFEQLKILLTTAPVLAQPDIEKPFDVYCDALGIGLGLKYIFTQSELNMRQRRWLDLIKDYDLEIHYHPRKANVVADALSCKVFCHCLTMGFPDTTLCQEMEILNLGIVQQGTLMHLKLGSIILQKIIDAQRIDKGMKYIHEKVEAGKANCFRKDDKGIIWFKDRIVVHKDAELRQQILDEAHLSRRVKAIHMKTAGPLQSLSIPTWKWEDLSMDFVVGLPKTSKGYDSIWVIVDWHTKTAHFLQVKTDHPVAIYAQLYLARILILHGVPKTIVSDRGPQFVSMFWEELHKSLGTKLLHDSAYHPQTSGQTERVNQILEDMLHAYVLEFLQKWDDCLSLAEFSYNNSYQESIKMAPFEALYGRR

SEQ ID NO: 10656 - protein, 530 aa, Zea mays
  Clone ID: TF_ZM4443.C1.o3.fg.pep
MAALIVGSLDTLSRTVPIQSKINQILNRLLGTRLKAREMWPTLQRAKIQGKLGESTTTSEGEPVMMGNPRDVFPEDLLGLPPERDVEFVIELKLGHVLSAKGITVDPSKVKDILEWKSPTSVHQVRSFLGLYGYYRRFIPDFSKIVKPITKLLKNDVKFDWSPKCKEAFEQLKILLTTAPVLAQPDIEKPFDVYCDALGIGLGLKYIFTQSELNMRQRRWLDLIKDYDLEIHYHPRKANVVADALSCKVFCHCLTMGFPDTTLCQEMEILNLGIVQQGTLMHLKLGSIILQKIIDAQRIDKGMKYIHEKVEAGKANCFRKDDKGIIWFKDRIVVHKDAELRQQILDEAHLSRRVKAIHMKTAGPLQSLSIPTWKWEDLSMDFVVGLPKTSKGYDSIWVIVDWHTKTAHFLQVKTDHPVAIYAQLYLARILILHGVPKTIVSDRGPQFVSMFWEELHKSLGTKLLHDSAYHPQTSGQTERVNQILEDMLHAYVLEFLQKWDDCLSLAEFSYNNSYQESIKMAPFEALYGRR

SEQ ID NO: 10657 - protein, 561 aa, Zea mays
  Clone ID: TF_ZmC158438_1.pep
AIVREQVNHPVWGAYAQRLLNPEARLWRNPSNGGHDDKAHPPIHPTKFSEGERNWSPDHTRLYEFVVRHFLACCSQPAVGAETTVEIDIAGEQFNASGRVILAKNYLDVYRFDSWGGTLLPTYNIGQQFVPTTLTLDSGVTRPPPLLAEADLLSCMDKAGIGTDATMHDHIKKLLDRCYATKDENTRFSPTNLGEALVMGYDEMGYELWKPYLRSMMEADMKSVSVGTKSKSEVLESCLQQMKACFLDARVKKAKLLDAMGTFFARSNRPINETQNPVEVVRPCGACNGSEMLLKRRASGEFMVGCRSYPQCRNVVWLPGSLSEAAVTNQVCPICAPGPVYKIQFKFRRRDIPPNFDVDHLGCVGGCDDILKDLMEISRFGSRSQAATPARGPTPNGVGQGTPRQDLHTIFRPASQLNNDNPSVMHSQGFRSTHTQNPSNASDAGQVLCTSCGALCISRIANTEANRGRRFYKCQDPGCGFFKWEDEVDNGTGRGRRGRGSSRQASASASASAGRRGGGRRGRGRNADGGMFVSATGDTVLGCCFNCGDPSHFANACPNRR

SEQ ID NO: 10658 - protein, 1437 aa, Zea mays
  unsure (1)..(1437): unsure at all Xaa locations
  Clone ID: TF_ZmC951_281.pep
MSGDHTKKEMVTGNKPTTSHGKASSEESHNKGKGKEKKSSSHKSHRSGDKKKKMRKVVYYETDTSSPSTSGSDAPSITSKCHERKKFSKPPTFDGEDYARWSDLMRFHLTSLHKSIWDVVEFGVQEYNKVQGLKNAKEIWDILKTAHEGDEVTKITKRETIEGELGRFRLRPGEEPQDMYNRLKTLVNQVRNLGSKKWDDHEMVKVILRSLVFLNPTQVQLIRGNPRYTLMTREEVIGNFVSFELMIKGSKKINELDGPSTSEAQPVAFKAMEEKEESTPSRTPIDASKLDNEEMTLIIKSFRQILKQRRGEDYKPRSKKVCYKCGKPGHFIAKYPIYSDSDRGDDKKGRRKEKKKYYKKKGGDAHVCREWDSEESSTDSSSDEDAVNIAVTKGLLFPNVGHKCLMATDGKRKKVKSRSSTKYETSSDEENASNEEDNLRILFANLNMQQKEKLNELISAIHEKDDLLDTQEDFLIKENKKHVKVKNAYALEVEKCEKLSSELSTCHETIDNLRNKNANLLAKVDSNVCDVSIPNLRNDNVDLLAKIEELNISLASLRNENEKLLAKAKELDVCNASISDLRSKNDILHAKVVELKSCKPSTSTVEHTTICTRCRDVNIDAIHDHMALIKQQNDHIAKLDAKIAEHDLENEKFKFARSMLYRGRRPGIKDGIGFQQGGNVKLNAPPKKLSNFVKGKAPMPQDNEGYILYPVGYPESKIRRIHSRKSHSGPNHAFMYKGEASSSRQPTRAKLPKKKTPNASNEHSISFKTFDATYVLTNKSGKVYASGGSSWIIDSGCTNHMTGEKKMFSSYEKNQDPQRAITFGDGNQDSLDYNLLSVSQLCQMGYNCLFTNEKSHTQETLKGFLRRAQNEFGLRIKKIRSDNGTEFKNCQIEGFLEEEGIKHEFFSPYTPQQNGVVERKNRTLLDMARTMLDEYKTSDRFWAEAVNTACYTINRLYLHRILKKTSYELLTGKKPNISYFRVFGSKCFILVKRGRKSKFAPKTVEGFLLGYDSNTRAYRVFNKSSGQVEVSCDVVFDETNDSQVEQVDLDEIGDEEAPCIALRNMSIGDVCPKESEEPPNAQDQPSSSTQASPPTQNEDEAQVDEVEDQRDEPPQDDDNDQGXDANDQDKEDEEQRPPHPRVHQAIQRDHPVDTILGDIHKGXVEEALQDSDWVVAMQEELNNFTRNELYQMDVKSAFLNGPIKEEVYVEQPPDFEDKFSRIMTQKFEMSMMGELKYFLGFQVKQLQEGTFLSQTKYTQDILSKFGMKDAKPIKTPMGTNGHLDLDTEGCKINRKSTSGTCQFLGRSLVSWASKKQNSVALSTAEAEYIASGHCCAQLLWMRQTLRDYGYKLTKVPLLCDNESAIRMADNPVEYSRTKHIAIRYHFLRDHQQKGDIEIAYINTKDQLADIFTKPLDEQTFNKLRHELNILDSRNFFC

SEQ ID NO: 10659 - protein, 1770 aa, Zea mays
  Clone ID: TF_ZM4508.C2.o1.fg.pep
MASNNNVHIGKPPHFDGNNYDYWKIRMSMHLRAMGGKNWPIVKDGFVVLKEDEPSVSDNENILTNDQAMNVLYDALDINEFNRIKNLTTAHEIWIKLMEIHEGTTIVKSAKLYVCKGKFEQFIMEEDASVSDMFNRLNEIVNELKGLGFNVPDVGFTHKFLRSLPEKYETIVTMLVRSDLSTTSPTEVLGEILTQDIFKKSQADAISLAKKVKNESIALKDKASKAIEKEDSDDEENESESDGDMALFLKKFNKFIKMKRGQLRRGQTSRRNAFNDRKCFECGEPSHIAMNCPNKKKKGKDGDDKKKKKFYNKKKDGKAYLVEWDSDDSSDDDDDDTSSKLNAGIAIKEAPSLFSSPHCLMEKGDANADDYMHKEKEKFKTLKESYKNVQVSFEELKTSNNNLKENCEKLVEAQNSSIVHEVVVVTEDVGVTCDLLDSPTSEPLPTNSICDKCKISLMNDNIALDESQIIVENEVLVDRVNALTHDLEKAYGGKAKLDFILGSQRCSLNREGLGYVPKKGKNAFIKQKTLFVKECGKVCHKKGHIKKICPKLKNVSYTCFEHCYVLSHNAKGVHAKFVSTSIVGNKKAIWVPKTLVTNIQGPKQVWVNYKAGGNHWVLDSGCTQHMTRDMKMFTQMSEEDCSNYDSITFGDNRKGKVKGLGKIAILNDHSISNVLLVESLNFNLLFVAQLRDLGFSCNFTVDDVIISIVDGSNLKFKGFRYENLYLVDFSSSEPKLTTCLFSKASLGWLWHRRLGHVGMKQLNRSTKHDLVRGLKDVKFEKNKLCSSCQAGKQVANTHPNKSQMSTHRPLELLHMDLFGPTSFVSIGGNSYYLVIVDDYYRFTWVYFLRDKSNVFETFKSFAILAQNQFDFDIKKVRSDNGSEFKNTRIDEYCDDKGIKHELSSKYTPEQNGIVERKNRTLIDMARSMLAEYNVSDSYWAKAINTACHSSNRLYCHKLLKKTPYELLIGRKPNISYFRVFGCKCYILRKGSRLSKFEKKCDEGFLLGYSSNSKAYRVFNKTHGIIEEAYHVEFDETNGSQDESYNLDDVSGTQLKNAMKTMAISEIKPKKDDDENSVVVIPSSSTLNEENHQSQNNDEIMDTHDQDTSSHSVPPHASTSNYQTVSRIHHSIVKDHPVDQIVVDINEALLDVDWVNAMHEELNNFTRNEVWELVERPKNHNVIGTKWVFRNKHNEDGLVVRNKARLVAQGYTRIEGLDFGERFAPVARLEAIRILLAYACAHNIKLYQMDVKSAFLNGKISELVYVEQPPDFEDPKRPIHVFKLSKALYGLKQAPRAWYERLRDFLLSKDFRIGKVDTTLFTKIIGKDLFVCQIYVDDIIFGSTNELFCEEFGKMMSKEFEMSMIGELSFFLGLQIKQLKDGIFISQSKYLKDMLKKFGLENAKPIKTPMATNGHLDLDEGASPREIHLKAAKRILRYLKYTPNIGLCGLGGLRKKLAGRFKSKRPRVDDADYNPTTDSEAQSLAGGSVSMDTEDVPHAHPDYPIEITGWPYPKRRTDFSEMAVKQLLATAEIDIDEESITWMTSFKRYYATFAEFATPNSLDYDTISAGIDLYTEDNFEEFVQFYEPARLGIPRRFGETVELRHHPAVINKISRVTILPKSGDKSKIRDKFWNIIHHVMNGEVMNVVLFMMRQLNDLKMDKNQNLAYAPYIMVLIKAKTKFEGHCEIVHTPFRPLKNEIGFLTRPLTPFPDDEEEAGDDAGEAPEADAEQMPPPLPPPQPQQYWQPGPGYFDPYFQNMQQGLQTHMDGRF

SEQ ID NO: 10660 - protein, 968 aa, Zea mays
  unsure (1)..(968): unsure at all Xaa locations
  Clone ID: TF_ZM4550.C1.o1.fg.pep
MPTLLVDTPQLRMVLVFKGKPRTQQAKRLPFSPRRKGRPLWLVVLKETMLLFMIGKVLVTIRVIFMLLIMIPMLCLPLALLLCMVEVGLGEVILYLMCLGECAMNLLPFTMLAILHLRSYVYASGGSSWIIDSGCTNHMTGEKKMFTSYVKNKDSXDSIIFGDGNQGXDVSVFIRSDGSLAFKGVLDGKFYLVDFSKEETDLDACLIAKTSMGWLWHRRLAHVGMKNLHKLLKGEHVLGLTNVCFEKDRPCAACQAGKQVGSTHHSKNVMTTSRPLELLHMDLFGPVAYLSIGGSKYGLVIVDDFSRFTWVFFLQDKSETQGTLKRFLKRAQNEFELKVKKIRSDNGSEFKKFQVEEYLEEEGVKHEFSAPYTPQQNGVVERKNRTLIDMVRTMLGESKMPERFWSEAVNAACHAINRLYLHRLLKKTSYELLIGNKPNVSYFRVFGSKCYILVKKVSSDVVFDETNGSPREQVDLDDIDEDDVLTAAMRTMAIGEVRPQEQQEQDQPSSSTMVHPPTRDDGQVPQEEARDQRGAQEEQVMEEEAPLAPPTQVRAMIQINHPVDQILGDISKGVTTRSRLANFCEHYSFVSTIEPFRVEEALQDPDWVLAMQEELNNFKRNEVWSLVPRPKQNVVGTKWVFRNKQDEHGVVIRNKARLVAKGYAQVAGLDFEETFAPVARLESIRILLAYAAHHSFRLFQMDVKSAFLNGPIKEEVYVEQPPGFEDDRYPDHVFKLSKALYGLKQAPRAWYECLRDFLIANAFKVGKADPTLFTKTCDGDLFVCQIYVDDIIFGSTNQKSCEEFSRVMTQKFEMSMMGKLNYFLGFQVKQLKDGTFISQTKYTQDLLKRFGMKDAKPVKTPMGTDGHVDLNKGGKSVDQKTYRSMIGSLLYLCASRPDIMLSVCMCARYQSDPRECHLVAVKRILRYLVYTPCFGIWYPKGSTFDLIGYSDSDYAGCKVDRKSTSGTC

SEQ ID NO: 10661 - protein, 784 aa, Zea mays
  Clone ID: TF_ZM4646.C1.o1.fg.pep
MSGDHAKKEMETGEKPTTSHGSTSFEESRTKRKEKKNSSKGKEKKTSSHQKEKKEKTFSHKTRRSGDKKKRMRKVVYYETDSSSPSTSGSDAASVTSKRQERKKYSKIPLRYPRISKHTPLLSVPLGKPPTFDGEDYARWSDLMRFHLTSLHKSIWDVVEFGAQVPSVGDEDYDEDEVAQIEHFNSQATTILLASLSREEYNKVQGLKSAKEVWDVLKTAHEGDELTKITKRETIEGELGRFRLRKGEEPQNMYNRLKTLVNQVRNLGSKKWDDHEVDKVILRSLIFLNPTQVQLIRGNPRYTLMTPEEVIGNFVSFECMIEGSRKINELDDPSTSEAQPVAFKATEEKKEESTPSRQPIDASKLDNEEMALVIKSFRQILKQRRGKDYKSRSRKVCYKCGKPGHFIAKYPLSSDSDRGDDKKGRRKEKKRYYKKKGGDAHVCREWDSDESSSDSSDDEDAANIAVTKGLLFPNIGHKCLMAKDGKKKVKSKSPTRYESSSDDNASDEEDNLCTLFANLNMQQKEKLNELISAIHEKDDLLDTQEDFLIKENKKHVKVKNAYALEIEKCEKLSSELSTCHETIDNLRNENANLLAKVDSHVCNGSTSNPRDVNDDLLARIEELNLYLASLRNENEKLLAKAKDVDVCNATISDLRSKNEILHAKVVELKSCKSSTSTVEHTSICTRCRDVNIDAIHDHMALIKQQNDHIAKLDAKIAEHNLENEKFKFARSMLYNGRRPGIKDGIGFQRGDNVKLSAPPKRLSNFVKGKAPMPQDNEGYILYPA

SEQ ID NO: 10662 - protein, 1332 aa, Zea mays
  Clone ID: TF_ZM5007.C4.o1.fg.pep
MVVNDKEKESLFNEPRDDKPTDSGSSHKKRDGKKKRRINKIIYYDSDASSSSPRDDNDDDDSSSKKKMVNQNYSFDYSRIPYNSNVLLHSIPLGKPPHFDGEDYSFWSHKMCSHLFSLHPSICEIVENGMHFDSTDNPVIINEQIHKNAQATTVLLASLCRDEYNKVSGLDNAKQIWDTLKISHEGNDATMITKMELVEGELGKFTMIKGEEPTQTYNRLKTLVNKIRSYRSTRWTDHDVIRLMLRSFTIIDPYLVNLIRENPRYTKMTSEEILRNFESGRMMVKEARYMDDALNGPLPVYEPQPVSLKATSSRKALPSKVTQVEAAGLNEDEMALIIKHFKTALKGRKEYSNKNKTRGKRSYFKCGKTGHFIAQCPDNDNEQGQEKSGKKERKKNYRKTKGEAHFGNEWDSDCSSSDSDDEGLAASAFDKYSLFPNERHTCLMAKEKKVRIRYSPKYSSSSDEESSDDEVDYSSLFKGLDKAKVEKINELIDALNEKDRLLEKQEDILYEEHDKFVSVQKSLALETKRNEMLSFELSACHESISSLKNVNDELNAKLEEVSKTSSCVEHVSICNRCKDFDVDVCDEHLISITKLNDEVASLNAQLKTCKIDFDKLKFARDAYTIGRHPSIKDGLGFRKETKNLTSQRIPVLNKEKGKAPLASSPQRNHAFIYDRKIASCSHYNKSYVHTAYNDSHAMFASRSTFVHGRGKCAMNPLLFFMLATLLLYFHVYASGGSSWIIDSGCTNHMMGENKMFTSYVKNKDSQDSIIFGDGNQGKVKGLGKIAISSKHSISNVFLVESLGYNLLSLWHRRLAHVGMKNLHKLLKGDHVLGLTDVCFEKDRPCAACQAGKQVGSTHHGKNVMTTSRPLELLHMDLFGPVAYLSIGGSKYGLVIVDDFSHFTWVFFLQDKSETQGTLKRFLRRAQNEFELKVKKIRSDNGSEFKNLQVEEFLEEEGIKHEFSAPYTPQQNGVVERKNRTLIDMARTMLGEFKMPERFWSEALNTACHAINRLYLHRLLKKTSYELLTGNKPNVSYFRVFGSKCYILVKKGRHSKFAPKAVEGFLLGYDSNTKLYSVFSKSSGLVEISSDVVFDETNGSPREQVDLDDIDEDEVPTAAMRTMAIDDGQIPQEEGKDQGGAQEDQVVEEEAPRARPTQVRASIQKHHPVDQILGDIIKGVTTRSRLANFCENYSFVSSIEPFRVEEALQDPNLALAMQEELNNFKRIEVWSLVPRPKQNIVGTKWVFRNKQDEHGVVTRNKARLVAKGYAQVAGLDFEETFARVARLESIRILLAYAAHHSFRLFQMDMKSAFLNGPIKEEVYVEQPPGFEDD

SEQ ID NO: 10663 - protein, 323 aa, Zea mays
  Clone ID: TF_ZmC4916_455.pep
NSRDVSLRVKKKEMHLNVRAENCLYGSLNMKVFNQVFTLKTANEIWLKLHELHDDTSNVHEQKHCLALNDYNSFAMKENELVRDLYSRLNLTINEFNSIGINKLGDADIVRKIISLLPQQRYGSIITILHNMEDLSNMTPTIVIGKIAAFEMSRKMSRGEEPTSSRPYAFACDERKGKKKAPTPSSSSEEEEEEESDDDEDNQPCTSSSEDEETIRRVRKVKDLLFNIDRKKQRKRGCFACGEKGHFRDSCPTMAEPKKERSKGKALTSVRTWDDSSSEDEPPRTRSHRSSSRSSHKCLMARGNTNTPSSSDESSSDDEGEGK

SEQ ID NO: 10664 - protein, 268 aa, Zea mays
  unsure (1)..(268): unsure at all Xaa locations
  Clone ID: TF_ZM4623.C4.o7.fg.pep
MTREAGQESGSSERMGGGFAVVLKPDPFNGKNFLIRKAKMKLWLTAMSCFHAVEGKPANLPPEDEAKFKAKDNLFRGAVISALDTKFQKSYIILPTGKELWDALVGKFGVTDAELIGTLDVEERARTKDNGKGVETSTANVVQKRNFRKFNKKKNQNKQENTNKPVQTTQFKKKNNNNNKGKGGCFVCGSDQHWARECPHRKFTQDKKSANVVTTETGDGTSGYGXRSGALLMGNGSCAYVLGVGTVILKFTSGKTVSVGTLKLGYPL

SEQ ID NO: 10665 - protein, 425 aa, Zea mays
  unsure (1)..(425): unsure at all Xaa locations
  Clone ID: TF_UC-ZMFLMO17035D05_FLI.pep
MTRVNGATDALSIGPSAGHFSAGGFAAALKPSEPFDGTFYKRWRSKMILWLTAMNCYHAAQGKPEQFTPEEERMFDVADNLFRGAVIGALANKYVDSYLTCTSAKELWDALDEKFGVSDAGSELYIMEQLFDYKMVENRPVVEQAHEIQALAKELEQFPCVLPDKFVAGGIIAKLPPSWTDFATTLKHKRQEFSVAELIGSLDVEERARAKDTRGKGVETSSANMVQKKNSNASHNNKKKNKQQNATKPKQAASFKKKNKGAGCFVCGSTDHWASACPDRKFKQEKKPAQEKKTVNMVVSETAEGTSXCKGTGALLMGNGSHARVLGVGTVILKFTSGKTVLLKNVQHVPSIKKNLVSGSQLCRDGYKIVFESNKCILSKYGTFVGKGYDSGGLFRLSLHDACNKSVNNVVSNESYIWHSRLCHI

SEQ ID NO: 10666 - protein, 197 aa, Zea mays
  unsure (1)..(197): unsure at all Xaa locations
  Clone ID: TF_ZmC119_896.pep
PNKNKSRGKHSCFKCSKTGHFIAQCPDNENDQAQEKHGKXEKKNYRKAKGEAHLGKEWDSDCYSSNSDDEGLAALAFDKSSFFPNERHTCLMAKKKKVCIRDTPKYTSSSXEESSDDEVDYTNLFKGLDRTKVDKINELIDALNEKDRLLEKQEDIFYEEHDKFISVQKSLALXIKRNEMLCFELSTYHESISSLKN

SEQ ID NO: 10667 - protein, 409 aa, Zea mays
  Clone ID: TF_ZmC3792_76.pep
MSENRRRGGRRAQQERAAQQEEAPQQQQLPPPPPMSIEQMFLMQTQAVQAIGQTLAAIQQQQQQQQQAPPQPQMPQMPRDKRAEFMRGHPPTFAHSSDPMDAEDWLRTVERELHTAQCDDREKVLYGPRLLRGAAQSWWESYLATHANPDTITWEEFRGSFRQYHVPAGLMTVKNEEFLALKQGPLSVSEYRDKFLQLSRYAPEDVNTDAKRQYRFLRGLVDPLQYQLMNHTFPTFQHLIDRAIMTERKRKEMEDRKRKISGPQPGSSSRPRFSGNQPHQFRQNQRPPQQHQQFQRQYPQNQYQNRQSNQSGGQFQKQNQQAPRLPAPANQQNSQAAPAQVGNKACFHCGEQGHWVMQCPKKAAQQQSGPNAPAKQNVPQPGAGNRPQQRYNHGRLNHLEAEAVQETPA

SEQ ID NO: 10668 - protein, 1491 aa, Zea mays
  Clone ID: TF_ZM3641.C4.o2.fg.pep
MSIEQMFLMQTQAVQAIGQTLAAIQQQQQQQQAPPQPQMPQMPRDKRAEFMRGHPPTFAHSSDPMDAEDWLRTVERELHTAQCDDREKVLYGPRLLRGAAQSWWESYLATHANPDTITWEEFRGSFRQYHVPAGLMTVKKEEFLALKQGSSSVSEYRDRFLQLSRYAPEDVNTDAKRQYRFLRGLVDPLQYQLMNHTFPTFQHLIDRAIMTERKRKEMEDRKRKISGPQPGSSSRPRFSGNQPQQFRQNQRPPQQHQQRQQYQQFQRQYPQNQYQNRQSNQSGGQFQKQNQQAPRLPAPANQQNSQAAPAQVGNKACFHCGEQGHWVMQCPKKAAQQQSGPNAPAKQNVSQPGAGNRSQQRYNHGRLNHLEAEAVQETPDMTVGMFPVDSHIAEVLFDTGATHSFITASWVEAHNLPTTTMSTPIQIDSAGGRIRADSICLNVSVEIRGIAFPANLIVMGTQGIDVILGMNWLDKYQAVISCDKRTIKLVSPLGEEVVTELVPPGPKKGSCYQMAVDSSEADPIESIKVVSEFPDVFPKDLPGMPPERKVEFAIELLPGTAPISKRAYRISGPELVELKKQIDELSEKGYIRPSTSPWAAPVLFVEKKDGSKRMCIDYRALNEVTIKNKYPLPRIEDLFDQLRGASVFSKIDLRSGYHQLRIRPSDIPKTAFITKHGLYEFTVMSFGLTNAPAFFMNLMNSVFMDYLDKFVVVFIDDILVYSQSEEEHADHLRMVLQRLREHQLYAKLSKCEFWISEVLFLGHIIDKEGLAVDPKKVADILNWKAPTDARGIKSFIGMAGYYRRFIEGFSKIAKPMTALLGNKVEFKWTQKCQEAFEALKEKLTTAPVLVLPDVHKPFSVYCDACYTGLGCVLMQEGRVVAYSSRQLKVHEKNYPIHDLELAAVVHALKTWRHYLYGQKCDVYTDHKSLRYIFTQSELNMRQRRWLELIKDYELEIHYHPGKANVVADALSRKSQVNLMVARPMPYELAKEFDRLSLGFLNNSRGVTVELEPTLEREIKEAQKNDEKISEIRRLILDGRGKDFREDAEGVVWFKDRLCVPNVQSIRELILKEAHETAYSIHPGSEKMYQDLKKKFWWYGMKREIAEHVAMCDSCRRIKAEHQRPAGLLQPLQIPQWKWDEIGMDFIVGLPRTRAGYDSIWVVVDRLTKSAHFIPVKTNYNSAVLAELYMSRIVCLHGVPKKIVSDRGTQFTSHFWQQLHEALGTHLNFSSAYHPQTDGQTERTNQILEDMLRACALQDQSGWDKRLPYAEFSYNNSYQASLKMSPFQALYGRSCRTPLQWDQPGEKQVFGPDILLEAEENIKMVRENLKIAQSRQRSYADTRRRELSFEVGDFVYLKVSPIRGVRRFGVKGKLAPRYIGPYQILARRGEVAYQLSLPENLSAVHDVFHVSQLKKCLRVPEEQLPVEGLEVQEDLTYVEKPAQILEIADRVTRRKTVRMCKVRWSHHSEEEATWEREDDLMAKYPELFASQP

SEQ ID NO: 10669 - protein, 767 aa, Zea mays
  unsure (1)..(767): unsure at all Xaa locations
  Clone ID: TF_ZM4598.C1.o4.fg.pep
MDPKGKGNMINDKEKETLYVDEPKGDKPTNSGSNKKRKDGKKKRHIKKIIYYDSDASSSSPRDDDDEDSSTNKKTQIHKNAQATTMLLASLCRDEYNKVSDLDNAKQIWDTPKISHEGNDTTMITKMELVEGELGRFAMKRGEEPTETYNMHKTLVNMIRSYGSTRWTDHDVIRLMLRSFTVIDPHLVNLIRENPRYIKMTPEEILGKFVRGRMMVKEVRCVDDIANRPLPLNEPKPTALKATSSKDTLPNKVAQVEAAGLNEDEMTLVIKRFKTALKGHKEYPNKNKSRGKRSCFKCGKSGHFIAQCPCPDNDNDQPQEKKEKERKKNYRKAKGEAHIGKCKDFDIDAYNTHPFTILKLNNDVANLNAQLKTCKSENDKIKFARDAYTIGRHPSIKDGLGFQKSIKNLTSQRTSNLVKEKGKVPMASITHSSHDRKNHAYLCAHVKNASNIAHHDNCYNHVVLPEHHDAIFDSHAMFAYSNSFYVHGLCIRGTSWIIDSRCTKHMTGEKKMFTSYIKNKDSQDTIIFGDGNHGKVKVLGKIAITTEHSISNVFLVESLGYNLLSDKSETQVEEYLEEEGIKHEFSAPYTPQQNGVVERKNMTLIDMARTMLGEYKMLVRFWSEVVNTVCHAINRLYLHRLLKKTSYELLTGNKSNVSYFRVFGSKCYILVKKGYNSNTKAYRVFNKSSGLVEVSSDVVFDETNGSPREQVDLDGVDEDEVSTIAMRTMAIGDVQPQEQQDKDQPSSSTLVQPXTQDEEQVPQDGGM

SEQ ID NO: 10670 - protein, 945 aa, Zea mays
  unsure (1)..(945): unsure at all Xaa locations
  Clone ID: TF_ZM4328.C2.o7.fg.pep
MTRRNMRMIARMSLHHHKTGDVEEEEIRRFYTHLNKEDKVFLVKLLRRNKEQGETLLRLEETLIKTNNSLEKMTKEHEELKCSHDNLVQQYESVLFEQRNNHDVLSDVAQLKTEISMLKSQVEMINLEKKIALSEKYDMLSYSHNELVDDHIMLDVAHEVVIANLNSCEPHSCTRAHLDNISPCANLCCSKESQFLNEHQAAGSKEKLLINKERNKKAKQLRRRRIAQPPQDIHGRVVKKLETGETAASVHKKDVPKAINEEINMNKEKGKNSITHVVCIDHLSMSSKSKKGRGKRRCFKCKELGHFIASCPHKDKDEGMRRCFGCNDKDHMFTSCPLMKNQRCAPSKMTLTKKKDKQQVSCQVERCFCYMCGEHGHLPKVKGKETTDQANDGGKKSFKVPSAREKVKETRNPKPGVKKKTCKVKVDQVKKSYGTNVSQIQKSKGSPAERPVEYLLRVHRPIVSSHDIVVTDINIVEGSICHTDISEQTEEGVEIDSKPRRHPDPVPGHRELSSSPYTPQQNGVVERKNRTLLDMARTMLDEYKTPDRVFGSKCFILVKRGRKSKFAPKAIEGFLFGYDSNTRAYRVFNKSTRLVEVSCDIVFDETNGSQVEQVDLDELDDEEAPCVALRNMSIGDVCPKESEEPTHAQDQPSSSNQASPPTQDEDQAQNNEDEDQEDEPPQEEDNNQGGDEVDQDKEDDQEIQGQRPPHPRVHQAIQRDHPVNSILCDIHKGVTTPSRVAHFCEYYSFVFSIEPYRVEDALRDSDWVLAMQEELNNFTRNEWVFRNKQVEHGVVTRNKARLVAKGYSQVEGLDFGETYAPIARLESIRILLAYATHHGFKLYQMDVKSAFLNGPIKEEVYVEQPPGFEDKFSRIMIQKFEMSMMGELKYFLGFQVKQLQEGTFISQTKYIQDILNKFGMKDVKPIKTPXGTNGHLDLDTGGKSV

SEQ ID NO: 10671 - protein, 1347 aa, Zea mays
  unsure (1)..(1347): unsure at all Xaa locations
  Clone ID: TF_ZM4993.C10.o4.fg.pep
MFGGDGPPPVFYGDNFPYWKIRMEAYLESIDIGVYKAATQGFSSPRDPTNPVGDEFNYEKWNAKAKNTLFRGLCKDVFNRVRNHKNAHDLWMDICALHEGTRSEREERYHIAMRKLNSFEMLANENANAMYSRLNILVEEVNGLGLTQISQPDVVRKILSVLPIDKYGHIVTVLHQMDLSVTTPTQILGKINAHEMYMHINDKDESSSKRKDLALKANQERKGKAKVQIEEESSSDDDLDANISLMVRNTTKMLKKLNREGIKFDSRKKKFFSSKRKPISEMDCYNCGELGHLAHQRNKPKKNKFKGKKEDYSDDEKKEKRFFKKKDGKHKRFHKKKXGKAYIVGDWLTDIESSSGSSSSEEENDEKVVAIAGDFSSPPPSPSSTSHLCLMARGEXSDSDTDEEFASPSYDKLADLLKEYTQIIRKSKAKCDKLKNENESLNAKYDIVMKASDEMKEENKTMSSTVNELTSSLKDAKDKCDKLNEADRELKDRLVKIKEDYTKIKFDHDNLLIENELLSCNTHEAINPVVKIDVATSCDDLSQGEQTSLHDELTEKVEVLTLDNQKLKRYLTDATTRGKVAIENNDFNNELAMDNERLKNESGIGYNAFVQKKATTQYKPKQTHKPIKCFECGKEGHFAHNCKAKPPTPLPKHSRIFAFNAHYVLRKVANGKVNYKTGGSHWVIDSGCTQHMTGNPWMFTSLDENVDGQDKITFGDNSKGKVQGLGKVAISNDLSISNFLLVAPLSFNLLSVGQLCDLGLQCLFTPIEVIISKMDDESMVFKGFRYNNLYLVDFTSEDVDLRTCLFTKASLGWLWHRRLAHVGMSTLKKVLKKDMVRGLKDVVFEKEKPCSACQAGKQVANTHPTKAFMSTSRPLELLHMDLFGPTNYVSVGGNLYCLVIVDDFSRYTWVFFLHDKSEVTSIFKKFAKKAQTEFDCKIKKIRSDNGKEFDNTNIHEYCDEIGIKHEVSATYTPQQNGVVERKNRTLITLARTMIDEYNTPERFWSKAYRVFNHATVMVEETYDVEFDETNGSQGALENLDDVGDEPLREAMKNMPIGAIKPKEDEEEPTCIDEALQDPDLVNAMHEELNNFTRNQVWTLEKPPQGTRIIGTKWVFRNKQDHHGVIVRNKARLVAKGFSQVEGLYFGETFASVVRLEAICILLAYASCYDIKLYQMDVKSSILNGFINELVYVEQPPGFEDPRYPNHAYRLSKALYGLKQAPRAWYERLRDFLIEKGFKIGTVNTTLFTKKHNSDIFICQVYVDDIIFGSTNDYHCKEFGELMSKEFEMSMIGELTYFLGFQVKQMKDGNFLSQEKYTKDLLKRFNVEKCKPIKTPMPTNGHLDLDEG

SEQ ID NO: 10672 - protein, 3573 aa, Zea mays
  Clone ID: TF_ZM4450.C3.o13.fg.pep
MSGGDGPPPVFDGDDFPYWKIRMEAYLEAIDIGVYKAATQGFPEPRDPTNLVGDEFNYEKWNAKAKNTLFRGLCKDVFNRVRNHKNAHDLWMDICALHEGTRSEREERYHIAMRKLNSFEMLTNENANAMYSRLNILVEEVNGLGLTQISQPDVVRKILSVLPIDKYGHIVTVLHQMDLSVTTPTQILGKINAHEMYMHINDKEESSSKRKDLALKANHERKGKAKIQVEEESSSNDDLDANIALMVRKTTKLLKKLNREGIKFDSRKKKFFSNKRKPISEMDCYNCGELGHLAHQCNKPKKNKFKGKKEDDNDDEKKEKKFFKRKDGKQKRFHKKKNGKAYIVGDWLTDIESSSGSSSSEEENDEKVAAIAGDFSSPPPSPSSTSHLCLMARGERKVQNDINIDDDSDSDSDEEFASPSYDELADLLKEYTQIIRKSKAKCDRLKNENESLNAKYDIVIKASDEIKEENKTMSSTVNELTNSLKDAKEKYVKLNEANRELQSRLVKIKEDYTQIKFDHDNLLVENELLSCKTHEAINPVVKLDVATSCDDLIQEEQTSLHAELTEKVEVLTLDNQKLKNYLTDATTRGKVAIENNDFNNELAVDNQRLKNEVKKLKSENEHLATSVQKFNKGQYLQNELLMNTVMKNNKSGIGYNAFVQKKAITQYKPKQTHKPIKCFECGNEGHFAHNCKAKPPTPLPKHSRPFAFNAHYVLRKVANGKIKVNYKTGGSHWVIDSGCTQHMTGNPRMFTSLDENVDGQDKITFGDNSKGKVQGLGKVAISNDLSISNVLLVAPLSFNLLSVGQLCDLGLQCLFTPSEVIVTKMDDESMVFKGFRYNNLYLVDFTSEDADLRTCLFTKASLGWLWHRRLAHVGMSTLKKALKKDMVRGLKDVVFEKDKPCSACQAGKQVANTHPTKAFMSTSRPLELLHMDLFGPTNYVSAGGNLYCLVIVDDFSRYTWVFFLHDKSEVASIFKKFAKKAQNEFDCKIKKIRSDNGKEFDNTNIHEYCDEIGIKHEVSATYTPQQNGVVERKNRTLITLARTMIDEYNTPEMFWAEAVNTACYASNRLFPHRLLAKTPYELLNGKKPDVSFFRVFGCKCYIYKKRHHLGKFQRRCDIGFLLGYSLKSKAYRVFNHATGMVEETYDVEFDETNGSQGALENLDDVGDEPLREAMKNMPIGAIKPKEDEEEVQIIDRPSSSNVPQNDEKDERHANEDTFVSHEQARVQAEDVDAPGSSSQVVDRRNSSLLQAHPQNQIIGSPSQGVITRSHRHANFIEHHSFVSCVEPTCIDEALQDPDWVNAMHEELNNFTRNEVWTLEKPPQDARIIGTKWVFRNKQDDQGVIVRNKARLVAKGFSQVEGLDFGETFAPVARLEAIRILLAYASCYDIKLYQMDVKSAFLNGFINELVYVEQPPGFEDPRYPNHAYRLSKALYGLKQAPRAWYERLRDFLIEKGFKIGTVDTTLFTKKHNGDIFICQVYVDDIIFGSTNDYHCKEFGELMSKEFEMSMIGELTYFLGFQVKQMKDGNFLSQEKYTKDLLKRFNMEKCKPIKTPMPSNGHLDLDEGGNPVNQTLYHSMIGSLLYLTASRPDIMFSVCMCARFQSNPKKAHLRAVKRILRYLRHTTSVGLWYPKGATFDLIGYSDSDYAGCKIDRKSTSGGCHLLGRSLVSWTSKKQNSVALSTAEAEYIAAGACCTQILYMKQTLLDYGVVLEKVPLLCDNESAVKIANNPVQHSRTKHIDIRHHFLRDHVAKGDIILEGVSHQIRMPRTKNASAPGGGDDEEPRRPFRQVKGKTVYLEQQEGRKKWRMDREARAAAAAAAAAAQAALGDQPQTPSDQIAFRARRLTSRPRSSSHTSASTPPPTLPAPVTPIAPSTSTAIPTTSTTPASTASPAPAPASAPPVPPPRFRERDETEVRPLVSDPRLFDLQRATAAWVRRFRYVPVESWLPAQRDPAAGVLFSTWIQESFFRAQMSAQIALRVHRLLDLPAFLLAAGADSEAHLTYLPGLLTLLTISGRYVEEWVRVFYASVWIDLDHHWMRFRFEREDVTITASQIRQLFGFPESMTRLHSLCYGSSDPPRRPHGGVAPGTAHVAALFRPPFTDGSRRSPADFTTAAKYLYELIRRTLLPRMGYREATTHIQLWLLGALVSHSEFDVVDFLICEIEDTVLDGIRARRQLPYAHYLPRMQLFDSLTLRVQQLMMMMMMMMILGFLLRLRLLCLHAHMIMRLGVLVLPLLILRLWTLLLLRFSRLSPSSRLTWQPSRPVYPTGCSRCFRTCRTGRMRFSSSYFRIGLRLPVPPASAVTTTAVAVSMTASVLRQMTAWWRWELGDHREDLVGDPTQVLVYYETDSSSPSTSGSESASTTSKRNERKKYSKPPMFEDEDYSMWSDKMRHHLTSLHKSIWDIVEYGVQVPKKGDKDYDSEEVEQIQHFNSQATTILLASLSREEYNKVQGLKSAKEIWDMLKTAHEGDDVTKITKRETIEGELGRFRLRQGEEPQDMYNRLKTLVNQVRNLGSKKWDDHEMVKVILRSLVFLNPTQVQLIRGNLRYTLMTPEEVIGNFVSFELMIKGSKKIVELDGPSMFEAQLVAFKAMEEKKEESTSSRTPIDASKLDNEEMALIIKSFRQILKQRRGEDYKPRSKKVCYKCGEPGHFIAKCPLSSDSDMGDDKKGRRKDKKRYYKKKGGDAHVCQEWDSDESSTDSSSYEDAANIAVTKGLLFPNIGHKCLMAKDNKRKKVKSRSSTKYETSSDEDNCSDEEDNLRTLFANLNMQQKEKLNELISAIHENDELLDTQEDFLIKENKKHVKVKNAYALEVEKYEKLSSELSTCHDTIANLRNENAKLIAKVDSNVCDDSISNLRNDNANLLAKIEKLNNSLASLRNENENLIAKAQDFDVCNVTICNLRSENDILHAKVVELKSCKPSTSIVEHTSICTRCRDINVDVIHDHLALIKKQNDHIAQLNAKINEHDLENEKFKFARSMLYNGRRPGIKDGIGFQKGDNVKLNAPPKRLSNFVKGKAPMPQDNEGYILYHVGYPESKIRRIHSRKSHSGPNHAFMYKSETSSSRQLTHAKLPRKKTHIASNDHNISFKTFDASYVLTNKSGKVYASGGSSWIIDSECTNHMTGEKKMFSSYEKNQDPQRAVRFGDGNQGVTVFRRCDDSIAFKGVLEGKLYLVDFDRAGLDTCLIAKTNMGWLWHRRLAHVGMKNLHKLLKGEHILGLTNVHFEKDRICSACQAGKQVGVHHPHKNIMATDRPLELLHMDLFGPIAYISIGGSKYCLVIVDDYSRFTWVFFLQEKSHTQETLKGFLRRAQNEFGLRIKKIRSDNGTEFKNSQIEGFLEEEGIKHEFSSPYTPQQNGVVERKNRTLLDMARTMLDKYKTSDRFWAEAVNAACYAINRLYLHRILKKTSYELLTGKKPNVSFLESLAVEGFLLGYDSNTRAYRVFNKSSGQVEVFCDIVFDETNGSQVEQVDLDEIGDEEALCVALRNMSIGDVCLKESEEPPHAQDQPSSSMQASPPTQDEDKSQNDEGEDQEVEPPQEESNDQGGDAHDQDEEDEQVPRPPHPRVHQAIQ

SEQ ID NO: 10673 - protein, 183 aa, Zea mays
  Clone ID: TF_ZmC441998_1.pep
MEYQAPAPAAGAGGRGCYNCGDASHRAAECPTKGTPTCYNCGEKGHVSRECSSPQAEKTCYRCGGTGHISRECTKDGGAPMGGRGGGSQECYKCGQVGHIARNCSQGGGYGNGGFGGGRGGYCGGAGGYGGARQTTCYSCGGFGHMSRDCTQGQECYNCGEVGHLSRDCPQETSSERGCYRFK

SEQ ID NO: 10674 - protein, 254 aa, Zea mays
  Clone ID: TF_ZmC31167_1.pep
MTSSRSKSKSRSRSRSRSRSRSRSPRRRDRLRSERAPHRSRSRSRSPYRRRERRGHRDFACKNCRRPGHFAKECPSAPMCNNCNLPGHFAAECTLQTVCWNCKESGHIASECKNEALCHACNKTGHLARDCPTSGANVKLCNKCFKSGHIAVDCTNERACNNCRQPGHIARECKNDPVCNLCNVSGHVARVCPKTTLASVIQGGPFRDILCRICGQPGHISRNCMATIICDTCGGRGHMSYECPSARIFGLRRL

SEQ ID NO: 10675 - protein, 2535 aa, Zea mays
  Clone ID: TF_ZmC36592_121.pep
MRLQLDGLAKDIHITNVHLFPLETTQIEVVRRSRNMTPQATTNTTLDTIMTRLEELSQHLSEIHGDTDYGGDTEYDGQPRRHRYGPRRVVRNQNNFSSKIELTIPEFNATYNPDTSRRRPPPPVLVARVTPTTSNTDPHTDVTVATSRTSLTTPPEPYCRRFELNKKTTQNSILEGKIGILFDQDCNLADGEYILVPEQGAAQEVAPDPAPEPAPEDLPATALEGKPRNSASAFGNQTPQPNSCMSRGRGVDSSHQMTSHGSSNDGNALTHTDGLAREGFPRILWEVLQGAGYTTPPQYAVQQFEKHRVPRCRVRMTLEPHPLQPGWRSLDSESFGYRAEDTIEAIALHGLTTFCGFHPLELATHPIGLFPAEREDDPMWKDRVEHAKDIWAIYPGQTAHLTIRCMNALYRLQVMRGEAMSHLMALLEATKITLDNREELVVDLSQEMVEKDLQVEQLSTDIQELEELVGTRENTIEVLEDQLINTQQQLAEANEHLDMHHQEIQDQEANEDVDIEGGDEPASSVDTAGSGRPPSPESSMAGRQRRGQNEHVPPPPPPPPTLQELMAQQNEILRQLAQRQPPPQHYGGGDHQRHPAAATYQEFLSTQPPLFTRAEDPLDADVWLRVVESKFPLLHGVCSEVTKVRFATQQLRGPARTWWDHFLAMQPEDREVEWREFKAAFRVHHIPAGIMDRKLNEFLALTQGNRTVLQYAQAFNDLCQYAGYHADTDEKKRDRFRRGLSTKLRDRLNTVRANSYNELVNMAISQEDCITARQAEKKRKTPVAGPSAQPQRFRIVSDTQGRGPQQQQGRWVIRPQQQQQPAPNRTQFPAQRGNQQQQQYRQANDNRCFTCGNTGHYAKNCPRNQQRQGQNANQNQGKSFISAKFSAKCQLPFHHTNGGITISTPGGRVATYQINRHVPIKFGSLIIKTTLLILGLDSVDIILGTDWLTRHRAVIDIAARAIEVHSPTCGETTLYLPDQGCTRSCAFVMIDSPVEKIPVVCDYPDVFPDELPGMPPDRDIEFAIELQPGTAPISKRPYRMPPAELAELKKQLQELLDKGFIRPSTSPWGCPALFVKKKDESLRMCVDYRPLNAVTIKNKYPLPRIDVLFDQLVGAKVFSKIDLRSGYHQIKIHASDISKTAFSTRYGLYEFLVMSFGLTNAPAYFMYLMNSVFMPELDKFVVVFIDDILVYSKNEAEHTKHLHTVLQRLRDHQLYAKLSKCEFWLKEIKFLGHTISQDGISVDPEKVQKVMDWKPPTTVKQIRSFLGLAGYYRRFIPDFSRIAKPMTELLKKGVKFEWSQKCDDAFHTLRQHLTTAPVLAQPDNTKPFEVYCDASGTGLGCVLMQENRVIAYASRALRPHEQNYPTHDLELAAVVHALKIWRHYLMGAHCNIYTDHKSLKYIFTQADLNMRQRRWLELIKDYDLEVHYHPGKANVVADALSRKAQCNCMNMDVGVTTLCDELCRLNLEVVSAGDLSYISVEPTLQEQIVRAQVEDKGVQVIKDMIKQKAEKYKCFRQDSKGILWFGDRLVVPKDPELRKQILDEAHLSKFSMHPGSNKMYHDLRSLYWWTRMKREIAKYISECDTCQRIKASHLKAAGPLQPLPIPSWKWEDICMDFIVGLPNTSRHHDSIWVIMDRLTKTAHFLPVHTTHKTEKYAEIYVDQIVRLHGIPKTIISDRGALFVARFWEKLQESLGTQVIRSSAYHPQTDGQTERVNQILEDMLRACALHYGKDWDKCLSLAEFSYNNSYQSSLKMAPFEALYGRRCRTPLNWSQAGEREIFGSDLVLEAEAKVRVITKNLEAAQARQRSYHDKRRKPLQFEVGDHVYLKVSPTKGVQRFGIKGKLAPRYIGPYEIKASCGPVAYQLELPPRMSTVHNVFHVSQLRKCVRLPTEVIPEPDIEIEPDLSYQEYPVKVLDQKERSTRARSIRMYKVQWSHHSAEEATWETEDFLCSRFPDFLPKGVDCNLADGEYILVPEQGAAQEVAPDPAPKPAPEDLPATALEGKPRNSASAFGNQTPQPNSCMSRGRGVDSSHRGRHARTQANSSTGRTTSFHSKPVAVAPPAATSPSTSTPRDKIVAKSLAPPPSTKGSSFAGRTKDIQCYRCKGFGHVIRDRPNKHTLIIHNNGEYSSASDSEETIYAMLATDVAGTQEEHVDATDTNKYESLVVQCVLSTQVAQPEQHQRHTLFHTKGVVQERSIHIIIDGGSCNNLARMQLMEKLSLPTRPHPHPYHIQWLNRGGKLKVTRSIHVHFSMGSYHDYADCDVVPMEACSLLLGRPWKYDTDSLHHGRTNNYSLMFKGKKIILHPMTPEQIVKSDIARAKQQYQQPPIPNEIKLKAPILLATKSNFDDGYIRESLSPISIPILLIPKKDGTWHMCVDCRAINNITIHYGYPIPRLDDMLDELSGAAIFSKDSTDGLCVISAPSPLCCMNSPRRASLSPRSFPYIIKHKNTKDNTIADALSRGYTMLSQLDFKIFGLQTVKEQYANDSDFKDNLMHCKDGRPWGKFHEPHGGRLMGHFGVYKTHEILAAHLFWP

SEQ ID NO: 10676 - protein, 270 aa, Zea mays
  Clone ID: TF_ZmC1373_8.pep
RTLSPRPPYLQAGRARSRSVRPRVLRRRRPPAPEEMPRYDDRYGNARLYVGRLSSRTRSRDLEYLFSKYGRIREVELKRDYAFIEYSDPRDADEARYNLDGRDVDGSRIIVEFAKGVPRGSGGSREREYVGRGPPPGTGRCFNCGIDGHWARDCKAGDWKNKCYRCGERGHIERNCQNSPRSLRRERSYSRSPSPRRGRARSRSYSRSRSYSRSRSRSYSESPRGRRTERDERRSRSISYSRSPRRSLSPEAKDMDRSPTPDRSRSPRRS

SEQ ID NO: 10677 - protein, 2273 aa, Zea mays
  Clone ID: TF_ZM5008.C2.o12.fg.pep
MARTMLDEYKTSDRVFGSKCFILVKRGRKSKFAPKAVEGFLLGYDSNTWAYRVFNKSTGLVEVSCDIVFDETNGSQVEQVDLDELDDEEAPCVALRNMTIGDVCPKESKEPPQAQYQPSSSNQASPPTQDEDQAQDNEEEDQEDEPPQEEDNDQGGDDNNQDKEDDQEEQGQRQPHPRVHQVIQRDHHMNSILGDIHKGVTTRSRVAHFCEHYSCVSSIEPYKVEDALRDSDWVLAMQEELNNFTRNELYQMDVKSAFLNGPIKEEVYVEQPPGFEDSEYPNHVYKLSKALYGLKQAPRAWYECLRDFLITNGFKVGKADHTLFTKTIANDLFVCQIYVDDIIFGSTNKSTCEEFSRIMIQKFKMSMMGELKYFLGFQVKQLQEGTFICQTKYIQDILTKFGMKDAKPIKTPMGTNGHLDLDTGGAKGSTQTNKKIQVGVQNKGAKETEENPGLPHRTVRCTTGQCPFSPIHPPSRRLLVCYKCGKPGHFIAKCSMSSDSDRGDDKRGNKKEKKRYYKKKGGDAHMCREWDSNESSTDSSSDEDAANIVVNKSLLFPNVGHKCFMAKDDKRKKVQSRTSPKYTTSSDEGSSSDDEDDLLTLFANINMQQKEKLNELIGAIHEKDELLDNQDSIKAKINEHEKENKKFKFARSMLYNGRCPGIKDGIGFQHGSNVKINAPKRLSNFVKGKAPMIQNNEGYILYPANYPEHKIRRIHARKSHTISHHAFMYNNEASSSRQSTHVKLPKNKTPTASNEPNISFKTFDASYDLTNKSGKIVAKYVGGKHKWGRKSKFAPKAVEGFLLGYDSNTRAYRVFNKSTGLVEVSCDIVFDETNGSQVEQVDLDELDDEEAPCVALRNMSIGDVCPKKSEGLHKHKINRHLPSKHLHQLKMRIRLKTMKMKTKRMSHLKRRTMIKGEMKLIKTRKMIKKYRVKDHHTQESIKQFNEITPSTPSLPYKVEDALRDSDWVLAMQEELNNFTRNEVWHLVPRPNQNVVGTKWVFRNKQDKHGVVTRNKARLVAKGYSQVEGLDFGETYAPVARLESIRILLAYATYHGFKLYQMDVKSAFLNGPIKEEVYVEQPLGFENSENPNHVYKLSKALNGLKQAPRAWIMIQKFEMSMMGELKYFLGFQVKQIQDGTFISQTKYIQDILNKFGMKDAKPIKTPMRTKGHLDLDTGDGHLSMYHHKFRNYHIPAGLMKIKKKEFLSLKQGNMSVSEYRDKFIQLSRYVPDEVADDKRKQEHFTEGLNRPLQYALVAHTFPSFQKLLDKALAIEHKRVQLGDLKRKAITQGQGYTNSSRRRTTPSSVDSTGVSTTPPTRQATPTGTPTRPTGQKIGPTCFKCSQVGHYANACPAGNSSASAQNKQQTPGKGFSIARVNQVSAEATADGADITIDREVEFVIDLLPGTAPISKRPYRMSVEELKELKKQLTELQEAGYIRPSSSPWGAPVLFVQKKDGSQRMCVDYRSLNNVTVKNKYLLPRIEDLFDQMRGARVFLKIDLRSGYHQMKIRPSDIPKTTFSTRYGLYEFTFMSFRLTNAPAYFMNLMNKVFMEYLDRFVIVFIDDILIYSKSDSDHEEHLRLVLQKLRNNQLYAKYSKCEFWIDEVPFLGHIVSNGGISVDPAKVREIVAWSIPSIVIEVRSFLGLAGYYRRFIEGFSKIAKPMTSLLEKGREFKWDSKCQDKLAVVVHALKIWRHYIMGTKCQVYTDHKSLKYIFTQKDLNLRQRRWLELIKDYDLEIHYHPSKANLVADALSRKEHVHSAIVAQLPDEIVEDFRRLNLGIVAHTEGVTIELEPTLEHEIHRGQVGDAKIQEIKDLITEGRGPEFTEDEQGTVWFKERICVPEIDSLRETILKEAHDSDYSIHPGSTKMYQDLKQKYWWYGLKRDVAADVAKCDVCQRVKAEHQRPAGLLHPLKIPEWKWEEIGMDFIVGLPCTPAGYDSIWVIVDRLKKVAHFIPVRTNYTGAKLAELYMTRIVCLHGVPKKIVSDRGSQFTSQFWKKLHESLVTQLNFSSAYHPQTNGQTERTNQVLEDMLRACALKHGGSWDKSLQYTEFSYNNSYQASLKMSPFEALYDRKCMTPLYWDQTGERQFFGPELIQETEEQVRMIKENLRIAQSRQKSYSDTRRRLLKFKEGDHVYLKVSPIRGMRRFKVKGKLSPRFIGPFLILKRVGVVAYQLELPDHLADVHDVFHVSQLKKCLRVPEKQLPLEDLSVQDDLTYAEYPIKILDTLTRVTRSKVIKMCKVQWSHHGEDEATWEREEELRIDFPHLFPSST

SEQ ID NO: 10678 - protein, 146 aa, Zea mays
  Clone ID: TF_LIB4729-106-A1-K1-A4.pep
MTSSRSNSRSHSRSRSRSRSRSPQRRDRLRSERAPRRSRSHSRSRSPYRRRERRGCKDLVCKNCRRPGHFAKECPSAPTCNNCNLPGHFAAECTSKTVCWNCKEPGHIASECKNEALCHTCNKTGHLARDCPTSGGYVKLCNKCFK

SEQ ID NO: 10679 - protein, 680 aa, Zea mays
  unsure (1)..(680): unsure at all Xaa locations
  Clone ID: TF_ZmC4916_404.pep
MDTHRPPHFDGTNFPYYSARMACYLEAVDLGVWRVTRDGMKPLKNPEKPTTSEEKEIHLNARAKNCLFESLSMDIFNQVFTLKTANEIWLKLHELHDGTSNVREQKHCLVLNEYNSFAMKDDELVRDMYSRLNQIINELNSIGINKLGDADIVRKIISLLPQQKYGSIITILHNMEDLSNMTPTIVIGKIAAFEMSRKMSRGEEPTSSKPYAFAXEESDDDEDNQPCTSSSEDEETIRRVGKVMRMIRKINLMGVPLQVEDLLFNIDRKKQRKRGCFACGEKGHFRDNCPNMAKPKKERSKGKALTSVRTWDDSSSEDESPRTRSHRSSSRSSRTSHKCLMARGNKSIPSSSDESSSDDEGEGKASLDELAEAVEFFQDVCTKQKAQLKNLKNKLVSSQNDYKGLLEKFETFANLNSELSTKIELLESSAPSTATDDSLIKKNEKLKAKLASSQEAIENLLEKMEILSIHNNELTTKLESIGSTPAASLVEISEIIKKDASTSCFDLIDDSNTCNQVAVENIVIETCTDEVAKENEQLKQEVARLGKALYDKKGKAKQIQPPQDNTTAGVNKPMEGETVICRICHKEGHKSFQCKAMTGDKQRQKLKQKPSSKISSTYIKKVNKKDATPYLIKKKKNGKVIAIKANKQANKGKGAKRIWVPKEIISTMKSTKKVWIPKGK

SEQ ID NO: 10680 - protein, 475 aa, Zea mays
  Clone ID: TF_ZM4448.C1.o2.fg.pep
MESPSDFGLSKDSTQKHYKMIKLGLRNLKRSLPEETLSKLSTMPYSLSYPHSARSFVMDPLDLLPDFLMLDLGMSTTSDVTKCKECGVLTSQNNTINETADEQTFKTQKDAQPNQQTSDLGTCCCCEYYGIPCRQISTNESKTTKQKNQILFYGINRQMSPQEQLIADSLIPNALSVDELQSIPKRKHHKDAQPQEETQECYIDGWTITCTQFQPHRRIRSKKQKGKHGKSQEITSRKACYQCGREGHYFRNCPEKSSLSDTPEMKQPQSPDMEYEQKCTETSTNNVKTTPPCNLSSRTCFGCGDIDHLVNGCPKKDVEINKVQKKRQRPQTHASTKNKQRKESTGRISYAVTGTIPYDDAVIFGTLVIHTTIATVLYDPRTTHSLISAQFATKYGIFKCPLRSRKTISTPERKVLANYICPKVSIKINGIVLGPCFVAPKVLREEAASAEIVPRKWPKVPFYRASALQTDIKIE

SEQ ID NO: 10681 - protein, 624 aa, Zea mays
  Clone ID: TF_ZmC71_26.pep
MARRRSQKNKKTQENPTRKEVTLEILCDDCSNYDSWSTSVINAFRTIHPQLEQIIDKSIFPSSFNGKINSEEDQRCYRLNYLAFDILNNSLSKEDYHAFISNYNESIPDAHDIWTRIKIKFDESKHNSSFDASTSFSFCDTNPCKEEGENERWRPNDESTSPKGLSSHFDSHMCCVANENDSGSTNEDEEEERSFVHLYARLSQEDKAVMLKLLERAREQSEARQRLEDILSIKMQHFDELTKEHKELKCSHVDLVQRYETISIEQNNASHCIAQLVNRNTLLKDQVEKLKIENLAFQEKYDMLLCSYENLRDDHIILNIAHEVVIENLKSQQPHSCTCVQINTILPCANACCPSTSKSSFELEFAGTNDDSYQKLKEENERLKKSLTQLKGKCIAQPSQDNCDHMVKKLETGTTVACTTSLEENVKDLRIAMRREQNMKFNTSSKSLNHASTKGNIQGNDQVTLHIKRCSECFEEGHLIRSCPYIKKGLIINKDDRLCFKCSKKGHMLRSCPHLKQKGIGLEKKVFTNHVAGNKQGKKKSSKLGKRLCYTCRKKGHQCKDCPIGKIPTPNLSLDSYITRQPKIATCARKVTSLPSASTKDTWVPRSLFTNLNGPIKRWVPKCA

SEQ ID NO: 10682 - protein, 3229 aa, Zea mays
  Clone ID: TF_ZmC36592_151.pep
MTSHGSSDDGNALTHTDGLAREGFPRILWEVLQGAGYTTPPQYAVQQFEKHRVPRCRVRMTLEPHPLQPGWRSLDSESFGYRAEDTIEAIALHGLTTFCGFHPLELATHPIGLFPAEKEDDPMWKDRVEHAKDIWAIYPGQTAHLTVRCMNALYRLQVMRGEAMSHLMALLEATKITLDNREELVVDLSQEMVEKDLQVEQLSTDIQELEELVGTRENTIEVLEDQLINTQQQLAEANEHLDMHHQEIQDQEANEDVDIEGGDEPASSVDTAGSGRPPSPESSMAGRQHRGQNERVPPPPPPPPTLQELMAQQNEILRQLAQRQPPPQHYGGGDHQRHPAAATYQEFLSTQPPLFTRAEDPLDADVWLRVVESKFPLLHGVCSEVTKVRFATQQLRGPARTWWDHFLAMQPEDREVEWREFKAAFRGHHIPAGIMDRKLNELLALTQGNRTVLQYAQAFNDLCQYAGYHADTDEKKRDRFRRGLSTKLRDRLNTVRANSYNELGRGPQQQQGRWVIRPQQQQAPNRNQFPAQRNNQQQQYRQANDNRCFTCGNTGHYAKNCPRNQQRQGQNANQNQGKRQKVQGCTRSCAFVMLESPVEKIPVVCDYLDVFPDELPGMPPDRDIEFAIELQPGTAPISKRPYRMPPAELAELKKQLQELLDKGFIRPSTSPWGCPALFVKKKDESLRMCVNYRPLNAVTIKNKYPLPRIDVLFDQLVGAKVFSRIDLRSGYHQIKIRASDIPKTAFSTRYGLYEFLVMSFGLTNAPAYFMYLMNSVFMPELDKFVVVFIDDILVYSKNEDGHTEHLHIVLQRLRDHHLYAKLSKCEFWLKEIKFLGHTISQDGISVDPEKVQEVMDWKPPTTVKQIRSFLGLAGYYRRFIPDFSRIAKPMTELLKKGVKFEWSQKCEDAFHTLRQHLTTAPVLAQPDNTKPFEVYCDASGTGLGCVLMQENRVIAYASWALRPHEQNYPTHDLELAAVVHALKIWRHYLMGAHCNIYIDHKSLKYIFTQADLNMRQRRWLELIKDYDLEVHYHPGKANVVADALSRKAQCNCVSMDVGVTTMCDELCRLNLEVVSSGDLSYISVEPTLQEQIVRAQVEDKGVQIVRLHGIPKTIISDRGALFVARFWEKLQESLGTHVIRSSAYHPQTDGQTERVNQILEDMLRACALHYGKDWDKCLSLAEFSYNNSYQSSLKMAPFEALYGRRCRTPLNWSQAGEREIFGPDLVLEAEAKVRVITKNLEAAQARQKSYHDKRRKPLQFEVGDHVYLKVSPTKGVQRFGIKGKLAPRYIGPYEIKEACGPVAYQVELPPHMSSVHNVFHVSQLRKCVRLPTEVLPEPDIEIEPDLSYQEYRVKVLDQKERSTRARSVRMYKVQWSHHSAEEATWETEDFLRSRFPDFLPKGVDCNLADGEYILMPEQGAAQEVAQIQHPSLHQRTCLPLLWKASPGSLEEMVARITWPSTLPPDDFTHPRQWRRHSFQFRFPFSRGFPFHLVGGAQLHRLPYAPLYTVQLYEDHRVPRCRVWLTLEAHPLQPSWRSLDSEAIGFRTDDTTEAVATKTLTTFCGYHPLEMCMSALYRLQALQSDAMAHLANLAQTTKLTLDSREDFVVDLSSELVEKDLQENQLHNVQQELEDANEHLDMHHQEIQDQEANEDVDIEGGDEPASSVDTAGSGRPPSPESISMWIFQMAGRQRRGQNEHVPPPPPPPTLQELMAQQNEILRQLAQRQPPPQHYGGGDHQRHPAAATYQEFLSTQPPLFTRAEDPLDADVWLRVVESKFPLLHGVCSEVTKVRFATQQLRGPARTWWDHFLAMQPEDREVEWREFKAAFRGHHIPAGIMDRKLNEFLALTQGNRTVLQYAQAFNDLCQYAGYHADTDEKKRDRFRRGLSTKLRDRLNTVRANSYNELVNMAISQEDCITARQAEKKRKTPVAGPSAQPQRFRIVSDTQGRGPQQQQGRWVIRPQQQQQQAPNRNQFPAQRNNQQQYRQANDNRCFTCGNTGHYAKNCPRNQQRQGQNVNQNQGKRQKVQVRQGRLNFTTMVDIPEGAPVMTGIFTVLNYPAIILFDSGASHSFISTKFSAKCQLPFHHTDGGITISTPGGRVATYQINRQVPIKFGSLVIRTTLHILGLDSVDIILGADWLTRHQAVLDIAARAIEIHSPAYGETVLYLPNQGCTRSCAFVLIESPVEKIPVVCDYPDVFPDELPGMPPDRDIEFAIELQPGTAPISKRPYRMPPAELAELKKQLQELLDKGFIRPSTSPWGCPALFVKKKDESLRMCVDYRPLNAVTIKNKYPLPRIDVLFDQLVGAKVFSKIDLRSGYHQIKIRASDIPKTAFSTRYGLYEFLVMSFGLTNAPAYFMYLMNSVFMPELDKFVVVFIDDILVYSKNEDEHTEHLHVVLQRLRDHHLYAKLSKCEFWLKEIKFLGHTISQDGISVDPEKVQEVMDWKPPTTVKQIRSFLGLAGYYRRFIPDFSRIAKPMTELLKKGVKFEWSQKCEDAFHTLRQHLTTAPVLAQPDNTKPFEVYCDASGTGLGCVLMQENRVIAYASRALRPHEQNYPTHDLELAVVVHALKIWRHYLMGAHCNIYTDHKSLKYIFTQADLNMRQRRWLELIKDYDLEVHYHPRKANVVADALSRKAQCNCMSMDVGVTTLCDELCKLNLEVVSSGNLSYISVEPTLQEQIIRAQVEDKGVQVIRDMIKQKAEKYKCFRQDSKGILWFGDRLVVPKDPELRRKILDEAHLSKFSMHPGSNKMYHDLRSLYWWTRMKREIAKYISECDTCQRIKASHLKAAGPLQPLPIPSWKWEDICMDFIVGLPNTSRHHDSIWVIVDRLTKTAHFLPVHTTHRAEKYAELYVDQIVRLHGIPKTIISDRGASFVARFWEQLQESLGTHVIRSSAYHPQTDGQTERVNQILEDMLRACALHYGKDWDKCLSLVEFSYNNSYQSSLKMAPFEALYGRRCRTPLNWSQAGEREIFGPDLVLEAEAKVRVITKNLEAAQARQRSYHDKRRKPLQFEVGDHVYLKVSPTKGVQRFGIKGKLAPRYIGPYKIKEACGTVAYQVELPPHMSAVHNVFHVSQLRKCVRLPTEVLPEPDIEIEPDLSYQEYPVKVLDQKERSTRARSVRMYKVQWSHHSAEEATWETEDFLRSRFPDFLPKGVDCNLADGEYILVPEQGAAQEVAPDPAPEPAPEDLPATALEGSLEEMVAGITWPSTLPPGWTVEWDPASAGEEHEE

SEQ ID NO: 10683 - protein, 253 aa, Zea mays
  unsure (1)..(253): unsure at all Xaa locations
  Clone ID: TF_ZmC1373_10.pep
YGNTRLYVGRLSPRTRSRDLEYLFSKYGRXFRCFYTTMEVWWKGALDGIGGHSSNVCGGLWXRAPLVIREVELKRDYAFIEFSDPRDADDAQYNLYGRDVDGSRIIVEFAKGVPRGSGGSRDYNGRGPSPGTGRCFNCGVDGHWARDCQAGDWKNKCYRCGERGHIERNCQNSPRNLRRERSYSRSLSPRRGRGRSRSYSRSRSYSRSRSPSGSPRGGRRDRDERRSRSLIYSRSASPRRSVSPVKEKERNRT

SEQ ID NO: 10684 - protein, 348 aa, Zea mays
  Clone ID: TF_ZmC1373_11.pep
FSSAPPQPGAPLDRDPGDMPRYDDRHGNTRLYVGRLAPRTRSRDLEYLFSKYGRFSVFYPTMEMMKLQVNVFEYFDSRQLIVCGNHFRRIREVELKRDYAFIEFSDPRDADDAQYNLDGREVDGSRIIVEFAKGVPRGSGGSRDYNGRGPPPGTGRCFNCGVDGHWARDCQAGDWKNKCYRCGERGHIERNCQNSPRNLRRERSYSRSPSGSPRGERRDRDERRSRSLSYSRSASPRRSVSPAKEKERSRTPDGSRSPSPRDKVSPPPKDNGAHNGSDREDSPGGREMSKRSRSPSDGYRSPVGNGRSPSPRDDRSPSPKVNNGDDPSPKGNNGDDEHRGSPRGSQSP

SEQ ID NO: 10685 - protein, 339 aa, Zea mays
  unsure (1)..(339): unsure at all Xaa locations
  Clone ID: TF_ZmC1373_12.pep
HPASSEPSKSKPSPRRIAAAGSASLDPDPGDMPRNDDRYGNTRLYVGRLSPRTRSRDLEYLFSKYGXGFSVFYTTMEMMKLQVNVFEYFDSRQLIVCGNHFRRIREVELKRDYAFIEFSDPRDADDAQYNLDGRDVDGSRIIVEFAKGVPRGSGGSRDYNGRGPPPGTGRCFNCGVDGHWARDCQAGDWKNKCYRCGERGHIERNCQNSPRNLRRERSYSRSPSRSLSYSRSASPRRSVSPVKEKERSRTPDGSRSPSPRDKVSPPPKDNGAHNGSDREDSPGGREMSKRSRSSSDGYRSPVGNGRSPSRSPSPKVNNGDDPSPRXNGDDPSPKGNNGD

SEQ ID NO: 10686 - protein, 355 aa, Zea mays
  Clone ID: TF_ZmC1373_18.pep
PHYRTPSKSKPSPRRIAAAGSASLDPDPGDMPRYDDRSGNTRLYVGRLSPRTRSRDLEYLFSKYGRIREVELKRDYAFIEFSDPRDADDAQYNLDGREVDGSRIIVEFAKGVPRGSGGSREYNGRGPPPGTGRCFNCGVDGHWARDCQAGDWKNKCYRCGERGHIERNCQNSPRNLRRERSYSRSPSPRRGRGRSRSYSRSRSYSRSRSPTGSPRGGRRDRDERRSRSLSYSRSASPRRSVSPAKEKERSRTPDGSRSPSPRDKVSPPPKDNGAHNGSDREDSPGGREMSKRSRSPSDGYRSPVGNGRSPSRSPSPKVNNGDDPSPKGNNGDDPSPKGNNGDDEHRGSPRGSQSP

SEQ ID NO: 10687 - protein, 315 aa, Zea mays
  Clone ID: TF_ZmC1373_25.pep
MMKLQVNVFEYFDSRQLIVCGNHFRRIREVELKRDYAFIEFSDPRDADDAQYNLDGRDVDGSRIIVEFAKGVPRGSGGSRDYNGRGPPPGTGRCFNCGVDGHWARDCQAGDWKNKCYRCGERGHIERNCQNSPRNLRRERSYSRSPSPRRGRGRSRSYSRSRSYSRSRSPSGSPRGGRRDRDERRSRSLSYSRSASPRRSVSPVKEKERSRTPDGSRSPSPRDKVSPPPKDNGAHNGSDREDSPGGREMSKRSRSPSDGYRSPVGNGRSPSRSPSPKVNNGDDPSPKGNNGDDPSPKGNNGDDEHRGSPRGSQSP

SEQ ID NO: 10688 - protein, 377 aa, Zea mays
  Clone ID: TF_ZmC1373_26.pep
VHTYFPDSFPLLNQRQACPSPRIVGHPPKSKPSPRRIAAAGSASLDPDPGDMPRNDDRYGNTRLYVGRLSPRTRSRDLEYLFSKYGRIREVELKRDYAFIEFSDPRDADDAQYNLDGRDVDGSRIIVEFAKGVPRGSGGSRDYNGRGPPPGTGRCFNCGVDGHWARDCQAGDWKNKCYRCGERGHIERNCQNSPRNLRRERSYSRSPSPRRGRGRSRSYSRSRSYSRSRSPSGSPRGGRRDRDERRSRSLSYSRSASPRRSVSPVKEKERSRTPDGSRSPSPRDKVSPPPKDNGAHNGSDREDSPGGREMSKRSRSSSDGYRSPVGNGRSPSRSPSPKVNNGDDPSPKGNNGDDPSPKGNNGDDDEHRGSPRGSQSP

SEQ ID NO: 10689 - protein, 2007 aa, Zea mays
  unsure (1)..(2007): unsure at all Xaa locations
  Clone ID: TF_ZmC24260_1.pep
MASNNNVHIGKPPHFDGNNYDYWKITMSMHLRAMVVKVWPIIRVGFLLLKEDQPSISDNVNIHTSNLGMNVFYYALDINXCNCILNLTTAPYIWVKLLEIHEGTSFLQIAKLYVXKGGFEHFIMKEEESVSDMFNRLYEIVKELKGLGFYVPDVDFSGKFLRSFPEKYETIVTMLVRSDLSTTSPTEVLGEILTQDIFKKSQADALSLAKKVKNESIALKAKASKAIEKEDSNDEENESESDGDMALFVRKFNKFMKMKRGQPRRGQTSRRNAFNDRKCFECGEPGHIAMNCPSKKKKGKDESDKKKKKYYNKKKDGKAYLVEWDSDDSSDDDDDDTSSKLNAGIAIKEAPSLFSSPPWPLAKGGAXVKIITDLNDIKDDDDIDDVDDDGYSYDDLVRMLGEADDYMHKEKEKFKTLKELYKNLQVSFEELKTSHNDLKENCEKLADAQKSSIVHEVEVVTKDVGVTCDLLDSLTSEPLPTNSICDKCKISLNDNIALDESKIIVENEVLVDRINTLTHDLEKAYGGKTKLDFILGSQRCSLNREGLGYVPKKGKNAFVKQKTLFVKECDKVCHKCHKKGHVKKNCPKFKHVSSTCFEHCYVLSHNAKGVHAKFVGTSIVGNKKKAIWVPKTLVTNIQGPKQVWVNYKAGGNHWVLDSGCTQHMTGDMKMFTQMSEEDCSNYDSITFGDNRKGKVKGLGKIAISNDHSISNVLLVEYLNFNLLSVAQLCDLGFCCNFTVEDVIISSVDGSNLKFKGFRHENLYLVDFSSNEAKLTTCLFSKASLGWLWHRRLGHVGMKQLNRLTKHDLVRGLKDVKFEKNKLCSSCQADKSNVFETFKSFAILAQNQFDFDIKKVRSDNGSEFKNARIDQYCDDKGIKHEFSSKYTPEQNGIVERKNRTLIDMARSMLAEYSISDSYWAEAINTACHSSNRLYCHKLLKKTPYELLIGRKPNISYFRVFGCKCYILRKGSRLSKFEKKCDEGFLLGYSSNSKAYRVFNKTHGIIEEAYDVEFDETNGSQDESENLDDVGGTQLIDAMKTMAIGEIKPKEDDDENSVVVIPSSSTINEEDHQGQQLNETMDTHDQGTSRPSVPPNASTSNYQTVSRIHHSIVKDHPVDQIVGDISKGVQTRSRIASFCEHFSFVSCMEPNRVDEALLDVDWVNAMHEELNNFARNEVWELVERPKNHNVIGTKWVFRNKHNEDGVVVRNKARLVAQGYTQIEGLDFGETFAPVARLEAIRILLAYACAHNIKLYQMDVKSAFLNGKISELVYVEQPPGFEDPKRPNHVFKLSKALYGLKQAPRAWYERLRDFLLSKDFKIGKVDTTLFTKRIGKDLFVCQIYVDDIIFGSTNELFCEEFGKIMSKEFEMSMIGELSFFLGLQIKQLKDGIFISQSKYLKDMLKKFGLENAKPIKTPMATNGHLDLDEGGTMVDQKLYRSIIGSLLYITASRPDVMFSVCMCARFQASPREIHLKAAKRILRYLKYTPNIGLCGFGGLRKKLAGRFKSKRPRGNDDDYTPTTDSEAQSSAGGTESMDAEDFPHVHPDYPIDIQGWTYPKRRFSMAEYCSRRTVNQYTLPSDTNIQFFHTQLQFDVFWGTLVDTNFHKHQVIDWSFLLSQSVMEGLIPKFETCGLYQFMGQRTDFNEMAVKQFLATSEIDIEEESITWMTGFKRYSASFADFAAANSLDYGTISAGMDLYTEDNFEDFVQFYELARLGIPRRFGETAGLRHHPAVINKIARVTILPKSGDKSKIRDKFWNIIQHIMNGEVMNIVLFMMRQLNDLKMDKNQNLAYAPYIMALIKSKTRFEGPCEIVHTPFRPFKNEIGFLTRPLTPFPDDEEDPGYEGGAAPNVEGQQMPPPPPPPQPQHYWEPAPGYFDPYFHNMQQELETHIDTRFDGLMSHVDHRLDDMQSRFDSNWDALNSEFSEFRDQIHTNVTDPIMSRLNNMQQSFQDNMGALSSQFDNLSTNDNMHDISQRQQQLQQDFGQFSSLFDTFSTHYYNMHPPPSDQ

SEQ ID NO: 10690 - protein, 1419 aa, Zea mays
  Clone ID: TF_ZM4840.C3.o3.fg.pep
MASNNNVHIGKPPHFDGNNYDYWKIRMSMHLRAMGGTIWPIVRDGFVVLKEDEPSVSDNENILTNDQAMNVFYDALDINEFNRIKNLTTAHEIWVKLMEIREGTTIVKSAKLYVCKGKFEQFIMKEDESVSDMFDRLNEIVNELKGLGFNVPDVDFTHKFLRSLPEKYETIVTMLVRSDLSTTSPTEVLGEILTQDIFKKSQADALSLAKKVKNESIALKAKASKAIEKEDSNDEENESESDGDMALFVRKFNKFMKMKRGQPRRGQTSRRNAFNDRKCFECGEPGHIAMNCPSKKKKGKDESDKKKKKYYNKKKDGKAYLVEWDSDDSSDDDDDDTSSKLNAGIAIKEAPSLFSSPHCLMAKGDAKVKIITDLNDINDDDDIDDVDDDGYSYDDLVRMLSEADDYMHKEKEKFKALKELYKNLQVSFEELKTSHNDLKENCEKLADAQKSSIVHEVEVVTKDVGVTCDLLDSLTSEPLPTNSICDKCKISLNDNIALDESKIIVENEVLVDRINTLTHDLEKAYGGKKKLDFILGSQRCSLNREGLGYVPKKGKNAFVKQKTLFVKECDKVCHKCHKKGHVKKNCPKFKHVSSTCFEHCYVLSHNAKGVHAKFVGTSIVGNKKKAIWVPKTLVTNIQGPKQVWVNYKAGGNHWVLDSGCTQHMTGDMKMFTQMSEEDCSNYDSITFGDNRKGKVKVEDVIISSVDGSNLKFKGFRHENLYLVDFSSNEAKLTTCLFSKASLGWLWHRRLGHVGMKQLNRLTKHDLVRGLKDVKFEKNKLCSSCQADKSNVFETFKSFAILAQNQFDFDIKKVRSDNGSEFKNARIDQYCDDKGIKHEFSSKYTPEQNGIVERKNRTLIDMARSMLAEYNISDSYWAEAINTACHSSNRLYCHKLLKKTPYELLIGRKPNISYFRVFGCKCYILRKGSRLSKFEKKCDEGFLLGYSSNSKAYRVFNKTHGIIEEAYDVEFDETNGSQDENDNLDDVGGTQLINAMKIMAIGEIKPKEEDDEDSVVVIPSSSTINEKDHQSQQLDETMDTHDQGTSRPTVPSNASTSNYQTVSRIHHSIVKDHPVDQIVGDISKGVQTRSRIASFCEHFSFVSCMEPNRVDEALLDVDWVNAMHEELNNFARNEVWELVERPKNHNVIGTKWVFRNKHNEDGVVVRNKARLVAQGYTQIEGLDFGETFAPVARLEAIRILLAYACAHNIKLYQMDVKSAFLNGKISELVYVEQPPGFEDPKRPNHVFKLSKALYGLKQAPRAWYERLRDFLLSKDFKIGKVDTTLFTKRIGKDLFVCQIYVDDIIFGSTNELFCEEFGKMMSKEFEMSMIGELSFFLGLQIKQLKDGIFISQSKYLKDMLKKFGLENAKPIKTPMATNGHLDLDEGGTIVDQKLYRSIIGSLLYITASRPDVMFSVCMCA

SEQ ID NO: 10691 - protein, 591 aa, Zea mays
  Clone ID: TF_ZM4351.C1.o2.fg.pep
MSSQEVTVELLLGDGSNYKSWSVSIYNAFMSVDSDLRQIFSRSIFPSDISKNPSNDELRCFSLNHRACSILVDSLSRGAYFAIMSSDNDLIVDAHDLWNRIKVKYCVANCTTSTPYIACDTNLSKGEDQERWAPNDESTSSTGLVSTNNKCFIANNDGGDKSHDEEEYEDDSEDESSSPQGTFSRLASTDINDRENETDDVEEEEIRRFYNHLNKADKALLVKLLRRNKEQGETLLRLEETLIKTNNSLEKMTKEHEELKYSHGNLVQRYEYVLIEQRNSHDALSNIAQLKTENSMLKSQVETMDLEKRALESQSLIEQQVLGSQKKFCGNKKQRQLRRRHFAQLSQDIHGRVVKKLEKGKTAASVKLNKKSVPKDGEINMSLEKGKDSINHVVCTDHLSMSFKHKKGRGKRRCFKCKEIGHLIASCPYKNKDEGTISCFGCNNKDHTITSCPVMKNQGCASSKVTLTKESDTQQASCQVERRFCYKCGEQGHISKSLGGKEKMCKKWSNQDLGTSHHGLILDTMHSKIAKGVARRQLIKPRTEARRASRYQVHGRRSRWLRNPKPKVKKKACKVKGDRVENSFGSSRITT

SEQ ID NO: 10692 - protein, 296 aa, Zea mays
  Clone ID: TF_ZmC18109_7.pep
MKLSQSSDMEYEQKCTETSTNNVKTTPPYKPSGRACFGCGDTGHLVNGCPKKDVEINKVQKKRQHPQTHASTKNKQQKETTRKISYAVTRTIPYDDAVIFGTLVIHTTIATVLYDPRTTHSFISAQFATKYGIFKCPLRSRKTINAPEGKMLVNYIRPTMMNPNGNEVNDANKNIPTLMTMNEKNESPRYSMNGTKNNKRNRKMFGYMISSSQPQAKAPKHLDTQTEESSQTQLYEIQTPSQPSPPVGQAKLTRKELKARGACYYCKNEGHLIRECPKKRLDRIEKKSAKHDLSNN

SEQ ID NO: 10693 - protein, 2498 aa, Zea mays
  Clone ID: TF_ZM3646.C1.o1.fg.pep
MDPKGKGIVINDKEKESFVNEPKDDKPTDSGSGHRRKEGKKKKTRRIKEIVYYDDSDGSSSSQKDDDNDYRKTIHKNAQATTVLLASLCRDEYNKLVEGELGRFAMIRGEEPTQTYNRLKTLINKIRSYGSTRWTDHDVVRLLLRSFTILDPHLVNNIRENPRYTKMSPEEVLGKFVSGRMMIKEARYVDDALNGPIHEPQPIALKATRSKEALPSKVAQVEAAGLNNEEMALIIKRFKTALKGRKGQPSKTKTKEKRSCFKCGKIGHFIANCPDNESDQEKGDKREKKKHYKKAKGEAHIGKEWDSDCSSSDSDNEGLAATAFNKSTLFPNERHTCLMAREKKVSTRDTTYVSSSDDESSDEEIDYSSLFKGLDRNKIDKINELIDALNEKDRLLEKQEDLLYEEHDKFIEAQKSYALEVKRNEMLSFELSTCHETISTLKGVNNDLNAKLEVANKSNSCVEHVVICTRCKDFDIDACSEHLVSISKLNDELASLNAQLKTSKNDLDKLKFARDAYTIGRHPSIKDGLGFKREAKNLTSHKAPIPAKEKGKAPMASSVQKNHAFMYHDKRQTRNAYRSYNAYDDFDSHDMFVSSSSHMHGRNMSRRNAIHHCDTPVSPRVSLKQPNQKPSFYVNQNCNLADGEYVLIPEQGPVQEEDQEQAPEAAIEDLPAAPAIEGKPRYGGYKCGHCTAAAGVSGALYAKPMNSPTPASGGDSRFSSDFLSRDGFPSILWEVLNSAGYPTPPLYTVQLYEEHRVPRCQVWLTLEAHPLQPGWRSLDSETIGLMTDDTVEAAAMKTLTTFCGYHPLEMVMHPLGLFPAEKKDDPMWCNRVSHVKDVWAMYPDLVGRVTVQCMSALYRLQALQSDAMTLLANTAQAAKLTLDNREDFVVDLSTELVEKDLQVERLSQRITTLEQQVEIRDNTIDVLENQLHDVQRELEEANDHLDMHHQEMEANEAGSEGEEAPEELGPAPGANGTTSVIPPSPEFLSTQPPLFTKAEDPLDADVWLRVVESKFPLLTGDCPDEAKARFAAQQLRGPARTWWDHFRAMLPADHEVSWEEFKTAFRGHHIPASILDRKLNEFLALNQGTRTVLQYAQAFNDLCQYAGYHADSDEKKRDRFRRGLNTKLRERLNTVRADSFNELVNMAISQEDCIVAHRAEKKRKAPMAAPSAQAQRFRIVSHNQSRGFQQQAGRWVIRPPQQQQQPTPNRYPAPAPRNNQPPQQQQFRQGNGNKCFTCGNMGHYAKNCPRNQQRQMPAPNQDKGRKQKVQVRQGKLNFTALEEVPEGAPIMTGTFSVYNQPALILFDSGASHSFISQKFSANCKLPFSHSKGSFMIVTPGGKIATNQLNQSVPIRLGSHIIKTTLLVLGLENVDIILGANWMTLHQVVLDVASRTVEVNSPFCGNFTLILPSQGSSQSCAFSMTELPLKKIPVVCEYADVFPDELPGMPPDRDIEFAIELQPGTAPISKRPYRMPPAELAELKKQLLDKGFIRPSTSPWCCPALFVKKKDESLRLCIDYRPLNAVTIKNKYPLPRIDVLFDQLVGAKVFSKIDLRSGYHQIKIRASDIPKTAFSTRYGLYEFLVMSFGLTNAPAYFMYLMNSVFMPELDKFVVVFIDDILVYSKNEEEHAGHLHVVLQRLREHHLYAKLSKCDFWLKEIKFLGHTISQDGIAVDPDKVQEVMNWRPPTTVRQIQSFLGLAGYYRRFIPDFSRIAKPITELLKKEVKFVWSQKCEDAFHALRQHLTTAPVLAQPDSSKPFDVYCDASGTGLGCVLMQDNRVIAYASRALRPHEQNYPTHDLELAAVVHALKMWRHYLMGTHCNIFTDHKSLKYIFTQADLNMRQRRWLELIKDYDLEVHYHPGKANVVADALSRKLQCNCILMDSRVNTLCDELSKMQIEVIPSGSLSHISVEPTLQDQIIMAQLSDKGVQIIKKNLHQKVEKYNCFRQDEKGVLWFKNRLVIPKDQDLKKKILDEAHLSKFSMHPGSTKMYHDLKLLYWWTRMKREIAQYVSECDTCQRIKASHLKSAGALQPLSVPSWKWDDISMDFIVGLPNTSRHHDSIWVIVDRLTKVAHFLPVHTTDKAQKYAELYIDRIVCLHGLPRTIVSDRGAQFVARFWEQLQESLGTKLIRSSAYHPQTDGQTERVNQILEDMLRACAIDCGKNWDKHLSLAEFAYNNSYQSSLKMAPFEALYGRRCRTPLNWSQPGEREVFGPGLVTEAERKVKLIRKNLEAAQARQKSYHDRRRKPLQFEVGSFVYLKVSPTKGVQRFGIKGKLAPRYIGPYEIIEACGPVAYKLKLPSRMSAIHNVFHVSQLKKCVRLPTEIIAEPELEIEPDLSYQEYPSKILDCKERSTRAKSIKMFKVQWSNHSEEEATWETEEFLRSNFPDCLPKEAVAKRMTFEEQFCPNNNNPHPFPISLTLRFTPKGLWPESRDEIPLRGEGCDTPVSPRVSLKQPNQKPSFYVNQSKHEHQNNLSEKEFTKYILKSVMIKTIETFER

SEQ ID NO: 10694 - protein, 156 aa, Zea mays
  unsure (1)..(156): unsure at all Xaa locations
  Clone ID: TF_LIB4826-025-R2-N1-C6.pep
MTSSRSKSKSRSRSRSRSRSRSRSPRRRDRLRSERAPHRSRSRSRSPYRRRERRGHRDFACKNCRRPGHFAKECPSAPMCNNCNLPGHFAAECTLQTVCWNCKESGHIASECKNEALCHACNKTGHLARDCPTSGANVKLCNKCFKSGHIAXDCTN

SEQ ID NO: 10695 - protein, 628 aa, Zea mays
  Clone ID: TF_ZmC26852_1.pep
WLGEDPKRTRRLLQQNATQKEVTLEILFDDCSNYDSWSTSVLNAFRTIHPQLEQIIDKSIFPSSFNGEIVSEEDQRCFRLNYLAFDILSNSLSKEDYRAFISNYDESVHDAHDIWTRIRSKFDESKHDSSFCVSASFGICDTNPCKEEEENERWRPNDESTSPKGLSSHFDSHMCCVANENDSGSTNEDEEEESSFVHLYARLSQEDKAVMLKLLERAREQSEARQRLEDILSMKMLHFDELTKEHEELKCSHVDLVQRYETISIEQDNASHCIAQLVNRNTLLKDQVEKLKVENLAFQDKYDMLLCSHENLRDDHIMLNIAHEVVIEYLKSQQPHSCTCVHIDTILPCANACCPSTSKSSFELEFAGTNDDTYQKLEEENERLKMSLTQLKGKCIAQPSQDNRDHMVKELETGTTVACTTSLEENVKDLRIAKRKKQKMKFNTSSKSLNHASIQGNIQGNDQATLHTKKSKKCSECFEEGHLIRSCPYIKNGLIINKDDRHCFKCSKKGHLVKSCPHLKQKGIGLEKKIFTNHVASKKQGKKKSSKLEDRLCYICRKKGHQCKDCPIGNYPTPSLSIDSYVTRQPKIATCARKVMSLPSASTKDIWVPRSLLTNLDGPIKRWVPKYA

SEQ ID NO: 10696 - protein, 1084 aa, Zea mays
  Clone ID: TF_ZmC1236750_1.pep
MPVPAELSPPSPHGAPRTRAGEQDDSTLPPTAAATATATRGGTGRKRRRGARDPRASWAWETEWDRAYLLACAAGLLVDPLFLYAVAVSAPLMCVFLDAWFAAAVTALRCAVDAMHASNLLLRLRGACSPRREDTDEEEAQPGRDGGVPGRGTRSKEGVFLDVLVILPVMQVVVWVATPAMIRAGSTTDVMIVLLTAFLLEYLPKIYHAVRVLRRMQGVSGYLFGTIWWGIALNLMAYFVAAHAVGACWYLLGAQRATKCLREQCAQAGSGCAPWALACAEPLYYGATASSVGAARLAWAGNATARGTCLDSADNYQYGAYQWTVMLVANPSRVERVLLPIFWGLMTLSTFGNLESTTEWLEIVFNIVTITGGLILVTMLIGNIKVFLNATTSKKQAMHTRLRSVELWMKRKDLPRSYRHRVRQYERQRWAATRGVDECRIVRDLPEGLRRDIKYHLCLGLVRQVPLFQHMDDLVLENICDRVKSLIFPKGEVIVREGDPVKRMLFIVRGHLQSSQVLRNGAESCCMLGPGNFSGDELLSWCLRRPFLERLPGSSSTLATLESTEAFGLDAADVKYVTQHFRYTFTNDKSPRDMYIYVYCISCNREGSRDFKTLPQHDIRAKARRRATVAATTYAEQAWPTASFRLCRTRVERSAVLKEGGGEGGAASAARSRRGRQISGTAWSLEAPPAWTQLPSPALASTRRRRRPALALEEGYRRRGPARPGSCCHQLALLQLQEDCCRLWVLTHRNTREWERIKGLSKFLGVKNYLAWSRRALRLLKAKRLEGYVDGTVVEPKDKPSAEWKDWDAINSLVAAWMLSSMIPAIASTVDTIISAAEMWKALEEMYSGAGNVMLMVETEDRLHNIKQGERTVAEYVQELQCLWADVDHYDPIELPHSECVVWAKKWVEIRRVLQFLRGLNPEFEGRRASMFHQSTLPSLQEAIAAISQEESRLKVMRESPPVSSHPVFSAMRTKDARECYNCGDVGHIARNCTKPFKFNRGRGRGAARGGRGRGGRSWARANATTTKEDLEIFMENEAETKSTEQHKIPGNKNQESYTRDFVNFAYTDEGEENREKTWDSYQA

SEQ ID NO: 10697 - protein, 680 aa, Zea mays
  unsure (1)..(680): unsure at all Xaa locations
  Clone ID: TF_ZmC4916_437.pep
MDTHRPPHFDGTNFPYYSARMACYLEVVDLGVWRVTRDGMKPLKNPEKPTTSEEKEIHLNARAKNCLYESLSMDIFNQVFTLKTANEIWLKLHELHDGTSNVREQKHCLVLNEYNSFAMKDDELVRDMYSRLNLIINELNSIGINKLGDADIVRKIISLLPQQRYGSIITILHNMEDLSNMTPTIVIGKIAAFEMSRKMSRGEEPTSSRPYAFAXEESDDDEDNQPCTSSSEDEETIRRVGKVMGMIRKINLMGVPLQVEDLLFNIDRKKQRKRGCFACGEKGHFRDNCPNMAKPKKERSKGKALTSVRTWDDSSSEDEPPRTRSHRSSSRSSRSSHKCLMARGNKSTPSSSDESSSDDEGEGKASLDELAEAVEFFQDVCTKQKAQLKTLKNKLVSSQNDYKGLLEKFETFANLNSELSTKIELLESSAPSTATDDSLIKKNEKLKAKLASSQEAIENLLEKMEILSIHNNELTTKLENIGSTPAASLVEIPEIIKKDASTSCFDLIDDSNPCNQVVVENIVVETCTDKVAKENEQLKQEVARLGKALYDKKGKAKQIQPPQDNTTAGVNKPMEGETVICRLCHKEGHKSFQCKAMTGDKQRQKLKQKPSSKISNTYIKKVNKKDATPYLIKKKKNGKVIAIKTNKQANKGKGAKRIWVPKEIISTMKSTKKVWIPKGK

SEQ ID NO: 10698 - protein, 877 aa, Zea mays
  Clone ID: TF_ZmC4916_467.pep
MDTHRPPHFDGTNFPYYSARMACYLEAVDLGVWRVTRDGMKPLKNPEKPTTSEEKEIHLNARAKNCLYESLSMDIFNQVFTLKTANEIWLKLHELHDGTSNVREQKHCLVLNEYNSFAMKDDELVRNMYSRLNLIINELNSIGMNKLGDADIVRKIISLLPQQRYGSIITILHNMEDLSNMTPTIVIGKIAAFEMSRKISRGEEPTSSRQYAFACDERKGKKKAPTPSSSSEEEEEEESDDDEDNQPCTSSSEDEETIRRVGKVMGMIRKINLMGVPLQVEDLLFNIDRKKQRKRGCFACGEKGHFRDNCPNMAKPKKERSKGKALTSVRTWDGSSSEDEPPRTRNHRSSSRSSRSSHKCLMARGNKSIPSSSDDSSSDDEGEGKPSLDELAEAVEFFQDVCTKQKAQLKTLKNKLVSSQNDYKGLLEKFETFANLNSELSTKIELLESSAPSTATDDSLIKKNEKLKAKLASSQEAIKNLLEKMEILSIHNNELTTKLENIGSTPAASLVEMPEIIKKDASTSCFDLIDDSNPCNQVVVENIVVETCSDEVAKENEQLKQEVARLGKALYDKKGKAKQIRPPQDNTTAGVNKPMEGETVICRLCHKEGHKSFQCKAMTGDKQRQKLKQKPSSKISNTYIKKVNKKDATPYLIKKKKNGKVIAIKANKQANKGKGAKRIWVPKEIISTMKSTKKVWIPKGNLAKVLEVLIHPPLRRHPFPTEALWAHRISKHRATKVSPFELVYGQEAVLPMEISLNTIRFARQNDLTATDYYDSMMDNIDEVTDKRMIALGAIEKDKIMVARAYNKKVKAKSFQVGDLVWKTILPLRNKDRKFGKWSPSWEGPYKVKQVMSGNAYLLQTLQGKDLPKALNERFLKQ

SEQ ID NO: 10699 - protein, 621 aa, Zea mays
  Clone ID: TF_ZmC4916_482.pep
MKVAHNAYSMTNYEQNLDGDVCGQSNYASSKHMFGTVNNTRRSRRDGRSTDMFGSMPRTPQPNIRTCCKLRAPGDPCLLLLKFTGCVEDWTKEMRMQHLKRSHKKMHRSPRLKNKRSPKKSAKKPEKRAVSQRLVTHRTVHSTCPVEDLLFNIDRKKQRKRGCFACGEKGHFRDNCPNMAEPKKGRSKGKALTSVRTWDDSSSEDEPPRTRSHRSSSRSSRSSHKCLMAKGLLEKFETFANLNGELSTKIELLESSAPSIATDDGLIKKNEKLKAKLASSQEAIENLLEKMEILSIHNDELTTKLENIGSTLGASLVEIPEIIKKDASTSCFDLIDDSNPCNQVLVENIVVETCSDEVAKENEQLRQEAARLGKALYDKKGKAKQIRPPKDNTTTGVNKPMEVETVICRLCHKEGHKSFQCKAMTGDRQKQKLKQKPTSKISNTYIKKVDKKTATPYLIKKKKNGKVIAIKANKQANKEKGGKRIWVPKEIISTMKSTKKFTGCVEDWTKEMRMQHLKRSHKKMHRIPRLKNKRSPKKSAKKPEKRAVSQRLVTHRTVHSTCVPPPCIGGNEARGVSAGSSIVETAGSVREEPEAEHHLRVEKARGSLRSYSTVVLGPRVG

SEQ ID NO: 10700 - protein, 680 aa, Zea mays
  unsure (1)..(680): unsure at all Xaa locations
  Clone ID: TF_ZM4291.C1.o10.fg.pep
MDTHRPPHFDGTNFPYYSARMACYLEAVDLGVWRVTRDGMKPPKNPEKPTTSEEKEIHLNARAKNCLYESLSMDIFNQVFTLKTANEIWLKLHELHDGTSNVREQKHCLVLNEYNSFAMKDNELVRDMYSRLNLIINELNSIGINKLGDADIVRKIISLLPQQRYGSIITILHNMEDLSNMTPTIVIGKIAAFEMSRKMSRGEEPTSSKPYAFAXEESDDDEDNQPCTSSSEDEETIRRVGKVMRMIRKINLMGVPLQVEDLLFNIDRKKQRKRGCFACGEKGHFRDNCPNMAKPKKERSKGKALTSVRTWDDSSSEDEPPRTRSHRSSSRSSRSSHKCLMARGNKSIPSSSDESSSDDEGEGKASLEELAEAVNFFQDVCTKQKAQLKTLKNKLVSSQNDYKGLLEKFETFANLNSELSTKIELLESSAPSTATDDSLIKKNEKLKAKLASSQEAIENLLEKMEILSIHNNELTTKLENIGSTPAASLVEIPEIIKKDASTSCFDLIDDSNPCNQVVVENIVVETCSNEVAKENEQLKQEVARLGKALYDKKGKAKQIRPPQDNTTAGVNKPVEGETVICRLCHKEGHKSFQCKAMTGDKQRQKLKQKPSSKISNTYIKKVNKKDATPYLIKKKKNGKVIAIKANKQANKGKGAKRIWVPKEIISTMKSTKKVWIPKGK

SEQ ID NO: 10701 - protein, 679 aa, Zea mays
  unsure (1)..(679): unsure at all Xaa locations
  Clone ID: TF_ZM4323.C2.o1.fg.pep
MDTHRPPHFDGTNFPYYSARMACYLEAVDLGVWRVTRDGMKPPKNPEKPTTSEEKEIHLNARAKNCLYESLSMDIFNQVFTLKTANEIWLKLHELHDGTSNVREQKHCLVLNEYNSFAMKDDELVRDMYSRLNLIINELNSIGINKLGDADIVRKIISLLPQQKYGSIITILHNMEDLSNMTPTIVIGKIAAFEMSRKMSRGEEPTTSRPYAFAXEESDDDEDNQPCTSSSEDEETIRRVGKVMRMIRKINLMGVPLQVEDLLFNIDRKKQRKRGCFACGEKGHFRDNCPNMAKPKKERSKGKALTSVRTWDDSSSEDEPPRTRSHRSSSRSSRSSHKCLMARGNKSIPSSSDESSSDDEGEGKASLEELAEAVNFFQDVCTKQKAQLKTLKNKLVSSQNDYKGLLEKFETFANLNSELSTKIELLESSAPSTATNDSLIKKNEKLKAKLASSQEAIENLLEKMEILSIHNNELTTKLENIGSTPAASLVEIPEIIKKDASTSCFDLIDDSNPCNQVVENIIVETCSDEVAKENEQLKQEVARLGKALYDKKGKAKQIRPPQDNTTAGVNKPVEGETVICRLCHKEGHKSFQCKAMTGDKQRQKLKQKPTSKISNTYIKKVNKKDATPYLIKKKKNGKVIAIKANKQANKGKGAKRIWVPKEIISTMKSTKKVWIPKGK

SEQ ID NO: 10702 - protein, 680 aa, Zea mays
  unsure (1)..(680): unsure at all Xaa locations
  Clone ID: TF_ZM4789.C1.o5.fg.pep
MDTHRPPHFDGTNFPYYSARMACYLEAIDLGVWRVTRDGMKPIKNPEKPTTSEEKEIHLNARAKNCLYESLSMDIFNQVFTLKTANEIWLKLHELHDDTSNVREQKHCLVLNEYNSFAMKDDELVRDMYSRLNLIINELNSIGINKLGDADIVRKIISLLPQQRYGSIITILHNMEDLSNMTPTIVIGKIAAFEMSRKMSRGEEPTSSRPYAFAXEESDDDEDNQPCTSSSEDEETIRRVGKVMRMIRKINLMGVPLQVEDLLFNIDRKKQRKRGCFACGEKGHFRDNCPNMTKPKKERSKGKALTSVRTWDDSSSEDEPPRTRSHRSSSRSSRSSHKCLMARGNKSIPSSSDESSSDDEGEGKPSLDELAEAVEFFQDVCTKQKAQLKTLKNKLVSSQNDYKGLLEKFETFANLNSELSTKIELLESSAPSTATDDSLIKNNEKLKAKLASSQEAIENLLEKMEILSIHNNELTTKLENIGSTPAASLVEIPEIIKKDASTSCFDLIDDSNPCNQVVVENIVVETCTNEVAKENEQLKQEVARLGKALYDKKGKAKQIQPPQDNTTAGVNKPMEGETVICRLCHKEGHKSFQCKAMTGDKQRQKLKQKPSSKISNTYIKKVDKKTATPYLIKKKKNGKVIAIKANKQANKGKGAKRIWVPKEIISTMKSTKKVWIPKGK

SEQ ID NO: 10703 - protein, 677 aa, Zea mays
  unsure (1)..(677): unsure at all Xaa locations
  Clone ID: TF_ZM5010.C3.o2.fg.pep
MDTHRPPHFDGTNFPYYSARMACYLEAVDLGVWRVTRDGMKPLKNPEKPTTSEEKEIHLNARAKNCLYESLSMDIFNQVFTLKTANEIWLKLHELHDGTSNVREQKHCLVLNEYNSFAMKDDELVRDMYSRLNLIINELNSIGINKLGDADIVRKIISLLPQQKYGSIITILHNMEDLSNMTPTIVIGKIAAFEMSRKMSRGEEPTSSKPYAFAXEESDDDEDNQPCTSSSEDEETIRRVGKVMRMIRKINLMGVPLQVEDLLFNIDRKKQRKRGCFACGEKGHFRDNCPNMAKPKKERSKGKALTSVRTWDDSSSEDESPRTRSHRSLSRSSRSSHKCLMARGNKSIPSSSDESSSDDEGEGKASLEELAEAVNFFQDVCTKQKAQLKTLKNKLISSQNDYKGLLEKFETFANLNIELSTKIELLESSAPSTATDDSLIKKNEKLKAKLASSQEAIENLLEKMEILSIHNNELTTKLENIGSTPAASLVEIPEIIKKDASTSCFDLIDDSNPCNQVVENIVVETCSDEVAKENEQLKQEVARLGKALYDKKGKAKQIRPPQDNTTAGVNKPVEGETVICRLCHKEGHKSFQCKAMTGDKQRQKLKQKPTSKISNIKKVNKKDATPYLIKKKKNGKVIAIKANKQANKGKGTKRIWVPKEIISTMKSTKKVWIPKGK

SEQ ID NO: 10704 - protein, 1942 aa, Zea mays
  Clone ID: TF_ZM4874.C2.o9.fg.pep
MASNNNVHIGKPPHFDGNNYDYWKIRMSMHLRAMGGKIWPIVRDGFVVLKEDEPSVSDNENILTNDQAMNVFYDALDINEFNRIKNLTTAHEIWIKLMEIHEGTTIVKSAKLYVCKGKFEQFIMKEDESVSDMFNQLNEKVNELKGLGFNVPDVDFTHKFLRSLPEKYETIVTMLFGKEGENESIALKAKASKAIEKEDSNDEENESESDGDMALFVRKFNKFMKMKRGQPRRGQTSRRNAFNDRKCFECGEPGHIAMNCPSKKKKGKDESDKKKKKYYNKKKDGKAYLVEWDSDDSSDDDDDDTSSKLNAGIAIKEAPSLFSSPHCLMAKGDAKVKIITDLNDIKDDDDIDDVDDDGYSYDDLVRMLGEVDDYMHKEKEKFKTLKELYKNLQVSFEELKTSHNDLKENCEKLVDAQKSSIVHEVEVVTKDVGVTCDLLDSLTSEPLPTNSICDKYKISLNDNIALDESKTIVENEVLVDRVNTLTHDLEKAYGGKAKLDFILGSQRCSLNREGLGYVPKKGKNAFVKQKTLFVKECDTVCHKCHKKGHVKKNCPKFKNVSSTCFEHCYVLSHNAKGVHAKFVGKLQGGRNHWVLDSGCTQHMTEDMKMFTQMSEEDCSNYDSITFGDNRKGKVKGLGKIAISNDHSISNVLLVESLNFNLLSVAQLCDLGFYCNFTVEDVIISSVDGSNLKFKGFRHENLYLVDFSSNEAKLTTCLFSKASLGWLWHRRLGHVGMKQLNRLTKHDSVRGLKDVKFEKNKLCSSCQADKSNVFETFKSFAILAQNQYDFDIKKVRSDNGSEFKNARIDEYCDDKGIKHEFSSKYTPKQNGIVERKNRTLIDMARSMLAEYNISDSYWAEAINTACHSSNRLYCHKLLKKTPYELLIGRKPNISYFRVFGCKCYILRKGSRLSKFEKKCDERFLLGYSSNSKAYRVFNKTHGIIEEAYDVEFDETNGSQDESDNLDDVGGTQLINAMKTMAIGEIKPKEDDDENSVVVIPSSSTLNEEDHQSQQHDETMDTHDQGTSRHSVPPNASTSNYQTVSRIHHSIVKDHPVDQIVGDISKGVQTRSRIASFCEHFSFVSCMEPNRVDEALLDVDWVNAMHEELNNFARNEVWELVERLKNHNVIGTKWVFRNKHNEDGVVVRNKARLVAQGYTQIEGLDFGEIFAPVARLEAIRILLAYACAHNIKLYQMDVKSAFLNGKISELVYVEQPPGFEDPKRPNHVFKLSKALYGLKQAPRAWYERLRDFLLSKDFKIGKVDTTLFTKRIGKDLFVCQIYVDDIIFGSTNELFCEEFRKMMSKEFEMSMIGELSFFLGLQIKQLKDGIFISQSKYLKDMLKKFGLENAKPIKTPMATNGHLDLDEGVLLTVNAVQNFELVWMGILCKVINSTFVAARVLWSRPWSVADRPPGGHGPSGPLARTVRPPSADRLDPGREMQFYSFLLCGFGGLRKKLAGHFKSKRPRGDDDDYTPTTDSEAQSSARGTESMDAEDFPHVHPDYPIDTSRWTYPKRRFSMAEYCSRRTMNQYTLPSDTNIQIFHTQLQFDVFWGTLVDTNFHKHQVIDWSFMLGQSVMEGLIPKFETCGLYQFMGQRTDFSEMAVKQFLATSEIDIEEESVTWMTGFKRYSASFADFATTNSLDYGTISAGLDLYTEDNFEDIVQFYEPARLGIPRRIGETTGLRHHPAVINKIARVTILPKSGDKSKIRDKFWNIIHHIMNGEMDKNQNLAYAPYIMALIKAKTRFEGPCEIVHTPFRPFKNEIGFLTRPLTPFPDDEEDPGYNAGAAPDVEAEQMPPPQPQQYWQPGPGYFDPYFHNMQQGLETHIDTRFEGMMTHVDHRLDDMQSHFDSNWDALNSEFSEFRDHIHTNVTDPIMTRLNNVQQSFQDNMGALSSQFDHLSTNDSMHDISQRQQQLQRDFGQFSSLFDTFSTHYYNMHPPPSDQ

SEQ ID NO: 10705 - protein, 276 aa, Zea mays
  Clone ID: TF_ZmC19722_1.pep
MANKRQRDARKRFREANPDLFPPQTAPSADGTKNKSKKKKNKSMFKKANKGGTGRFKHPLRVPGMRPGERCFICKSTDHVAKACPEKALWDKKKICLLCRERGHSLKNCPDKSEGNLMKFCYNCGESGHSLSKCPKPIENGGTNFASCFICNQQGHLSKNCPENKHGIYPKGGCCKVCGEVTHLARHCPNKGRQDLISSRDDDVNMEEHSQECPAVHHGGDDLEDDFVNEEEPKPAKSKKAKQSGSRPATGTGNDVKSASAKTKAKQAPKVVKFFG

SEQ ID NO: 10706 - protein, 69 aa, Zea mays
  Clone ID: TF_701161114H1.pep
CTSDYRYGMNAWRCQIWSQWRLEVRSRWRRRLRRRKLLQLWRVWAFCQRLPIKCSLNLLLGLFMFCGLF

SEQ ID NO: 10707 - protein, 644 aa, Zea mays
  unsure (1)..(644): unsure at all Xaa locations
  Clone ID: TF_ZmC951_447.pep
MTMSSQEVTAELLLGDGSNYKSWSVSIYNAFMSVDPDLRQIFRRSIFPSDLSKNPSNDELRCFSLNHRACSILVDSLSRGAYFAILSNGNDLIVDAHDLWNRIKEKYFVANCTTSTPYIACDANHSKGEDQERWTPNDESTSSTGLVSTNNKCFIANNDGGDKSHDEEEYEDDSEDESSSSQGTFSYIASTDINDRENETDDVEEEEIRRFYTHLNKEDKALLIKLLRRNKEQSEMLLRLEETLIKTNNSLEKMTKEHEELKCSHDVLVQRYDSILIEQNSNDDAISCVAQLKMENVMLEREVKXLSHDNLALGEEYDVLSYSHNKMIDDHIMLNVAHEVIIANLNSCEPHSRTSAHLNCISPCANPCCSKESQFLNKHQDAGSQKKLCGNKKQRQLRRRRIAQLSQDIHGRVVKKLEKGKTAASAELHKKIVPKDEEINMSLEKGKDLFNHVVCTDLFSMSSKSKKRRGKRRCFKCKKLGHLIASCPYKDKDEGTRSCFGCNNKDHMITSCPLLMNQARAPSKMTPTKENNKQQVSCQVERRFCYKCGEQGHLSKSIFHLTFKLVSLCDESDRVCLDQVSRWKREDEHEIEQSGLGYLCKSKTTDQAKDGGKKSFEVPSAREKAKEAEEPKAKGEEEGLQSQG

SEQ ID NO: 10708 - protein, 577 aa, Zea mays
  Clone ID: TF_ZmC18109_3.pep
MALTDHRRRNRAAPRLDHTSPRRARTAHGTRRTVRIRTPFATATETALIDLSLSLMILMFQMSDSGLSEDSTQKHYKMIKLGLRNLKQSLPEETLSKLLSSPYSLSYPYSTRSFVMDSLDLLPFFLVKISTNESETTKQKNQILFSGIKRQMSPQEQLITDSLIPNALSVDELQSIPKRKHHKDAQPQEETHECYIDGWTITCTQFQPHGRIRSKKQKGKRAKSQEITSRKACYQCGREGHYFRNCLEKCSLQITSEMKLPQSPDMEYEQKCRETSANNVKTTPPCNLSSRACFGCGDTGHLVNGCPKKDVEINKVQKKRQHPQTHASTKNKQRKETTGRISYAVTGTIPYDKAAIFGTLVIHTTIATVLYDPRTTHSLISAQFATKYGIFKCPLRSRKTISAPEGKMLVNYICPKMMNPNGNEVNGANDNIPTLTTTSEKNESQRYSMNGMKNNKRNRKMFGYMIRPPQPQAKVTKHTDSQTEESSQAQLYEIQTPNQPSSPVGQAKLTRKELKARGACYYCKNEGHLIRECPKKRLDRIKKKAAKHDLSNNSEDPPFYKYDDEGRLISIHFGAKK

SEQ ID NO: 10709 - protein, 251 aa, Zea mays
  unsure (1)..(251): unsure at all Xaa locations
  Clone ID: TF_LIB4977-008-R1-K1-B11.pep
LLSLSLRRLCGVPPPPPQALTPRRRRPRRLRQVPRDGPFIFVSLFAGRRAPARFRNDLCNNCKRPGHFARECPSVAVCHTCGLPGHIAAECSSKGVCWNCKEPGHMANSCPNEGICRNCGKSGHIARDCTAPPVPPGEVILCSNCYKPGHFREECTNEKACNNCRQSGHLARNCTNDPVCNLCNVAGHLARQCPKSDTLXERGGPPXFRGVGAPFHDVGAPFRGGFSDVVCRACNQIGHTSRDCMAGXFMI

SEQ ID NO: 10710 - protein, 181 aa, Zea mays
  unsure (1)..(181): unsure at all Xaa locations
  Clone ID: TF_ZmC519073_1.pep
MSSRSPPXDRRMRTERTLYRDAPYRRDRDGRRGPNRSASDLCNNCKRPGHFARDCPNVSVCHACGLPGHIAAECSSKDLCWNCKEPGHMANACPNEGICRNCGKSGHIAKDCTAPPMLPGEVKLCNNCYKPGHIAVECTNEKACNNCRKSGHLARNCTNEPVCNLCHVAGHLARQCPKSDE

SEQ ID NO: 10711 - protein, 208 aa, Zea mays
  unsure (1)..(208): unsure at all Xaa locations
  Clone ID: TF_ZmC6609_12.pep
MSSRSLPPKDRRMRTERTSYRDAPYRRDSRHGPSRFRNDLCNNCKRPGHFARECPSVAVCHTCGLPGHIAAECSSKGVCWNCKEPGHMANSCPNEGICRNCGKSGHIARDCTAPPVPPGEVILCSNCYKPGHFREECTNEKACNNCRQSGHLARNCTNDPVCNLCNVAGHLARQCPKSDTLGERXGGPPSXRGVGAPFHDVGAPFRGG

SEQ ID NO: 10712 - protein, 1715 aa, Zea mays
  unsure (1)..(1715): unsure at all Xaa locations
  Clone ID: TF_ZmC951_444.pep
MSGELAKKEMETGDKPATSHGKASSGESHNKEKMKEKKEKKTSSHKSHQSGDKIKKMRKVVYYETDTSSPSTSGSDAPSITSKRHERKKFSKIPLHYPRTSRHTPLLSVPLGKPPTFDGEDYARWSDLMKFHLTSLHKSIWNVVEFGAQVPSVGDEDYDEDEVAQIEHFNSQATTILLASLSREEYNMVQGLKSAKEVWDVLKTTHEGDELTKITKRETIEGKLGRFRLRQGEEPQDMYNRLKTLVNQXVRNLGSKKWDDHEVVXRYTLMTPEEVIGNFVSFEFMIKGSRKNNELDGPSTSEAQPVAFKATEEKKEESTPSRQPIDASKLDNEEMALVIKSFRQILKQRRGKDYKPRSKKVCYKCGKPGHFIAKCPISSDSDRGDDKKGRRKEKKRYYKKRGGDAHVCREWDFDESSSDSSDDEDAANIAVTKGLLFPNVGHKCLMAKDGKKKKVKSKSSTRYESSSDENASDEEDNLCTLFANLNMQQKEKLNELISAIHEKDDLLDTQEDFLIKENKKHVKVKNAYALEVEKCEKLSSELSTCHETIDKLRNENSNLLAKVDSIACNVSIPNLRNDNDDLLARIEELNISLASLRIENEKLLAKAKDFDVCNATISDLRTKNDILHAKVVELKSCKPSTSTVEHTSICTRXMLYSGRRPGIKDGIGFQQGGNVKLXAPPKKLSNFVKGKAPMPQDNEGYILYPAGYPEDKIRRIHSRKSHSGPNHAFMYKGETSSSRQPTHAKLPKKKTPSASNEHSFSFKTFDASYVLTNKSGKVYASGGSSWIIDSGCTNHMTGEKKMFSSYEKNQDPQRAITFGDGNQGVTVFRRSDDSIAFKGVLEGQLYLVNFDRAELDTFLIAKTNMGWLWHRRLAHVGMKNLHKLLKGEHILGLTNVHFEKDRVCSACQAGKQVGAHHPHKNIMTTDMPLELLHMDLFGPITYISIGGMERKNRTLLDMARTMLDEYKTSDRFWAEAVNTACYAINRLYLHRILKKTSYELLTEQVDLDEIGIEEAPCIALRNMSIGDVCPKESEEPPNAQDQPSFSTQASPPTQNEDEAQVDEIEDQANEPPQDDGNDQRGDANDQDEEDEEQRSPHPRVHQAIQRDHPIDTILGDIQKGVTTRSRVAHFCEHYSFVSSIEPHRIEEALQDSDWVVAMQEELNNFTRNEEEVYVEQPLGFEDSEYPNHVYKLSKALYGLKQAPRAWYECLRDFLITNGFKVGKADPTLFTKTLENDLFVCQIYVDDIIFGSTNESTCEEFSRIMTQKFEMSMMGELKYFLGFQVKQLQEGTFLSQTKYTQDILSKFGMKDAKPIKTPMGTNGHLDLDEGGGESISKGSNDSVFGDSCQRGRKCQRFIYNYTKSTVRNTVDYSGQEKLFGKIGQARTVRALAADRPQHQDDPRTEPMQKSKSTLQTVRRKKQGPSKTSRGPSGLRRGPSGPDVGGGIGFLGQNLVFAELVVTLAVPEAASDNADDAAKAAALAEKAKWDEADEACLSRLVNVLSNRLFDVYSSFTSAKGLWTELENEFSEVDNGNESFTTENYLNYKMVEGRSVMEQLQEIQLLVRDLVQYGCVLPDSFQVNAILAKLPPSWRDFVTSRRHMKKQMTLTELSATINVEERARSSNKPSQQLQAHVVEKGGDRKFQKKKKNSPQKNMNQPKSKKMKKKKEDFICYVCGVSEHTARRCKLRKGKGPPPQRKEGNVVVNSTLGYAPVTP

SEQ ID NO: 10713 - protein, 378 aa, Zea mays
  Clone ID: TF_ZmC1373_13.pep
LEAGRGGLEFGSLPAHPSPSLPSCPAGSPARRLCPDPGDMPRYDDRYGGTRLYVGRLAPRTRSRDLEYLFGKYGRLTVCGNPFRRIREVELKRDYAFIEFSEHRDADEARYQLDGRDVDGSRIVVEFAKGVPRGPGGSREYMGRGPPPGTGRCFNCGMDGHWARDCKAGDWKNKCYRCGERGHIERNCQNSPRSVRRERSYSRSPSPRRGRGRSPSYSRSRSRSRSYSRSRSLSGSPRGGRRDRDDRRSRSLSYSRSPVRSPPAKEKERSPTPGGSRSPRSRSPQDQVMSPPPKDNGDRNGSDRGDSPRGREDSRSRSRSPSGGNRSPAANGRSPSPRGDRGPSPMADRSPSPKGNGNNDGGDDDTGRGGSPTGSKSP

SEQ ID NO: 10714 - protein, 378 aa, Zea mays
  unsure (1)..(378): unsure at all Xaa locations
  Clone ID: TF_ZmC1373_24.pep
NSDPSHGPTTSIPFPSLPSCPAGSPARRLCPDPGDMPRYDDRYGGTRLYVGRLAPRTRSRDLEYLFGKYGRIREVELKRDYAFIEFSEHRDADEARYQLDGRDVDGSRIVVEFAKGVPRGPGGSREYMGRGPPPGTGRCFNCGMDGHWARDCKAGDWKNKCYRCGERGHIERNCQNSPRSVRRERSYSRSPSPRRGRGRSPSYSRSRSRSRSRSYSRSRSLSGSPRGGRRDRDDRRSRSLSYSRSPVRSPPAKEKERSPTPGGSRSPRSRSPQDQVMSPPPKDNGDRNGSDRGDSPRGREDSRSRSRSPSGGNRSPAANGRSPSPEGAXRGDRTPSPMADRGPSPMADRSPSPKGNGNNDGGDDDTGRGGSPTGSKSP

SEQ ID NO: 10715 - protein, 385 aa, Zea mays
  Clone ID: TF_ZmC1373_28.pep
LGTSRPAGTASGFSSPRLRIRIPPTTSIPFPSLPSCPAGSPARRLCPDPGDMPRYDDRYGGTRLYVGRLAPRTRSRDLEYLFGKYGRIREVELKRDYAFIEFSEHRDADEARYQLDGRDVDGSRIVVEFAKGVPRGPGGSREYMGRGPPPGTGRCFNCGMDGHWARDCKAGDWKNKCYRCGERGHIERNCQNSPRSVRRERSYSRSPSPRRGRGRSPSYSRSRSRSRSRSYSRSRSLSGSPRGGRRDRDDRRSRSLSYSRSPMRSPPAKEKERSPTPGGSRSPRSRSPQDQVMSPPPKDNGDRNGSDRGDSPRGRENSRSRSRSRSPSGGNRSPAANGRSPRSPRGDRTPSPMADRSPSPKGNGNNDGGDDDTGRGGSPTGSKSP

SEQ ID NO: 10716 - protein, 225 aa, Zea mays
  unsure (1)..(225): unsure at all Xaa locations
  Clone ID: TF_ZmC31167_2.pep
MTSSRSKSRSHSRSRSRSRSRSPQRRDRLRSERAPRRSRSHSRSRSPYRRRERRGYKDLVCKNCRRPGHFAKECPSAPTCNNCNLPGHFAAECTSKTVCWNCKEPGHIASECKNEALCHTCNKTGHLARDCPTSGANVKLCNKCFKSGHVAVDCTNERACNNCRQPGHIARECKNDPVCNLCNVSGHVARVCSKXDSGFNTRNTYRVAPFRGGEARGGRKRRVDQ

SEQ ID NO: 10717 - protein, 1752 aa, Zea mays
  Clone ID: TF_ZmC951_428.pep
MSGELTKKEMETGDKPATSHGKASSGESHNKEKKKKEKKTSSHKSHRSGDKIKKMRKVVYYETDTSSPSTSGSDAPSITSKRHERKKFSKPPTFDGEDYARWSDLMKFHLTSLHKSIWNVVEFGAQVPSVGDEDYDEDEVAQIEHFNSQATTILLASLSREEYNKITKRETIEGELGRFRLRQGEEPQDMYNRLKTLVNQVRNLGSKKWDDHEVVKVILRSLIFLNPTQVQLIRGNPRYTLMTPEEVIGNFVSFEFMIKGSRKINELDGPSTSEAQPVAFKATEEKKEESTPSRQPIDASKLDNEEMTLVIKSFRQILKQRREKDYKPRSKKVCYKCGKPGHFIAKCPISSDSDRGDDKKGRRKEKKRYYKKKGGDAHVCREWDSDESSSDSSDDEDAANIAVTKGLLFPNVGHKCLMAKDGKKKKVKSKSSTRYESSSDDNSSDEEDNLRTLFANLNMQQKEKLNELISAIHEKDDLLDSQEDFLIKENKKHVKVKHAYALEVEKYEKLSSELSTCHETIDNLRNENANLLAKVDSNVCNASISNLRNDNDDLLTKIEELNISLASLRIENEKLLAKAKDFDVCNATISDLRTKNDILHAKVVELKSCKPSTSTIEHTSICTRCRDVDVNAIHDHMALIKQQNDHIAKLDAKIAEHDLEDEKFKFARSMLYRGRRPGIKDGIGFQQGGNVKINAPPKRLSNFVKGKALMPQDNEGYILYPAGYPESKIRRIHSRKSHSGPNHAFMYKGETSSSRQPTRAKLPKKKTPSASNDHDISFKTFDASYVLTNKSGKVYASGGSSWIIDSGCINHMTGEKKMFSSYEKNQDPQRAITFGDGNQGVTVFRRSDDSIAFKGVLEGQLYLVDFERAELDTCLIAKTNMGWLWHRRLAHVGMKNLHKLIKGEHILGLTNVHFEKDREKSHTQETLKGFLRRAQNEFGLRIKKIRSDNGTEFKNSQIEGFLEEEGIKHEFSSPYTPQQNGVVERKNRTLLDMARTMLDEYKTSDRFWAEAVNTACYAINRLYLHQILKKTSYELLTGKKPNISYFRVFGSKCFILIKRGRKSKFAPKTVEDFLLGYDSNTRAYRVFNKSTGQVEVSCDVVFDETNGSQVEQVDLDEIGIEEAPCIALRNMSIGDVCPKEFEEPPNAQDQPSSSTQASPPTQNEDEAQVDEIEDQANEPPQNDDNDQGGDTNDQDKEDEEQRPPHPRVHQAIQRDHPVDTILGDIHKGSASQTGKQVARAVRGAGSTAPPWGGSTGLGQLDQSADVDPRAIDLAMRIAERMFLKMKEDEAKNIIEEEENDRWRPNDESTSSQGSSFKSTSHMCFVANESDSESESEDEEEHESDSEDEDDLQKFFAQLSKKNRMSLLKLMKRAEEQKEMLHKQEDILIEKIKDLEKLTKEHEKLKCSHDDLVQRYEDISIEQIKAINHSSYIAQLENKNAMLKNTVEKLNIENLALQEKHDMLVCSHNKFMDSHIMLEMAHEVVLTNFKSYKPHTCTCTQVETTLSCANNCCYQASQSSIELEISGISDISITQENKELKEEVGMLRRSLTRLKGKCHAQPSQDNRDNMVKKLEKGTTVACTKPLQKNTKLSKKGMSKIHGEKINAHMICSNNVPMCFNKERSKRSDRRCYGCKEKGHEIDSCPHMKNQDLARSRKMTIKKDESKRQKHCKDKHHICYNCREKGHLFKVCPKGKTPKPNLSIHSNMLRRPKFDSCARKVMSSPHSRTKAIWVPKSLLANLDGPIMRWVPKCT

SEQ ID NO: 10718 - protein, 660 aa, Zea mays
  unsure (1)..(660): unsure at all Xaa locations
  Clone ID: TF_ZM4989.C10.o4.fg.pep
MACYLEAVDLGVWRVTRDGMKPPKNPEKPTTSEEKEIHLNARAKNCLYESLSMDIFNQVFTLKTANEIWLKLHELHDGTSNVREQKHCLVLNEYNTFAMRDDELVRDMYSRLNLIINELNSIGINKLGDADIVRKIISLLPQQRYGSIITILHNMEDLSNMTPTIVIGKIAAFEMSRKMCRGEEPTSSRPYAFAXEESDDDEDNQPCTSSSEDEQTIRRVGKVMRMIRKINLMGVPLQVEDLLFNIDRKKQRKRGCFACGEKGHFRDNCPTMAEPKKERSKGKALTSVRTWDDSSSEDEPPRTRSHRSSSRSSRSSHKCLMARGNKSIPSSGDESSSDDEGEGKASLDELAEAVEFFQDVCTKQKAQLKTLKNKLVSSQNDYKGLLEKFETFANLNSELSTKIELLESCAPSTATDDSLIKKNEKLKAKLASSQEAIENLLEKMEILSIHNNELTTKLENIGSTPGASLVKIPEIIKKDASTSCFDLIDDSNPCNQVLVENIVVETCSDEVAKENEQLRQEVARLGKALYDKKGKAKQIQPPQDNTTAGVNKPMEGETVICRLCHKEGHKSFQCKAMTGDKQRQKLKQKPSIKISNTYIKKVDKKDATPYLIKKKKNGKVIAIKANKQANKGKGAKRIWVPKEIISTMKSTKKVWIPKGK

SEQ ID NO: 10719 - protein, 210 aa, Zea mays
  Clone ID: TF_ZmC65805_1.pep
SSGKALRKDKPSQDVEGTSVKESKPSAGEDDSSKICYKCKKAGHLSRDCPESTSEVDRNDGSISRSRDDTGTNTAPAGGNSPMDEDDVQEIGDEEKEKLIDLDYLTGNPLPNDILLYAVPVCAPYNALQTYKYRVKITPGTAKKGKAAKTAMSLFLHTPDATNREKELMKACTDPELVAAIVGNAKITAPGLTQLKQKQKQKGKKSAKQN

SEQ ID NO: 10720 - protein, 514 aa, Zea mays
  Clone ID: TF_ZmC12531_2.pep
MAQRWRSRARWDSDLDEDGSPPFRKPRRGGSDEEDDEVGNEDLSLEIIARAQRKRRWASCGGVTGFANLLSVSSGDDEDAVVELAEADEPRRKQKKRQHWKQRKRQRKEATAAAGAAVDEEEKAVCSTQEEPIGTAESVLTENGADAPASDNMVLRKLLRIPRYFDPGETLLETCFNCSEEGHVAANCPLEKRKKPCFVCGLFGHNAKQCTQGQDCFICKKGGHMAKDCPDKHRRNDHQSTLCLKCGEIGHDMFGCTNDYPPDDIEKIRCYVCNQKGHLCCSDFSDDCPKQISCYNCAQSGHSGLGCAKRRETSAVTTPTLCFKCGEEGHFARGCTKNAKSDRSKGKSSSHIQRKEKWKKASSSARSAPYDARKTSKRKSPHLEERVGTPRHKPKSRGGWTGGDDLPLKKYKSNGWGSPSTPKKSYANHQFLSGCDYLTPQPSRRHNYHGTMSSPNHQFLSGCDYFTPESSRGHSHGTMSPNWNYSPSARKHGFSSSRFAAAAASNTHVRFGRN

SEQ ID NO: 10721 - protein, 220 aa, Zea mays
  Clone ID: TF_ZmC12531_3.pep
MAERWRSRARRDPDLDEDASPPSRQPRHSGGDEEDDELGNEDLSLEIVARAQRKRRGESAGGVPVFADLLSVSSADEEGAVVELDEADEPRRKQKKKQRRKQRKKHRKETTEAAAGAAVEVDENAVCSTEEGPIGTAESVLTENGADAPASDNMVLRKLLRIPRYFDPGETLLETCFNCSEEGHVAANCPLEKRKKPCFVCGLFGHNAKQCTQGQDCFIW

SEQ ID NO: 10722 - protein, 261 aa, Zea mays
  Clone ID: TF_ZmC6609_1.pep
MSSRSPPPKDRRMRTERTSYRGAPYRRDSRHGPSRFRNDLCNNCKRPGHFARECPSVAVCHTCGLPGHIAAECSSKGTCWNCKEPGHMANSCPNEGICRNCGKSGHIARDCTAPPVPPGEVILCSNCYKPGHFREECTNEKACNNCRQSGHIARNCTNDPVCNLCNVAGHLARQCPKSDTLGERGGPPPFHGVGAPFRGVGVPFRGGLSDVICRACNQIGHASRDCMAGAFMICHNCGGRGHTAYECPSVSLIERFPPRRF

SEQ ID NO: 10723 - protein, 261 aa, Zea mays; identical to SEQ ID NO: 10722
  Clone ID: TF_ZmC6609_10.pep

SEQ ID NO: 10724 - protein, 300 aa, Zea mays
  Clone ID: TF_ZmC6609_2.pep
SARGPRTGLLPSAASPVLHSCIRSRFTPSGRPPRSFSPPSLSLRRLGRLPPPPYARSRGPRHSYSSVSSPGDARFRNDLCNNCKRPGHFARECPSVAVCHTCGLPGHIAAECSSKGTCWNCKEPGHMANSCPNEGICRNCGKSGHIARDCTAPPVPPGEVILCSNCYKPGHFREECTNEKACNNCRQSGHIARNCTNDPVCNLCNVAGHLARQCPKSDTLGERGGPPPFHGVGAPFRGVGVPFRGGLSDVICRACNQIGHASRDCMAGAFMICHNCGGRGHTAYECPSVSLIERFPPRRF

SEQ ID NO: 10725 - protein, 261 aa, Zea mays; identical to SEQ ID NO: 10722
  Clone ID: TF_ZmC6609_5.pep

SEQ ID NO: 10726 - protein, 877 aa, Zea mays
  unsure (1)..(877): unsure at all Xaa locations
  Clone ID: TF_ZmC11384_1.pep
MEPQLTPGAVAAVSAHADGNGTLQPVLQVVDVRMVNNAKNPSAERFRMVLSDGEHTMQSMLATAENARVRDGSIQKGSIVHLLECTCSTIQSRRIIIVIKLDVLQSECAIIGNPRPYEMRNQPNEQGTNIPANAAQANTGTYSSGPGPXDHLLLLNEHKLLIMYHTVVFIRCLMVMASLRPCVQDANHPLLCLCVKLELCISTSXMFSSYKSSLLCQKKKNSHQNQRFAVPSMAGGSGAPGNTYGQPAQSFYQQPPPGHMNRTPVSKNDAYRLVPLAQLNPYLDKWTIKVRVTAKTDLRFYNNARGAGKVFSFDLLDEQRGEIRATCFNTQADQFFNLIEVDKVYLISKGSLKPAQKKFNSLNHEYEISLDSRTSIEVCADDDSNIPRQQYNFRKISEIENIEKDAILDLIGIVTSVGPSVTFIRKDGVETQRRTLELKDMSGRSVQLTLWGKLCVAEGNQLQSLCDSGLNPVLALKGARVTDYSGRSVSSAGSTQLKIDPEIPEAESLRRWYATGGKTAACVSLSVVSMGGTCVRKSIAQIKDENLGQLEKPDFITVKAAISHLIADNFCYPACTIDVNGRMCNKKVTDNGDGTWRCDKCDQSLPNCEYRYVLNGQIQDHSGVTNFTAFEDAAKVMIGHSGHELNNISVEDSERFAEILQAARWQQFLFTLKVKEEIYNDAPQVKCNITKAEKLDPAIESSYLLGVINGLLQDDTGSSSGAQGAMAYNAGISNTGAGRSVPTTNSAYTTNLSGPRYGESANQLAQQESTYTGVTTPVSAARNVQQTCVSCGSSGHNVQNCPAGTYRQQAAASAASSYGSSQPRNGLCFKCNQPGHFANSCPLLAPAPQQQQQQYRSGGAPSGGYGRQQPYVGATNY

SEQ ID NO: 10727 - protein, 1031 aa, Zea mays
  Clone ID: TF_ZM3971.C7.o8.fg.pep
MDCYNFGELGHLAHQCNKPKKNKFKGKKEDDNDDEKKEKRFFKRKDGKHKRFHKKKNGKAYIVGDWLTDIESSSGSSSSEEENDEKVVAIIGDFSRPPPSPSSTSHLCLMARGERKVQNDNDIDDSDSDSDDEFASPSYDELTDLLKEYTQIIRKSKSKYAKDKCEKLNEANRELKDILVKIKEDYTKIKFDHDNLLVENELLSCNTHEAINHVVKIDVATSCDDLSQGDQTSLHDELTEKVEVLTLDNQKLKRYLTDATTRGKVAIENNDFNNELAVDNERLKNEVKKLKSENEHLATSVQKFNKGQYLQNELFMNTVIKNNKSGIGYNSFVQKKAATQYKPKQTHKPIKCFECGKEGHFAHNCKAKPPTPLPKHLRPFAFNAHYVLRKVANGKVNYKTGGSHWVIDSGCTQHMTCNPRMFTSLDENVDGQDKITFGDNSKGKVQGLGKVAISNDLSISNILLVAPLSFNLLSVDVIVSKMDDESMVFKGFRYNNLYLVDFTPEDVDLRTCLFTKASLGWLSHRRLAHVGMSTLKKVLKKDMVRGLKDVVFEKDKPCSALIVDDFSRYTWVFFLHDKSEVASIFKKFAKKAQNEFYCKIKKIRSDNGKEFDNTNIHEYCDEIGIKHEVSATYTPQQNGVVERKNRTLITLARTMIDEYNTPERFWAEAVNTACYASNRLFPHRLLAKTPYELLNGKKPDVSFFRVFGCKCYIYKKRHHLGKFQRRCDIGFLLGYSSKSKAYRVFNHATGVLEETYDVEFDETNGSQGALENLDGVGDEPLREAMKNMPIGAIKPKEDEEEVQNIDMPSSSSVPQDDEKDERHANEDTFVSHEQARDPDWVNAMHEELNNFTRNQVWTLEKPPQDARIIGTKWVFRNKQDDEGVIVRNKARLVAKGFSQVEGLDFGETFAPQPPGFEDPRYPNHAYRLSKALYGLKQAPRAWYERLRDFLIEKGFKIGTIDTTLFTKKHNSDIFICQVYVDDIIFGSTNDYHYKEFGELMSKGFEMSMIGELTYLFGFQVKQMKDGNFLSQ

SEQ ID NO: 10728 - protein, 179 aa, Zea mays
  Clone ID: TF_jC-zmshLIB3587P037h11b1.pep
AACAEARHHGRPQEADGELVRARRVQLLRRVLRAGARRPLPAHRGLRGPQPRRPRRDAPRGAGHIAAECSSKGTCWNCKEPGHMANSCPNEGICRNCGKSGHIARDCTAPPVPPGEVILCSNCYKPGHFREECTNEKACNNCRQSGHIARNCTNDPVCNLCNVAGHLARQCPKSDTLGE

SEQ ID NO: 10729 - protein, 255 aa, Zea mays
  Clone ID: TF_ZmC515769_1.pep
MPRYDERDRYGGNTRLYVGRLPSRTRTRDLEDLFGRYGRVRHVDMKHEFAFVEFSDPRDADEARYNLDGRDFDGSRMIVEFAKGVPRGQGGGGDRDRGRGGDREYMGRGPPPGSGRCFNCGIDGHWARDCKAGDWKNRCYRCGDSGHIERDCQNSPKNLKRGKSYSRSPSPRRGRVRDRSYSRSRSRSYSRSVSPRRDERRSRSPRDSRSPRRSPRDSRSPRRSPRDSRSPMKSPRGSRSPMRSPRDSRSPMRSA

SEQ ID NO: 10730 - protein, 1571 aa, Zea mays
  Clone ID: TF_ZmC951_402.pep
MKQWRDDVDQLLSMVHSTSTRLKTRSSRRQHEAPASVRSPSVRGAQTNDLRAELNRRRAGEDAWVSLERARERRKNIDGRDLNQDFAAIAPQTPMGTRSQTGVPLAVYSWEELFARFVANFASAYQKHGVEAHLHAVRQEPGETLRKFISRFTKVRGTIPRISDASIITAFRQGRQMPNDYLSELAVGVDRWRAVGAPSNDVRWGWTSSRFYGDDFPYWKIRMEAYLEAIDIGVYKAATQGFPAPRDPTNLAYIVGDWLTDIESSSGSSSSEEENDKKVAAIAGDFSSPPSSPSSTSHLCLMARGERKVQNDIDIIDDSDSDSDEEFASPSYDELADLLKEYTQIIRKSKAKCDKKVANGKVNYKTGGSHWVIDSGCTQHMTGNSRIFTSLDENVDGQDKITFGDNSKGKVQRLGKWVNSVILEFNAYSLQQRRLAHVGMSTLKKVLKKDMVRSLKDVVFEKDKPCSACQAGKQVANTHPTKAFMSTSRPLELLHMDLFGPTNYIKKIRSDNGKEFDNTNIHEYCDEIGIKHEVSATYTPQQNGVVERKNRTLITLARTMIDEYNTPERFWAEAVNTACYASNRLFPHRLLAKTPYELLNAKKPDVSFFRVFGCKCYIYKKRHHLGKFQRRCDIGFLLGYSLKSKAYRVFNHATGVTNGSQGALENLDDVGDEPLREAMKNMPIGAIKPKEDEEEVQNIDRPSSSNVPQDDEKDERHANEDTFVSHEQARIQAEDVDAPGSSSQVVDRRNSSLLQAHPQNQIIGSPSQGVITRSHRHASFIEHHSFVSCVEPTCIDEALQDPDWVNVMHEELNNFTRNQVWTLEKPPQDARIIGTKWVFRNKQDDQGVIVRNKARLVAKGFSQVEGLDFGETFAPVARLEAIRILLAYASCYDIKLYQMDVKSAFLNGFINELVYVEQPPGFEDPRYPNHAYRLSKALYGLKQAPRAWYERLRDFLIKKGFKIGTIDTTLFTKKHNGDIFICQEFEMSMIGELTYFLGFQVKQMKDGNFLSQEKYTKDLLKRFNMEKCKPIKTPMPTNGHLDLDEGVTLPAREPSPVLPGFSPLVRQVRMPRTKNVSAPGGGDDEDPRRPFRQVKGKTMYLEQQEGRRKRRMDRAARAAAATATEQAELGDQPQTPSDQIAYRVRRLASRPRSSTPITASTPPPTLPAPVTLLRHPPPPLHHLPLLLLLLPLLLLLSHLLASGSAMRLSGTGTSVQTRTHGDLATGSEGHCCRRSLQHQDSGVLLQGPDVCTDCSACAPAFGPSRFSASPGADSEVHLSYLPGLLTLLTTSGRYVEEWVRVFYATVWIDPDHHWMRFRFEREDVTIHASQIRQLFGFHESSTRLHNLCYGTSDPPRHPHGGVAPDGSRRSPADFTTAAKFLYQLMRRTLLPRMGYREAATHIQLWLLGALVSHSEFDVVDFLICEIEDTVLDGLRARRQLPYAHYLCHIFAQLIRPPQFQGTLEASHLLFGSYRPAPEDPVPAPAPVFDTQAEDTALHQFEAQDTTVDDDDDNDDDDFGIPPPPPMLPRSHDHEAGSSNGAAPAAPPAIDPALAEILQTLTQQQAHLAAVQ

SEQ ID NO: 10731 - protein, 344 aa, Zea mays
  Clone ID: TF_ZmC12531_1.pep
HCVTSTCDQRIPRYFDPGETLLETCFNCSEEGHVAANCPMEKRKKPCFVCGLFGHNAKQCTQGQDCFICKKGGHMAKDCPDKHKRNDHQSTLCIRCGETGHDMFGCANDYPPDDIEKIRCYVCNQKGHLCCSDFFDNSLEQVSCYNCAQSGHSGLGCAKQRREASAVTTPTLCFKCGEEGHFARGCTKNAKSDGPKGWSSPHSQRKGRWKNDGKSPSHIRRKEKWKKDSSARSAPHDACTTSKSNSPSFEERMGASNHKSKWRGGWTGDDDLPSKKYKPNGWGSPATPKRSYTNHQYLSGGGDYFTPQSSRRHNHGTASPGARKHRFSSSIFAASNTHVRFKRS

SEQ ID NO: 10732 - protein, 118 aa, Zea mays
  Clone ID: TF_ZmC83001_1.pep
LDDAAMVKKLLDTVPDRLFPVVAGIEQFCDVETMPFEEALGRLKAFDERSRRRTHAGGERRDDQLLLTEAEWKARKKKKSTIGKCFNCGNRGHFARDCPKPKKEEALFANAEEEATLL

SEQ ID NO: 10733 - protein, 261 aa, Zea mays
  Clone ID: TF_ZmC6609_3.pep
MSSRSLPPKDRRMRTERTSYRDAPYRRDSRHGPSRFRNDLCNNCKRPGHFARECPSVAVCHTCGLPGHIAAECSSKGVCWNCKEPGHMANSCPNEGICRNCGKSGHIARDCTAPPVPPGEVILCSNCYKPGHFREECTNEKACNNCRQSGHLARNCTNDPVCNLCNVAGHLARQCPKSDTLGERGGPPPFRGVGAPFHDVGAPFRGGFSDVVCRACNQIGHTSRDCMAGAFMICHNCGGRGHMAYECPSASLMDRFPPRRF

SEQ ID NO: 10734 - protein, 94 aa, Zea mays
  Clone ID: TF_ZmC218_59.pep
DAWGGGGGGGGGCFKCGEPGHMARDCSSGGGGYGGGGGGGGGGCYNCGQAGHMARDCPSGGGGGGGRFGGGGGGGDRSCYNCGEAGHIARDCPT

SEQ ID NO: 10735 - protein, 508 aa, Zea mays
  Clone ID: TF_ZmC71_35.pep
MARRRSQKNKKTPPTNATQKEVTLEILLDDCSNYDSWSTSVINAFRTIHPQLEQIIDKSIFPSSFNGKINSEEDQRCYRLNYLAFDILNNSLSKEDYRAFISNYDESIPDAHDIWTRIKIKFDESKHNSSFNASTSFSFCDTNPCKEEGENERWRPNDESTSPKMCCVANENDSGSTNEDEEEERSFVQLYARLSQEDKAVMLKLLERAREQSEARQRLEDILSMKMQHFDELTKEHEELKCSHVDLVQSKSSFEQEFAGTNDDTYQKLKEENERLKKSLTQLKGKCIARPSQDNRDHMVKELETGTTVACTTSLEENVKDLRIAKRRKQKRKFNTSSKSLNLASTKGNIQGNDQATLHTKINKKYNECFEEGHLIRSCPYIKNGLIINKDDRLCFKCSKKGHLVKSCPYLKQKCMMLEKKVFTNHVASNKQRKKKSSKLGKRLCYTCRKKGHQCKDCPIGKNPTPNLSFDSYITRQPKIVTCARKELKNHHVRKIKAYNMEDCQRMI

SEQ ID NO: 10736 - protein, 262 aa, Zea mays
  Clone ID: TF_ZmC17063_1.pep
QSVPNTGGGGQIGGGGDGGGGGGGGYVNAGVEVEDKACPCGVGSCLVLTSNTPKNPGRKFYKCPMRDGGCNFFEWCDAPSPAPANARNNMVVHSETSATDMLCPCSAGTCLILTTKTGKNSISGARRGQITQGGGGGSCGFFKWCDELQPRVGAPLQASAQYQADSMPSIQNPSQRSSSSCFKCGQENHWARDCPNQPSDPYPDKGGRPVAPAGSPGACYNCGRSGHWSRDCPTSNSGGGGGTGTSRARSSSALSSWNSQRY

SEQ ID NO: 10737 - protein, 248 aa, Zea mays
  Clone ID: TF_ZmC17063_2.pep
SQNGGSGDGSSSGSGGYVIAGVEVESKACPCGVGSCLVLTSNTPKNPGRKFYKCPMRDGGCNFFEWCDAPSPAPANARNNMVIRSETSATDMLCPCSAGTCLILTTKTGKNVGRQFFCCPLNQGGGGGSCGFFKWCDELQPRVGAPLQASAQYQADSMPSIQNPSQRSSSSCFKCGQENHWARDCPNQPSDPYPDKGGRPVAPAGSPGACYNCGRSGHWSRDCPTSNSGGGGTGTSRARSSSALSSVE

SEQ ID NO: 10738 - protein, 101 aa, Zea mays
  Clone ID: TF_21626426.pep
TRPDGGHLPFTIDPGYHDLVCYNCGEPGHFVGICSKPKICFICGIPGHHMNECPAWKVLTPFRSAKYSRRCNTHFVRKKNLKGNYIKKKKKKKKKKKKKKK

SEQ ID NO: 10739 - protein, 139 aa, Zea mays
  unsure (1)..(139): unsure at all Xaa locations
  Clone ID: TF_LIB4719-018-Q1-K1-B4.pep
FCRDFACKNCRRPGHFAKECPSSPMCNNCNLPGHFAAECTLQTVCWNCKESGHIASECKNEALCHACNKTGHLARDCPTSGANVKLCNKCXKSGHIAVDCTNERPCNNCRQPGHIARECKNDPXCNLCNVFGHVARVCP

SEQ ID NO: 10740 - protein, 71 aa, Zea mays
  Clone ID: TF_jC-zmXLIB3526P093be10b1.pep
PPNLLLPPLASAWAVPAHVAGLPSVVAPATTTTASTALAAAAAGAVSGHVARLAALEAATIAAASSAPRVR

SEQ ID NO: 10741 - protein, 312 aa, Zea mays
  Clone ID: TF_ZmC1068_2.pep
MAAPPPTGCFKCGRPGHWSRDCPSSASTNPPAAADAPTNPSHLSGAASRFNAKPRPPAAAVDGEDGKGKKKKERATRPKLTPDLLLSDGGIGFVLRYFPKAFKPRARPGHEVDDLANLIKLYADWHSRLIPYYSFEQFVRKLEKLGAGNRVRRCVSELRDRVARGGDPTLLHEPPVHEDMPLPGGGEHGTEDPVLGTDAPLSDNHGTGPVVQEDADPPMESNDVVDPMEEDLLNEIYENTADIPAGEGASKESPEQSAPKEANSLAQEPQDGDVPKPAKVELTEAQKARMEANRLKALERAAARARASQQPT

SEQ ID NO: 10742 - protein, 238 aa, Zea mays
  Clone ID: TF_ZmC4152_2.pep
PTRPPTRPGFSQPPSSRSLISCEQGWVTLQLTREPGYGRGFFSPRSVTGFLSDVCSAAADEVGKIYITADENVQGAVFDLPEEIAKDLLTMEVPPGNTLTSGFQLPALQDDSPATDSYGRFSNDRGSRNRRSRGGGASRGRGGWDTDSEDRYRRGGRSLRSDNDSWSDDDWSGGGRKSNRSSSSFGGRSSSYGSRGSPSPSFGVRSSSLGGRESSRSFSGACFNCGESGHRASDCPNK

SEQ ID NO: 10743 - protein, 146 aa, Zea mays
  unsure (1)..(146): unsure at all Xaa locations
  Clone ID: TF_ZmC4152_4.pep
LFHYEIAKXIAETFVHRXGRTXGGAGKAGTAILMFTSSQKRTVMSLERDVGCKFEFISPPSIEEVLESSAEHVIATLRGVHPESTQYFLGAAEKLTEELGPHALASALAHLSGFSQPPSSRSLISYEQVRSDTTKLHMHCSILYLA

SEQ ID NO: 10744 - protein, 327 aa, Zea mays
  Clone ID: TF_ZM4871.C1.o2.fg.pep
METWKSQEITARNACYLCGREDHYLRNCPKKSSLPNIPEIKLSQSSDIEYEQKCTETSINVMKATQPSNLSSRACFGCGDTGHLINGCPKKDVEINKVQKKRQHPQTHASTKNKQRKETNGKISYVVTGTIQSDNAVIFGTLCPLRSRKTISAPEGKMLVNYICPKMMNPNGNEVNGANDNIPTLTTMNEKNESQRYSMNGMKNNKRNRKMFGYMISPPQPQAKATKHMDTQTEESSQAQLYEIQTPSQPSPPVGQTKLTRKELKARGACYYCKNEGHLIRECPKKRLDRIKKKAAKHDLSNNSEDPPFYKYDDEGRLISIHYGAKK

SEQ ID NO: 10745 - protein, 98 aa, Zea mays
  Clone ID: TF_ZmC3007_2.pep
GGGDRGYGGGGDRVYGGGGDRGYGRGGGGGYGGGGGGGRGCFKCGEEGHMARDCSQGGGGGGYGGGGGGGYGGGGGGRECYNCHQEGHISRDCPEKMR

SEQ ID NO: 10746 - protein, 66 aa, Zea mays
  Clone ID: TF_LIB3969-006-Q1-M6-F9.pep
MPKHYRPAGKKKEGNAAKYITRTKAVNYLQVSLAIFRFVTISQLILYIAGEPSSRRRIMLNKLVGC

SEQ ID NO: 10747 - protein, 109 aa, Zea mays
  unsure (1)..(109): unsure at all Xaa locations
  Clone ID: TF_LIB4729-111-A1-K1-F3.pep
MTSSRSKSRSHSRSRSRSRSPQRRDRLRSERAPRHSRSRSRSRSPYRRRERRGYKDLVCKNCRRPXHFAKECPSAPTCNNCNLPGHFAAECTSKNXCWKLQEPGHIASE

SEQ ID NO: 10748 - protein, 267 aa, Zea mays
  unsure (1)..(267): unsure at all Xaa locations
  Clone ID: TF_ZmC172453_1.pep
FFFFFSWRSIFGSGVKVQATSSFRLDVSTLSMEDITGRLKAAEHADDASPPSTGGKLYLTEEQWEARWKEKHRNDAGASKSGNHRRRLRRGATSXGERTGAGKGRDQCRSCGKTGHWARDCPSKSNKGKAYVAQAEEEEGTLLLARVSSVQLRPLCGGDRIVGRIPGAGGFSGSDPPTGDPGRGIGGAAGTTVAASGPVPGGGGADRSSPEAGGLAPAGEGGAGSTTSNPSPSAGGVAQCCGGASDPAASAGEATRRDGAAARTSGG

SEQ ID NO: 10749 - protein, 201 aa, Zea mays
  Clone ID: TF_ZmC18109_12.pep
ASQNNTLNKIVDEQTFKTQKDAQPNQQTSDLGTCCCCEYYGIPCRQISINESETNALSVDESQGIPKRKHHKDAQPQEETQECYIDGWTITCTQFQPRVRIRSKKQKRKHGKSQEITSRKACYQCGREGHYFRNCPEKSSLQITSEMKLSQSSDMEYEQKCRETSTNNVKTTPPCNLSSRACFGCGDINHLVNSCLREPCV

SEQ ID NO: 10750 - protein, 762 aa, Zea mays
  Clone ID: TF_ZmC4152_1.pep
NSAPGHFLSPLLRSSPLPPMASLTLPALALALSNPGAVRLRAAAFRCWALRRRGWAAAGALASPNSVLSEHAFKRLQLGSDDEDGEGPYGSDADEGFEAGEGDNEELAIARLGLPDELVATLEKRGITHLFPIQRAVLIPALEGRDLIARAKTGTGKTLAFGIPMIKQLIEQDDGRITRRGRTPRVLVLAPTRELAKQVEKEIKESAPKLGTVCVYGGVSYNVQQNALSRGVDVVVGTPGRIIDLINGGSLQLGEVQYLVLDEADQMLAVGFEEDVETILQQLPAGRQSMLFSATMPSWVKKLSRRYLNNPLTIDLVGDQDEKLAEGIKLHAIPLTATSKRTILSDLITVYAKGGKTIVFTRTKKDADEVSLALTNSIASEALHGDISQHQRERTLNGFRQGKFTVLVATDVAARGLDIPNVDLIIHYELPNDPETFVHRSGRTGRAGKAGTAILMFTSSQKRTVKSLERDVGCNFEFISPPSIEEVLESSAEHVIATLRGVHPESTKYFLGAAEKLTEELGPHALASALAHLSGFSQPPSSRSLISHEQGWVTLQLTREQGFGRGFFSPRSVTGFLSDVCSAAADEVGKIYLTADENVQGAVFDLPEEIAKDLLTMELPPGNTLTKISKLPALQDDGPATDSYGRFSNDRGSRNNRRSRGGGASRGRGGWDTDGEDRFRRGGRSLRSDNDSWSDDDWSGGGRKSNRSSSFGSRSSSYSSRGSPSFGGRSSSFGGRESNRSFSGACFNCGESGHRATDCPNK

SEQ ID NO: 10751 - protein, 256 aa, Zea mays
  Clone ID: TF_LIB4740-106-A1-K1-D8.pep
FPCPPRSLSRCDDCVEYRPRPLTPRRRRPRRLRQVPRDGPFIFVSLFAGRRAPARHIAAECSSKGVCWNCKEPGHMANSCPNEGICRNCGKSGHIARDCTAPPVPPGEVILCFFCYKPGHFREECTNEKACNNCRQSGHLARNCTNDPVCNLCNVAGHLARQCPKSDTLGERGGPPPFRGVGAPFHDVGAPFRGGFSDVVCRACNQIGHTSRDCMAGAFMICHNCGGRGHMAYECPSASLMDRFTPSPVSEGRTIQ

SEQ ID NO: 10752 - protein, 320 aa, Zea mays
  unsure (1)..(320): unsure at all Xaa locations
  Clone ID: TF_ZmC31167_4.pep
MAYTVTRSYTDQVRPFCQYAATQRFLPTLTPSGQRPRTPSVPPRSPPVTNAHRASSLVAATGRPSLPPYARSKSKSRSRSRSRSRSRSRSPRRRDRLRSERAPHRSRSRSRSPYRRRERRGHRDFACKNCRRPGHFAKECPSAPMCNNCNLPGHFAAECTLQTVCWNCKESGHIASECKNEALCHACNKTGHLARDCPTSGANVKLCNKCFKSGHIAVDCTNERACNNCRQPGHIARECKNDPVCNLCNVSGHVARVCPKTTLASVYXGGPFRDILCRICGQPGHISRNCMATIICDTCGGRGHMSYECPSARIFGLRRL

SEQ ID NO: 10753 - protein, 1372 aa, Zea mays
  unsure (1)..(1372): unsure at all Xaa locations
  Clone ID: TF_ZmC14816_1.pep
MSLRSTTSSAQRQQEAEVAAAQERERAAAAAAATAARAARLAAAELTAARAEVEAAEATDAARAAAAELEVLRGSRAGSYASVDDNTDEELRLAREAAREQAAQWAAAHPHGGARGGSPDRRRHADSAPREGARGGSPDGRRRAGGAPGGGDRVDGDRGLYRRRDSPSPDRYHGRRMAQAFVRDIGPGGGWPTLTKTNYIEWAAVMRVRLQVRQMWEAVRYGDVDYHEDRRALDALIAAVPLEMQFSLSQKRTAKEAWDAIAATRIGSDRARKTTLQTLRKEWENLAFKPGEDVDDFALRLNTLLQKMVQFGDETYDEERAVEKLFCCIPEKYKQIARSIESLLDLSTMTIEEAIGRLKVVDGDEPQAPSGPITIGGKLHLTREQWEACQGDKKKESSSTRGRKRGKQRKARGGTQAGARGHVEGGARGGAQGGVVGNKKPARDDGCHNCGKLGHWARDCRQPRRGQANVAQAEAEEALLLAHASIEPSPAAPAAAALLHLDESKARAFLGDGSNKDMIEGWCLDTGATHHMTGRREFFTELDSSVRGSVKFGDASGVEIKGVGSVVFTVTSGEHRLLTGVYYIPALRNSIISLGQLDENAREVAAEAVCGRKLRVLRTDNGSEFTAAEFASYCADEGVQRHYSASYNLQQNGVVERRNQTVVGMARALLKQRGMSAAFWGEAVVTAVYILNRSPTKALNGMTPYEAWHGRKPAVSHLRVFGCLAFTKELGHIGKLDDRSTPGVFIGYAEGSKAYRILDPRTQRVRTARDVVFDEGRGWAWDKAVDDGATPTYDFTIEYVHFEGAGGVGNSSPSRSTPALKSPPTPAPHSPALATTSSSPPRTPATTPATASSSPPPRVEHDPVELVTPLSRDEERVDACYDGESLRYRRVEGLLIDSSMPGPASRILAGELHLACDDGEPRSFAEAEKHAAWRAAMQSKMDAQEGIDFDDAFAPVARMESVRLLALSAQQGWHVHHMDVKSAFLNGDLKEEEGKVLRLRKALYSLRQAPRAWNAKLDSTLKGMGFTPSPHEATIYRRGNGGSALLVGVYVDDLVITGAKDAEVATFKEEMKATFQMSDLGHLSFYLGIEVHQGDSGITLRQTAYAKRIVELAGLTDCNPALTPMEERLKLSRDSTTEEVDATQYRRLVGSLRYLVHTRPDLAYSVGYVSRFLQRPTTEHEQAVKRIIRYVAGTLDHGLYYPRCPGEAHLVGYSDSDHAGDIDTSKSTSGILFFLGKCLISWQSVKQQVVAMSSCEAEYIXASTASTQALLLARLLGDLLGRDTGAVELRVDSQSALALAKNPVFHERSKHIRLRYHFIRDCLAEGSIKARYINTKDQLADLLTKPLGKIKFVELCSRSGMTQLSHKTTPKT

SEQ ID NO: 10754 - protein, 556 aa, Zea mays
  unsure (1)..(556): unsure at all Xaa locations
  Clone ID: TF_ZmC5443_1.pep
MWEAVWYGDVDYHEDRRALDALIAAVPPEMQFSLSQKWTAKEAWDAIAATRIGSDRARKTTLQALPKEWENLAFKPGEDVDDFALRLNTLLQKMVQFGDDNYDEERAVEKLSRCIPEKYKQIARSIESLLDLSTMTIEEAIGRLKVVDGDEPQAPSGPITIGGKLHLTREQWEACQGDKKKGESSTRGRRRGKPRKARGGAQAGVRGHAEVGAHGGAQGGAVGNKKPARDDGCHNCGKLGHWARDCRQPRRGQVNVAQAEAEEETLLLAHANIEPSPAASAAAALLHLDESKARTFLGDGSSKDMIEGWCLDTGATHHMTGRREFFTELDSSVRGSVKFGDTSGVEIKGAGSVVFTAASDEHRLLTGVYYIPASRNSIISLGQLNENGSRVEVEHGVMRIWDPSRRLLAKVRRGPNRLYILNVKVAQPXARRDDVAWQWHERFGHLNFEALKRLSAKEMVRGLPCLDHVEQFCDVCMLTKQRRLPFPQQSSFRAKERLELVHGNLCGPVTPATPGGRRYFLLLVDDLSRYMWVMILGSKGEAANAIRRVQVAAEAE

SEQ ID NO: 10755 - protein, 549 aa, Zea mays
  unsure (1)..(549): unsure at all Xaa locations
  Clone ID: TF_ZM3738.C8.o2.fg.pep
MGARVAAAQIGADTLTALRARAHAAAAQTGVDAPAVLPAAATGSTEIAASTGGATLPPRIGTMVAAWPRPLSGTSVPAKMVQFGDETYDEERAVEKLFCCIPEKYKQIARSIESLLDLSTMTIEEAIGRLKVPQGGVVGNKKPARDDGCHNCGKLGHWARDCRQPRRGQANVAQAEAEEALLLAHASIEPSPAAPAAAALLHLDESKARAFLSDGSNKDMIEGWCLDTGATHHMTGRREFFTELDSSVRGSVKFGDASGVEIKGVGSVVFTVTSAREVAAEAVCGRKLRVLRTDNGGEFTAAEFASYCADEGVQRHYSAPYSPQQNGVVERRNQTVVGMARALLKQRGIPAVFWGEAVVTAVYILNRSPTKALNGMTPYEAWHGRKPAVSHLRVFGCLAFTKELGHISKLDDRSTPGVFIGYAEGSKAYRILDPRTQRVRTARDVVFDEGRGWAWDKAVDDGATPTYDFTIEYVHFEGAGGVGNSSPSSSCXMSSSPPRTPATTPATASSSPPRTPAPTXHVEHDPVELVTPLSRDEERVDACYDGESL

SEQ ID NO: 10756 - protein, 382 aa, Zea mays
  unsure (1)..(382): unsure at all Xaa locations
  Clone ID: TF_ZmC1373_16.pep
PLARRLHADPGDMPRYDDRYGGTRLYVGRLATRTRSRDLEHLFGRYGRFFGFYRRSLVEGCPWWTXDHLWKFQVGDAFEYLTHDXRLTVCGNPLRRIREVELKRDYAFIEFSDHRDADEARYQLDGRDVDGSRIVVEFAKGVPRGSGGSREYMGRGPPPGTGRCFNCGVDGHWARDCKAGDWKNKCYRCGERGHIERNCQNSPRSLRRERSYSRSPSPRRRRDRDDRRSRSPSYSRSPMRSASPPVKEKERSPAPDGSRSPRSRSPQDQVMSPPPKDNGEGNGSDRGGSPRGRENSRSCSRSRSPSGSNRSPAANGRSRSPGGERSPSPGGERSPSPRGERSPSPRADRSPSPNGNGNNDAAADVDADAAARSGSPTGSKSP

SEQ ID NO: 10757 - protein, 383 aa, Zea mays
  Clone ID: TF_ZmC1373_20.pep
IGSLEAGREFLSSRIEIPPTTSVPLPFPPLARRLHADPGDMPRYDDRYGGTRLYVGRLATRTRSRDLEHLFGRYGRIREVELKRDYAFIEFSDHRDADEARYQLDGRDVDGSRIVVEFAKGVPRGSGGSREYMGRGPPPGTGRCFNCGVDGHWARDCKAGDWKNKCYRCGERGHIERNCQNSPRSLRRERSYSRSPSPRRGRGRSRSYSRSRSRSRSYSRSRSLSRSPRGGRRDRDDRRSRSPSYSRSPMRSASPPVKEKERSPAPDGSRSPRSRSPQDQVMSPPPKDNGEGNGSDRGGSPRGRENSRSRSRSPSGSNRSPAANGRSRSPGGERSPSPGGERSPSPGGDRSPSPNGNGNNDAAADVDADAAARGGSPTGSKSP

SEQ ID NO: 10758 - protein, 349 aa, Zea mays
  Clone ID: TF_ZmC1373_23.pep
DPRGRPGLLSPLPFPPLARRLHADPGDMPRYDDRYGGTRLYVGRLATRTRSRDLEHLFGRYGRIREVELKRDYAFIEFSDHRDADEARYQLDGRDVDGSRIVVEFAKGVPRGSGGSREYMGRGPPPGTGRCFNCGVDGHWARDCKAGDWKNKCYRCGERGHIERNCQNSPRSLRRERSYSRSPSPRRRRDRDDRRSRSPSYSRSPMRSASPPVKEKERSPAPDGSRSPRSRSPQDQVMSPPPKDNGEGNGSDRGGSPRGRENSRSCSRSRSPSGSNRSPAANGRSRSPGGERSPSPGGERSPSPRGERSPSPRADRSPSPNGNGNNDAAADVDADAAARSGSPTGSKSP

SEQ ID NO: 10759 - protein, 1850 aa, Zea mays
  Clone ID: TF_ZmC27331_11.pep
MAHRTVRCTPDMSGAPATSSVPLEYDRWSSDLWATPDVRWRTGQLLFIVRCASMGKPDVCARCGAFNASAGGDGPPPVFDGDDFPYWKIRMEAYLEAIDIGVYKAATQGFPEPRDLTNLVGDEFNYEKWNAKAKNTLFRGLCKDVFNRVRNHKNAHDLWMDICALHEGTRSEREERYHIAMRKLNSIEMLTNENANAMYSRLNILVEEVNGLGLTQISQPDVVRKILSVLPIDKYGHIVTVLHQMDLSVTTPTQILGKINAHEMYMHINDKEESSSKRKDLALKANHERKGKAKIQVEEESSSDDDLDANIALMVRKTTKMLKKLNREGIKFDSRKKKFFSNKRKPISEMDCYNCGELGHLAHQCNKPKKNKFKGKKEDDSDDEKKEKKFFKRKDGKQNRFHKKKNGKAYIVGDWLTDIESSSGSSSSEEENDEKVAAIAGDFSSPPPSPSSTAHLCLMARGERKVQNDINIDDDSDSDSDEEFASPSYDELADLLKEYTQIIRKSKAKCDRLKNENESLNAKYDIVIKASDEIKEENKTMSSTVNELTNSLKDAKEKYDKLNEANRELQNRLVKIKEDYTQIKFDHDNLLVENELLSCKTHEAINPVVKLDVATSCDDLIQEEQTSLHAELTEKVEVLTLDNQKLKNYLTDATTRGKVAIENNDFNNELAVDNQRLKNEVKKLKSENEHLATSVQKFNKGQYLQNELLMNTVMKNNKSGIGYNAFVQKKAITQYKPKQTHKPIKCFECGNEGHFAHNCKAKPPTPLPKHSRPFAFNAHYVLRKVVNGKIKVNYKTGGSHWVIDSGCTQHMTGNPRMFTSLDENVDGQDKITFGDNSKGKVQGLGKVAISNDLSISNVLLVAPLSFNLLSVGQLCDLGLKCLFTPSEGFRYNNLYLVDFTSEDADLRTCLFTKASLGWLWHRRLAHVGMSTLKKVLKKDMVRGLKDVVFEKDKPCSACQAGKQVANTHPTKAFMSTSRPLELLHMDLFGPTNYVSAGGNLYCLVIVDDFSRYTWVFFLHDKSEVASIFKKFAKKAQNEFDCKIKKIRSDNGKEFDNTNIHEYCDEIGIKHEVSATYTPQQNGVVERKNRTLITLARTMIDEYNTPERFWAEAVNTACYASNRLFPHRLLAKTPYELLNGKKPDVSFFRVFGCKCYIYKKRHHLGKFQRRCDIGFLLGYSLKSKAYRVFNHATGVVEETYDVEFDETNGSQGALENLDDVGDEPLREAMKNMPIGAIKPKEDEEEVQIIDRPSSSNVPQDDEKDERHANEDTFVSHEQARVQAEDVDAPGSSSQVVDRRNSSLLQAHPQNQIIGSPSQGVITRSHKHANFIEHHSFVSCVEPTCIDDALQDPDWVNAMHEELNNFTRNEVWTLEKPPQDARIIGTKWVFRNKQDDQGVIVRNKARLVAKGFSQVEGLDFGETFAPVARLEAIRILLAYASCYDIKLYQMDVKSAFLNGFINELVYVEQPPGFEDPRYPNHAYRLSKALYGLKQAPRAWYERLRDFLIEKGFKIGTVDTTLFTKKHNGDIFICQVYVDDIIFGSTNDYHCKEFGELMSKEFEMSMIGELTYFLGFQVKQMKDGNFLSQEKYTKDLLKRFNMEKCKPIKTPMPTNGHLDLDEGGNPVNQTLYRSMIGSLLYLTASRPDIMFSVCMCARFQSNPKKAHLRAVKRILRYLRHTTSVGLWYPKGATFDLIGYSDSDYAGCKIDRKSTSRGCHLLGTSLVSWTSKKQNSVALSTAEAEYIAAGACCTQILYMKQTLLDYGVVLEKVPLLCDNESAVKIANNPVQHSRTKHIDIRHHFLRDHVAKGDIILEGVRSEDQFADIFTKPLDKTRFCMLRNELNILDLRNFM

SEQ ID NO: 10760 - protein, 2511 aa, Zea mays
  Clone ID: TF_ZmC951_441.pep
MSGGDGPPPVFDGDDFPYWKIRMEAYLEAIDIGVYKAATQGFPEPRDATNLVGDEFNYEKWNAKAKNTLFRGLCKDVFNRVRNHKNAHDLWMDICALHEGTRSEREERYHIAMRKLNSFEMLTNENANAMYSRLNILVEEVNGLGLTQISQPDVVRKILSVLPIDKYGHIVTVLHQMDLSVTTPTQILGKINAHEMYMHINKEESSSKRKDLALKANHEKKGKAKIQVEEESSSDDDLDANIALMVRKTTKMLKKLNREGIKFDSRKKKFFSNKRKPISEMDCYNCGELGHLAHQCNKPKKNKFKGKKEDDSDDEKKEKKFFKRKDGKQKRFHKKKNGKAYIVGDWLTDVESSSGSSSSEEEDDEKVAAIAADFSSPPPSPSSTSHLCLMAKGERKVQNDINIDDDSDSDSDEEFASPSYDELADLLKEYTQIIRKSKAKCDRLKNENESLNAKYDIVIKASDEIKEENKTMSSTVNELTNSLKDAKEKYDKLNEANRELQNRLVKIKEDYTQIKFDHDNLLVENELLSCKTHEAINPVVKLDVATSCDDLIQEEQTSLHAELTEKVEVLTLDNQKLKNYLTDATTRGKVAIENNDFNNELAVDNQRLKNEVKKLKSENEHLATSVQKFNKGQYLQNELLMNTVMKNNKSGIGYNAFVQKKAITQYKPMQTHKPIKCFECGNEGHFAHNCKAKPPTPLPKHSRPFAFNAHYVLRKVANGKIKVNYKTGGSHWVIDSGCTQHMTSNPRMFTSLDENVDGQDKITFGDNSKGEVQGLGKVAISNDLSISNVLLVAPLSFNLLSVGQLCDLGLQCLFTPTEVIVSKMDDESMVFKGFRYNNLYLVDFTSEDADLRTCLFTKASLGWLWHRRLAHVGMSTLKEVLKKDMVIGLKDVVFEKDKPCSACQAGKQVANTHPTKAFMSTSRPLELLHMDLFGPTNYVSAGGNLYCLVIVDDFSRYTWVFFFHDKSEVASIFKKFAKKAQNEFDCKIKKIRSDNGKEFDNTNIHEYCDEIGIKHEVSATYTPQQNGVVERKNRTLITLARTMIDEYNTPESYWAEAVNTACYASNRLFPHRLLAKTPYELLNGKKPDVSFFRVFGCKCYIYKKRHHLGKFQRRCDIGFLLGYSLNSKAYRVFNHATGVVEETYDVEFDETNGSQGALENLDDVGDEPLREAMKNMPIGAIKPKEDEEEVQNIDRPSLSNVPQDDEKDERHANEDTFVSHEQARVQAKDVDAPGSSSQVVDRRNSSLLQAHPQNQIIGSPSQGVITRSHRHASFIEHHSFVSCVEPTCIDEALQDPDWVNAMHEELNNFTHNQVWTLEKPPQDARIIGTKWVFRNKQDDQGVIVRNKARLVAKGFSQVEGLDFGETFAPVARLEAIHILLAYASCYDIKLYQMDVKSAFLNGFINELVYVEQPPGFEDPRYPNHAYRLSKALYGLKQAPRAWYERLRDFLIEKGFKIGTVDTTLFTKKHNGDIFICQVYVDDIIFGSTNDYHYKEFGELMSKEFKMSMIGELTYFLGFQVKQMKDGNFLSQEKYTKDLLKRFNMEKCKPIKTPMPTNGHLDLDEGGNPVNQTLYRSMIGSLLYLTASRPDIMFSVCMCARFQSNPKKAHLRAVKRILRYLRHSTSVGLWYPKGATFDLIGYSDSDYAGCKIDRKSTSGGCHLLGRSLVLWTSKKENSVALSTAEAEYIAAGACCTQILYMKQTLLDYGVVLEKVPLLCDNESVVKIANNPVQHSRTKHIDIRHYFLRDHVAKGDIILEGVRSEDQLADIFTKPLDKTRFCMLRNELNILDLRNFIRQVKMPRTKNASASGGGDDEDPRRPFRQVKGKTVYLEQQEGRKKRRSDREARAAAAAAAAAAQAALGDQPDVPSDQIAFRARRLASRSRSSTHTSASTPPPTLPAPVTPIAPSTSTAIPTTSTTPASTASPAPAPASAPPVPPPRFRERDETEVRPLASDPRLFDLQRATAARVRRFRYIPVESWLPAQRDPAAGVLFSTRIQESFFRAQMSAQIALRVHRLLDLPAFLLAAGAESEAHLTYLPGLLSFLTISGRYVEEWVRVFYASVWIDPDHHWMRFRFEREDVTITADQIRQLFGFLESTTRLHSLCYGTSDPPRRPHGGIAPGTAHVAALFRPPFSDGSRRSPADFTTAAKYLYELIRRTLLPRMGYREATTHIQLWLLGALVSHSEFDVVDFLICEIEDTVLDGIRARRQLPYAHYLCHIFAQLIQPPRFQSTLEASRLVFGSYRPAPEIPVPAYAPVFDTQAEDAALRQFDTQGAAADDDDDDDFGIPPPPPPPMPPRSHDHEAGSSSAAPATPQAMDPALASILQTLTQQQAQLAAEQARMSERMLSMFQTMQDRQDSLQQQLIQDRAENRAFMALMLQHSGISAPPVQSAPPSSLYAPVVPSILSAPPAVTSPLRPVTLAFTSPVLSSVCPQPLVPPASAVTTTAVAVSVTASVPVAPAALPASESVPAPASTADPGSETDSDPPSAFALLPRPRPDAPPPPPPTSGV

SEQ ID NO: 10761 - protein, 1706 aa, Zea mays
  unsure (1)..(1706): unsure at all Xaa locations
  Clone ID: TF_ZmC951_461.pep
MSGGDGPPPVFDGDDFPYWKIRMEAYLEAIDIGVYKAATQGFPEPRDPTNLVGDEFNYEKWNAKAKNTLFRGLCKDVFNRVRNHKNAHDLWMDICALHEGTRSEREERYHIAMRKLNSFEMLTNENANAMYSRLNILVEEVNGLGLTQISQPDVVRKILSVLPIDKYGHIITVLHQMDLSVTTPTQILGKINAHEMYMHINDKEESSSKRKDLALKANHERKGKAKIQVEEESSSDDDLDANIALMVRKTTKMLKKLNREGIKFDSRKKKFFSNKRKPISEMDCYNCGELGHLAHQCNKPKKNKFKGKKEDDSDDEKKEKKFFKRKDGKQKRFHKKKNGKAYIVGDWLTGIESSSGSSSSEEENDEKVAAIAGDFSSPPPSPSSTSHLCLMARGERKVENENESLNAKYDIVIKASDEIKEENKTMSSTVNELTNSLKDVKEKYDKLNEANRELQTRLVKIKEDYTQIKFDHDNLLVENELLSCKTHEAINPVVKLDVATSCDDLIQEEQTSLHAELTEKVEVLTLDNQKLKNYLTDATTRGKVAIENNDFNNELAVDNQRLKNEVKKLKSENEHLATSVQKFNKGQYLQNELLMNTVMKNNKSGIGYNAFVQKKAITQYKPKQTHKPIKCFECGNEGHFAHNCKAKPPTPLPKHSRPFAFNAHYVLRKVANGKIKVNYKTGGSHWVIDSGCTQHMTGNPRMFTSLDENVDGQDKITFGDNSKGKVQGLGKVAISNDLSISNVLLVAPLSFNLLSVGQLCDLGLQCLFTPSEVIVTKIDDESMVFKGFRYNNLYLVDFTSEDADLRTCLFTKASLGWLWHRRLAHVGMSTLKKVLKKDMVRGLKDVVFEKDKPCSACQAGKQVANTHPTKAFMSTSRPLELLHMDLFGPTNYVSAGGNLYCLVIVDDFSRYTWVFFLHDKSEVASIFKKFAKKAQNEFDCKIKKIRSDNGKEFDNTNIHEYCDEIGIKHEVSATYTPQQNGVVERKNRTLITLARTMIDEYNTPERFWAEAVNTACYASNRLFPHRLLAKTPYELLNGKKPDVSFFRVFGCKCYIYKKRHHLGKFQRRCDIGFLLGDEPLREAMKNMPIGAIKPKEDEEEVQIIDRPSSSNVPQDDEKDERHANEDTFVSHEQARVQAEDVDAPGSSSQVVDRRNSSLLQAHPQNQIIGSPSQGVITRSHRHASFIEHHSFVSCVEPTCIDEALQDPDWVNAMHEELNNFTRNEVWTLEKPPQDARIIGTKWVFRNKQDDQGVIVRNKARLVAKGFSQVEGLDFGETFAPVARLEAIRILLAYASCYDIKLYQMDVKSAFLNGFINELVYVEQPPGFEDPRYPNHAYRLSKALYGLKQAPRAWYERLRDFLIEKGFKIGTVDTTLFTKKHNGDIFICQVYVDDIIFGSTNDYHCKEFGELMLKEFEMSMIGELTYFLGFQVKQMKDGNFLSQEEYTKDLWKRFTXEKCKPIKTPMPTNGHLDLDEGGNPVNQTLYRSMIGSLLYLTASRPDIMFSVCMCARFQSNPKKAYLRAVKKILRYLRHTTSVGLWYPKGATFDLIGYSDSDYAGCKIDRKSTSRGCHLLGRSLVSWTSKKQNSVALSTAEAEYIAAGACCTQILYMKQTLLDYGVVLEKVPLLCDNESAVKIANNPVQHSHTKHIDIRHHFLRDHVAKGGIILEGVRSEDQLADIFTKPLDKTRFCMLRNELNILDLRNLM

SEQ ID NO: 10762 - protein, 2493 aa, Zea mays
  Clone ID: TF_ZmC951_462.pep
MSGGDGPPPVFYGDDFPYWKIRMEAYLEAIDIGVYKAATQGFPQPRDPTNLVGDEFNYEKWNAKAKNTLFRGLCKDVFNRVRNHKNAHDLWMDICALHEGTRSEREERYHIAMRKLNSFEMLANENANAMYSRLNILVEEVNGLGLTQISQPDVVRKILSVLPIDKYGHIVTVLHQMDLSVTTPTQILGKINAHEMYMHINDKEESSSKRKDLALKANHERKGKAKMQVEEESSSDDDLDANIALMVRKTTKMLKKLNREGIKFDSRKKKFFSNKRKPISEMDCYNCGELGHLAHQCNKPKKNKFKGKKEDDSDDEKKEKKFFKRKDGKQKRFHKKKNGKAYIVGDWLTDIESSSGSSSSEEENDEKVAAIAGDFSSPPPSPSSTSHLCLIARGERKVQNDINIDDDSDSDSDEEFASPSYDELADLLKEYTQIIRKSKAKCDRLKNENESLNAKYDIVIKASDEIKEENKTMSSTINELTNSLKDAKEKYDKLNEANRELQNGLVKIKEDYTQIKFDHDNLLVENELLSCKTHEAINPVVKLDVATSCDDLIQEEQTSLHAELTEKVEVLTLDNQKLKNYLTDATTRGKVVIENNDFNNELAVDNQRLKNEVKKLKSENEHLATSVQKFNKGQYLQNELLMNTVMKNNKSGIGYNAFVQKKAITQYKPKQTHKPIKCFECGNEGHFAHNCKAKPPTPLPKHSRPFAFNAHYVLRKVANGKIKVNYKTGGSHWVIDSGCTQHMTGNPRMFTSLDENVDGQDKITFGDNSKGKVQGLGKVAISNDLSISNVLLVAPLSFNLLSVGQLCDLGLQCLFTPSEVIVTKMDDESMVFKGFRYNNLYLVDFTSEDADLRTCLFTKASLGWLWHRRLAHVGMSTLKKVLKKDMVRGLKDVVFEKDKPCSACQAGKQVANTHPTKAFMSTSRPLELLHMDLFGPTNYVSAGGNLYCLVIVDDFSRYTWVFFLHDKSEVASIFKKFAKKAQNEFDCKIKKIRSDNGKEFDNTNIHEYCDEIGIKHEVSATYTPQQNGVVERKNRTLITLARTMIDEYNTPERFWAEAVNTACYASNRLFPHRLLAKTPYELLNGKKPDVSFFRVFGCKCYIYKKRHHLGKFQRRCDIGFLLGYSLKSKAYRVFNHATGVVEETYDVEFDETNGSQGALENLDDVGDEPLREAMKNMPIGAIKPKEDEEEVQIIDKPSSSNVPQDDEKDERHANEDTFVSHEQARVQAEDVDAPGSSSQVVDRRNSSLLQAHPQNQIIGSPSQGVITRSHKHANFIEHHSFVSCVEPTCIDEALQDPDWVNAMHEELNNFTRNEVWTLEKPPQDARIIGTKWVFRNKQDDQGVIVRNKARLVAKGFSQVEGLDFGETFAPVARLEAIRILLAYASCYDIKLYQMDVKSAFLNGFINELVYVEQPPGFEDPRYPNHAYRLSKALYGLKQAPRAWYERLRDFLIEKGFKIGTVDTTLFTKKHNGDIFICQVYVDDIIFGSTNDCHCKEFGELMSKEFEMSMIGELTYFLGFQVKQLKDGNFLSQEKYTKDLLKRFNMEKCKPIKTPMPTNGHLDLDEGGNPVNQTLYRSMIGSLLYLTASRPDIMFSVCMCARFQSNPKKAHLRAVKRILRYLKHTTSVGLWYPKGATFDLIGYSDSDYAGCKIDRKSTSGGCHLLGRSLVSWTSKKQNSVALSTAEAEYIAAGACCTQILYMKQTLLDYGVVLEKVPLLCDNESAVKIANNPVQHSRTKHIDIRHHFLRDHVAKGDIILEGVRLQFRMPRTKNASASGGGDDEDPRRPFRQVKGKTVFLEQQEGRKKRRSDREARAAAAAAAAAAQAALGDQPDIPSDQIAFRARRLASRSRSSTHTSASTPPPTLPAPVTPIAPSTSTAIPTTSSTPASTATPAPAPASAPPVPPPRFRERDETEVRPLVSDPRLFDLQRATAARVRRFRYVPVESWLPAQRDPAAGVLFSTRIQESFFRAQMSAQIALRVHRLLDLPAFLLAAGAESEAHLTYLPGLLSFLTISGRYVEEWVRVFYASVWIDPDHHWMRFRFEREDVTITADQIRQLFGFPESTTRLHSLCYGTSDPPRRPHGGVAPGTAHVAALFRPPFTDGSRRSPADFTTAAKYLYELVRRTLLPRMGYREATTHIQLWLLGALVSHSEFDVVDFLICEIEDTVLDGIRARRQLPYAHYLCHIFAQLIQPPRFQSTLEASRLVFGSYRPAPEIPVPASASVFDSQAEDAALHQFDTQGTAADDDDDDDDFGVPLPPPPPMPPRSHDHEAGSSRAAPAPPPALDPALASILQTLTQQQQTLTQQQQTLTQQQALLAAEQARLSDRMLSMFQSMQDRQDALQQQLIQDRAESRAFMALMLQHSGISAPPVQSAPPSSLYAPVVPSILSAPPAVTSPLRPVTLAFTSPVLSSVCPQPLVPPASAVTTTVVAVSVTASVPVAPAALPASESVPAPASTTDPGSETDSDPPSAFALLPRPRPDAPPPPPPASGV

SEQ ID NO: 10763 - protein, 1602 aa, Zea mays
  Clone ID: TF_ZM4588.C2.o2.fg.pep
MDWGLLKSQPDVVRKILSVLPIDKYGHIVTVLHQMDLSVTTPTQILGKINAHEMYMHINKEESSSKRKDLALKANHERKGKAKIQVEEESSSDDDLDANIALMVRKTTKMLKKLNREGIKFDSRKKKFFSNKRKPISEMDCYNCGELGHLAHQCNKPKKNKFKGKKEDDSDDEKKENKFFKRKDGKQKRFHKKKNGKAYIVGDWLTDIESSSGSSSSEEENDEKVAAIAGDFSSPPPSPSSTSHLCLMARGERKLADLLKEYTQIIRKSKAKCDRLKNENESLNAKYDIVIKASDEIKEENKTMSSTVNELTNSLKDAKEKYDKLNEANRELQNRLVKIKEDYTQIKFDHDNLLVENELLSCKTHEAINPVVKLDVATSCDDLIQEEQTSLHAELTEKVEVLTLDNQKLKNYLTDATTRGKVAIENNDFKNELAVDNQRLKNEVKKLKSENEHLATSVQKFNKGQYLQNELLMNTVMKNNKSGIGYNAFAQKKAITQYKPKQTHKPIKCFECGNEGHFAHNCKAKPPTPLPKHSRPFAFNAHYVLRKVANGKIKVNYKTGGSHWVIDSGCTQHMTGNPRMFTSLDENVDGQDKITFGDNSKGKVQGLGKVAISNDLSKSNVLLVAPLSFNLLSVGQLCDLGLQCLFTPSEVIVTKMDDESMVFKGFRYNNLYLVDFTSEDADLRTCLFTKASLGWLWHRRLAHVGMSTLKKVLKKDMVRGLKDVVFEKDKPCSACQAGKQVANTHPTKAFMSTSRPLELLHMDLFGPTNYVSVGGNLYCLVIVDDFSRYTWVFFLHDKSEVASIFKKFAKKAQNEFDCKIKKIRSDNGKEFDNTNIHEYCDEIGIKHEVSATYTPQQNGVVERKNRTLITLARTMIDEYNTPERFWAEAVNTACYASNRLFPHRLLAKTPYELLNGKKPDVSFFWVFGCKCYIYKKRHHLGKFQRRCDIGFLLGYSLKSKAYRVFNYATGVVEETYDVEFDETNGSQGALENLDDVGDEPLREAMKNMPIGAIKPKEDEEEVQIIDRPSSSNVPQDDEKDERHANEDTFVSHEQARVQAKDVDALGSSSQVVDRRNSSLLQAHPQNQIIGSPSQGVITRSHRHANFIEHHSFVSCVEPTCIDEALQDPNWVNAMHEELNNFTRNEVWTLEKPPQDARIIGTKWVFRNKQDDQGVIVRNKARLVAKGFSQVEGLDFGETFAPVARLEAIRILLAYASCYDIKLYQMDVKSAFLNGFINELVYVEQPPGFEDPRYPNHAYRLSKALYGLKQAPRAWYERLRDFLIEKGFKIGTVDTTLFTKKHNGDIFICQVYVDDIIFGSTNDYHCKEFGELMSKEFEMSMIGELTYFLGFQVKQMKDGNFLSQEKYTKDLLKRFNMEKCKPIKTPMPTNGHLDLDEGGNSVNQTLYRSMIGSLLYLTASRPDIMFSVCMCARFQSNPKKAHLRAVKRILRYLRHTTSVGLWYPKGATFDLIGYSDSDYAGCKIDRKSTSGGCHLLGRSLVSWTSKRQNSVALSTAEAEYIAAGACCTQILYMKQTLLDYGVVLEKVPLLCDNESAVKIANNPVQHSRTKHIDIRHHFLRDHVAKGDIILEGGLSNLVEITAN

SEQ ID NO: 10764 - protein, 678 aa, Zea mays
  Clone ID: TF_ZM4694.C3.o20.fg.pep
MSGGDGPPPVFDGDDFPYWKIRMEAYLEAIDIGVYKAATQGFPQPRDPTNLVGDEFNYEKWNAKAKNTLFRGLCKDVFNRVRNHKNAHDLWMDICALHEGTRSEREERYHIAMRKLNSFEMLANENANAMYSRLNILVEEVNGLGLTQISQPDVVRKILSVLPIDKYGHIVTVLHQMDLSVTTPTQILGKINAHEMYMHINKEESSSKRKDLALKANHERKGKAKIQVEEESSSDDDLDANIALMVRKTTKMLKKLNREGIKFDSRKKKFFSNKRKPISEMDCYNCGELGHLAHQCNKPKKNKFKGKKEDDSDDEKKEKNFFKRKDGKQKRFHKKKNGKAYIVGDWLTDIESSSGSSSSEEEDDEKVAAIAGDFSSPPPSPSSTSHLCLMARGERKVQNDINIDDDSDSDSDEEFASPSYDELADLLKEYTQIIRKSKAKCDRLKNENESLNAKELQNRLVKIKEDYTQIKFDHDNLLVENELLSCKTHEAINPVVKLDVATSCDDLIQEEQTSLHAELTEKVEVLTLDNQKLKNYLTDATTRGKVAIENNDFNNELAVDNQRLKNEVKKLKSENEHLATSVQKFNKGQYLQNELLMNTVMKNNKSGIGYNAFVQKKSITQYKPKQTHKPIKCFECGNEGHFAHNCKAKPPTPLPKHSRPFAFNAHYVLRKVANGKIK

SEQ ID NO: 10765 - protein, 2229 aa, Zea mays
  Clone ID: TF_ZM4875.C1.o2.fg.pep
MDLLPFLMVTIFLIGKFVCDEFNYEKWNAKAKNTLFRGLCIDVFNRILGKINAHEMYMHINDKEESSSKRKDLALKANHERKGKAKIQVEEESSSDDDLDANIALMVRKTTKMLKKLNREGIKFDSRKKKFFSNKRKPISEMDCYNCGELGHLAHQCNKPKKNKFKGKKEDDSDDEKKEKKFFKRKDGKQKRFHKKKNGKAYIVGDWLTDIESSSGSSSSEEENDEKVAAIAGDFSSPPPSPSSTSHLCLMARGERKVQNDINIADDSDSDSDEEFASPSYDELADLLKEYTQIIRKSKAKCDRLKNENESLNAKYDIVIKASDEIKEENKTMSSTVNELTNSLKDAKEKCDRVNEVNRELQNRLVKIKEDYTQIKFDHDNLLVENELLSCKTHEAINPVVKIDVATSCDDLRQEEQTSLHTELTEKVEVLTLDNQKLKNYLTDATTRGKVAIENNDFNNELAVDNQRLKNEVKKLKSENEHLATSVQKFNKGQYLQNELLMNTVMKNNKSGIGYNAFVQKKATTQYKPKQTHKPIKCFECGNEGHFAHNCKAKPPTHLPKHSRPFAFNAHYVLRKVANGKIKVNYKTGGSHWVIDSGCTQHMTGNPRMFTSLDENVDGQDKITFGDNSKGKVQGLGKVAISNDLSISNVLLVAPLSFNLLSVGQLCDLGLQCLFTPTEVIVTKMDDESMVFKGFRYNNLYLVDFTSEDVDLRTCLFTKASLGWLWHRRLAHVGMSTLKKVLKKDMVRGLKDVVFEKDKPCSACQAGKQVANTHPTKAFMSTSRPLELLHMDLFGPTNYVSVGGNLYCLVIVDDFSRYTWVFFLHDKSEVASIFKKFAKKAQNEFDCKIKKIRSDNGKEFDNTNIHEYCDEIGIKHEVSATYTPQQNGVVERKNRTLITLARTMIDEYNTPERLFPHRLLAKTPYELLNGKKPDVSFFRVFGCKCYIYKKRHHLGKFQRRCDIGFLLGYSLKSKAYRVFNHATGMVEETYDVEFDETNGTQGALENLDDVGDEPPREAMKNMPIGAIKPKEDEEEVQIIDRPSSSNVPQDDEKDERHANEQARVQAEDVDAPGSSSQVVDRRNSSLLQAHPQNQIIGSPSQGVITRSHRHASFIEHHSFVSCVEPTCIDEVLQDPDWVNAMHEELNNFTRNEVWTLEKPPQDARIIGTKWVFRNKQDDQGVIVRNKARLVAKGFSQVEGLDFGETFAPVARLEAICILLAYASCYDIKLYQMDVKSAFLNGFINELVYVEQPPGFEDPRYPNHAYRLSKALYGLKQAPRAWYERLRDFLIEKGFKIGTVDTTLFTKKHNGDIFICQVYVDDIIFGSTNDYHCKEFGELMSKEFEMSMIGELTYFLGFQVKQMKDGNFLSQEKYTKDLLKRFNMEKCKPIKTPMPTNGHLDLDEGGNPVNQTLYRSMIGILLYLTASRPDIMFSVCMCARFQSNPKKAHLRAVKRILRYLRHTTSVGLWYPKGATFDLIGYSDSDYAGCKIDRKSTSGGCHLLGRSLVSWTSKKQTSVALSTAEAEYIARRHQFRMSRTKNVSAPGGGDDEDPRRPFRQVKGKTVYLEQQEGRKKQRTDRAARAAAAAAAAAAQAELGDQPQTPSDQIAYRVRRLASRPRSSTHTSASTPPPTLPAPVTPVAPSTTTAIPATSTTPASTAPPPAPATAPPIPPPHFRERDETEVQPLAADPRLFDLQRATAARVRRFRYVPVESWLPAKRDPVAGDLFSTRIQESFFRAQMSAQIALRVHRLLDLLAFLLTVGADSEAHLTYLPGLLTLLTTSGRYVEEWVRVFYASVWIDPDHHWMRFCFEREDVTITASQIRQLFGFPESTTRLHSLCYGTSDPPRRPHGGVAPGTAHVAALFRPPFSDGSRRSPADFTTAAKYLYELIRRTLLPRMGYREATTHIQLWLLGALVSHSEFDVVDFLICEIEDTVLDRIRARRQLPYAHYLCHIFAQLIQPPRFQGTLEASRLVFGFYRPAPETPVPASAPVFDSQAEDAALHQFDTQATAVDDDDDDDFGVPPPPPMPPHSHDHEAGSSSAAPAAPSAMDPALASILQSITQQQAHLAVEQARLSERMLSMFQNMQDRQDALQQQLLQDRAESRAFMALMLQQSGVSVPPVQSPPPPPLHAPVVPSILSGPPVGPSPLRPVTLAFTSPVLSSVCPQPPVPPASAVTTTVVAVSVTSSVPVAPAARPQSESVLALASTTDPGSETDSDPPPAFALLPRP

SEQ ID NO: 10766 - protein, 195 aa, Zea mays
  unsure (1)..(195): unsure at all Xaa locations
  Clone ID: TF_LIB5074-003-R1-XP1-D9.pep
MDSYQAPAAGAGGRGCYNCGDSSHRAAECPTKGTPTCYNCGEKGHVSRECTSPQAEKTCYRCGGTGHISRECTKDGGAQMGGRGGGSQECYKCGQVGHIARNCSQGGGYGGAAGGYGGGRGGYGGGAGGYGGARQTTCYSCGGFGHMSRDCTQGQKCYNCGEVGHLSRDCPQETSXERVCYRCKQPGHVQSACPN

SEQ ID NO: 10767 - protein, 238 aa, Zea mays
  Clone ID: TF_LIB4759-029-Q1-K1-E9.pep
FDGPLPIPGEHPYRPWCSTRRRTRVPLRAQAVALESVAWGINLIASLDVEKKARAKDTGSKGGEGHSSANMVQKDHNKGKGKPKSNKPNKTTNFKKKKNKAELTCFACGEAGHFAKDCPDRADRRGKKGNVNTVIASNEEDKGYGNLPFIFSVFQSPSWWLDTGANVHVPSHINLFSSYQGARDSSVLMGNGSHASVHGTGTVDLKFTSGKIVQLKNVHHVPSIHKNLVNGTLLCREG

SEQ ID NO: 10768 - protein, 1278 aa, Zea mays
  unsure (1)..(1278): unsure at all Xaa locations
  Clone ID: TF_ZmC13579_1.pep
MAAFADALKPEKFNGMHFKRWQVKATLWLTAMNVFHVSKGRPEGPLTPEQEKEYDHANTMFTGAVLSALVDRLVDANMQYTDGKQLWDALTTKYGASDAGSDLYIMESFHDYKMVDNRSIVEQAHEIQCIAKELDHLKIVLPDRFVAGCIIAKLPSTWRNFATALKHKRQEISVENLIASLDVEEKARAKDTGSKGGEGHSSANMVQKNHNKGKGKPKSNKPNKTTNFKKKKNKAELTCFACGEAGHFAKDCPDRADRRGKKGNVNTVVASNEEDKGYGNLPFIFSVFQSPRWWLEEYRDVRMGAVHVHDAAMAHILVFESPAASGRHICAQSISHWSDFAAKVAELYPEYKVPKFPKDTQPGLVRQGAEEGSKKLVALGLHFSXSGEDHQGRCGGPQEQRLHFVASRPTAAIXWSSMPVEFRFPSGKFCKTTDFLLQGSKCHSCVQSKQPRKPHKAAEERHLAPLELIHSDLCEMNGVLTKGGKRYFMTLIDDASRFCYVYLLKTKDEALDYFKIYKAEVENQLERKIKRLRSDRGGEFFPKVFDDFCAEHGIIHERTPPYSPESNGIAERKNRTLTDLVNAMLDTCGLSKAWWGEAVLTSCHVLNRIPMGKEEKTPYEKWVGRKPSLSYLRTWGCMAKVNVPINKKRKLGPRTVDCVFLGYASCSIAYRFLVVKSEVPDVYVDTIMESRDATFFEHIFPMKDIHSNSRYSSEIIPEHNTPIESFEQPHEIVLEEDDNDAPKRSKRQRVEKSFGNDFIVYLVDDTPTTIAEAFASPDADDWKEAVHNEMDSILSNGTWEVTDRPYGCKPVGCKWVFKKKLKPDGTIEKYKARLVAKGYTQKEGEDFFDTYSPVARMTTIRVLLSLAASYGLLVHQMDVKTAFLNGELDEEIYMEQPDGFVVKGQESKVCKLLKSLYGLKQAPKQWHEKFDTTLTSAGFAINEADRCVYYRCGGGEGVILCLYVDDILIFGTNIDVINEVKSFLSKSFDMKDLGEADVILNIKLIKADGGITLSQSHYVEKVLKRFGFSECKPSPTPYDPSVTLRKNKRIGLDQLRYSQIVGSLMYLAGATRPDISFAVSKLSRFMSNPGTDHWHALERVMRYLQGTMSYGIHYSGQHAVLEGYSDSNWISDADELYATSGYVFTIGGGAVSWRSCKQTILTRSTMEAELAALDTATVEAEWLRELLMDLPVVEKPIPAILMNCDNQTVIAKVTSSKDNGKSSRHVKRRLKSVRKLRNSGVISVTYISTDKNLADPFTKGLPRNVIEIASREMGMRPE

SEQ ID NO: 10769 - protein, 80 aa, Zea mays
  Clone ID: TF_ZmC13579_19.pep
MVQKNHNKGKGKPKSNKPNKTTNFKKKKNKAELTCFACGEAGHFAKDCPDRADRRGKKGNVNTVIASNEEDKGAPGILPC

SEQ ID NO: 10770 - protein, 1188 aa, Zea mays
  Clone ID: TF_ZmC13579_2.pep
MAAFADALKPEKFNGMHFKRWQVKATLWLTAMNVFHVSKGRPEGPLTPEQEKEYDHANTMFTGAVLSALVDRLVDANMQYTDGKELWDALTTKYGASDAGSDLYIMESFHDYKMVDNRSIVEQAHEIQCIAKELDHLKIVLPDRFVAGCIIAKLPSTWRNFATALKHKRQEISVENMIASLDVEEKARAKDTGSKGGEGHSSANMVQKNHNKGKGKPKSNKPNKTTNFKNKKNKAELTCFACGEAGHFAKDCPDRADRRGKKGNVNTVVASNEEDKGYDNLPFIFSVFQSPSWWLDTGANVHGARDSSVLMGNGSHASVHGTGTVDLKFTSGKIVQLKNVHHVPSIHKNLVSGTLLCRDGFKSKQPRKPHKAAEERHLAPLELIHSDLCEMNGVLTKGGKRYFMTLIDDASRFCYVYLLKTKDEALDYFKIYKAEVENQLERKIKRLRSDRGGEFFPKVFDDFCAEHGIIHERTPPYSPESNGIAERKNRTLTDLVNAMLDTCGLSKAWWGEAVLTSCHVLNRIPMGKEEKTPYEKWVGRKPSLSYLRTWGCMAKVNVPINKKRKLGPRTVDCVFLGYASCSIAYRFLVVKSEVPDVYVDTIMESRDATFFEHIFPMKDIHSNSRYSSEIIPEHNTPIESFEQPHEIVLEEDDNDAPKRSKRQRVEKSFGNDFIVYLVDDTPTTIAEAFASPDADDWKEAVHNEMDSILSNGTWEVTDRPYGCKPVGCKWVFKKKLKSDGTIEKYKARLVAKGYTQKEGEDFFDTYSPVARMTTIRVLLSLAASYGLLVHQMDVKTAFLNGELDEEIYMEQPDGFVVKGQESKVCKLLKSLYGLKQAPKQWHEKFDTTLTSAGFAINEADRCVYYRCGGGEGVILCLYVDDILMFGTNIDVINEVKSFLSKSFDMKDLGEADVILNIKLIKADGGITLSQSHYVEKVLKRFGFSECKPSPTPYDPKNKRIGLDQLIYSQIVGSLMYLAGATRPDISFAVSKLSRFMSNPGTDHWHALERVMRYLQGTMSYGIHYSGQHAVLEGYSDSNWISDADELYATSGYVFTIGGGAVSWRSCKQTILTRSTMEAELAALDTATVEAEWLRELLMDLPVVEKPIPAILMNCDNQTVIAKVTSSKDNGKSSRHVKRRLKSVRKLRNSGVISVTYISTDKNLADPFTKGLPRNVIEIASREMGMRPE

SEQ ID NO: 10771 - protein, 327 aa, Zea mays
  unsure (1)..(327): unsure at all Xaa locations
  Clone ID: TF_ZmC13579_4.pep
RVADDDSVGVLRRHRYTDGKQLWDALTTKYGASDAGSDLYIMESFHDYKMVDNRSIVEQAHEIQCIAKELDHLKIVLPDRFVAGCIIAKLPSTWRNFATALKHKRQEISVENLIASLDVEEKARAKDTGSKGGEGHSSANMVQKNHNKGKGKPKSNKPNKTTNFKKKKNKAELTCFACGEAGHFAKDCPDRADRRGKKGNVNTVVASNEEDKGXARDSSVLMGNGSHASVHGTGTVDLKFTSGKIVQLKNVHHVPSIHKNLVSGTLLCRDGFKVVLESNKLVVSKSGQFIGKGYDCGGLFRFSLLDFNNKSVNHICAKKKNLAGIWH

SEQ ID NO: 10772 - protein, 400 aa, Zea mays
  unsure (1)..(400): unsure at all Xaa locations
  Clone ID: TF_ZmC13579_7.pep
MAAFADALKPEKFNGMHFKRWQVKAMLWLTAMNVFHVSKGRPEGPLTPEQEKEYDHANTMFTGVVLSALVDRLVDANMQYTDGKELWDALTTKYGASDAGSDLYIMESFHDYKMVDNRSIVEQAHEIQCIAKELDHLKIVLPDXFVAGCIIAKLPSTWRNFATALKHKRQEISVENLIASLDVEEKARAKDTGSKGGEDNSSANMVQRNHNKGKGKPKSNKPNKTTNFKKKKNKAELTCFACGEAGHFAKDCPDRADRRGKKGNVNTVVASNEEDKGXARDSSVLMGNGSHASVHGTGTVDLKFTSGKIVQLKNVHHVPSIHKNLISGTLLCRDGFKVVLESNKLVVSKSGQFIGKGYDCGGLFRFSLLDFNNKSVNHICAKKKKKRGPWHSRLCHINFG

SEQ ID NO: 10773 - protein, 698 aa, Zea mays
  unsure (1)..(698): unsure at all Xaa locations
  Clone ID: TF_ZM4584.C2.o5.fg.pep
MESFHDYKMADNHSIVEQAHEIQCIAKELDHLKIVLPDRFVAGCIIAKLPSTWRNFATSLKHKRQEISVENMIVSLDVEEKARAKDTGSKGGEGHSSANMVQRNHNNGKRKPKSNKPNKTTIFKKKKNKAELTCFACGEAGHFAKDCPDRADRRGKKGNVNTVVASNEEDKGYGNLPFIFSVFQLHSWWLDTGANVHVCSDINLFSSYQGARDSSVLMGNGLHASVHGTSTVDLKFTSRKIVQLKNVHHVPSIHKNLVSGTLLCRDGFXEHGIIHERTPPYSPESNGIAERKNRXCMAKVNVPINKKRKLGPRTMDCVFLGYASCSIAYRFLVVKSEVPDVYVDTIMESCDATFFEHIFPMKDIHSNSRYSSEITPEHSTSVESSEQPHEIVLEKDDNDAPKRSKIQRVEKSFGDDFIVYLVDDTPTTIVEAFASLDADDWKEAVHNEMDSILSNGFAINEADRCVYYRCGGGEGVILCLYVDDILIFGTNVDVINEVKSFLSKSFDMKDLGEADVILNIKLIKADVSKLSRFMSNPRTDHWHALERVMRYLQDELYATSGYVFTIGGGAVSWRSCKQTILTRSTMQVELAALDTATVEAEWLRELLMDLSVVEKPIPAILMNCDNQTVIVKVTSSKDNGKSSRHVKRRSKSVRKLRNSRVISVTYISTDKNLADPFTKGLPRNVIEIASRDMSMRPI

SEQ ID NO: 10774 - protein, 748 aa, Zea mays
  Clone ID: TF_ZM5107.C1.o13.fg.pep
MAAFADALKPEKFNGMHFKRWQVKATLWLTAMNVFHVSKGRPEGPLTPEQEKEYDHANTMFTGAVLSALVDRLVDANMQYTDGKQLWDALTTKYGASDAGSDLYIMESFHDYKMVDNRSIVEQAHEIQCIAKELDHLKIVLPARFVAGCIIAKLPSTWRNFATALKHKRQEISVENLIASLDVEEKARAKDTGSKGGEGHSSANMVQKNHNKGKGKPKSNKPNKTTNFKKKKNKAELTCFACGEAGHFAKDCPDRADRRDKKGNVNTVVASNEEDKGYGNLPFIFSVFQSPSWWLDTGANVHVCSDINLFSSHQGARDSSVLMGNGSHASVHGTGTVDLKFTSGKIVQLKNVHHVPSIHKNLVSGTLLCRDGFKVVLESNKLVVSKSGQFIGKGYDCGGLFRFSLLDFNNKSVNHICANVDDLASIWHSRLCHINFGSMSRLATMSLIPNITIVKGSKCHSCVQSKQPRKPHKAAEERHLAPLELIHYDLCEMNGVLTKGGKRYFMTLIDDASRFCYVYLLKTKDEALDYFKIYKAEVENQLERKIKRLRSDRGGEFFPKVFDDFCAEHGIIHERTPPYSPESNGIAERKNRTLTDLVNAMLDTCGLSKAWWGEAVLTSCHVLNRIPMGKEEKTPYEKWVGRKPSLSYLRTWGCMAKVNVPINKKRKLGPRTVDCVFLGYASCSIAYRFLVVKSEVPDVYVDTIMESRDATFFEHIFPMKDIHSNCWGPSASEGPQKHDLTMFLEYNV

SEQ ID NO: 10775 - protein, 456 aa, Zea mays
  Clone ID: TF_ZM4454.C3.o3.fg.pep
MARRRSQKNKKTKENKEEEEENERWRPNDESTSPKGLSSHFDSHICSVANENDSGSTNEDDEDERSFMQLYAHLSLEDKAVMLKLLKRAREQSEARQMLEDVLSMKMLHFDELTKEHEELKCSHVDLVQRNALLKDQVEKVKDDNLAFQEKYDMLLYSHENLMDDHIILNIAHEVVIENLKSQQPHSCTCIQIETILPCANACCPSTSKSSFELEFAGTKDDTYQKLKEENERLKISLTQLKGKCIAQPSQDNHDHMVKKLETGTTAACTKSLEENVKDLRIVKRKEQKKKINASDKSVNHASMQGNIQGNNQVTLHTKRSKKCSECFEKGHSIRSCPYIKNDLITNKDDKLCFKCSKKGHLIKSCPYLKQKGIVLEKKILTNHVASKKQEKKKSSKLEERLCYICRKKGHQCKDCPIGNYPISSLSIISHVTRQPKIATCARKVMRLPNANTKDS

SEQ ID NO: 10776 - protein, 131 aa, Zea mays
  Clone ID: TF_ZmC2309_4.pep
LIKLSHKDLVETVMVTVIMTASVDLVMNVVVTMVVGVHREVVVVVVVVVTASSVGNLVILLESAHLGMVGEGTDMVGEMTGMVAVAVAVAVVMVLTVVVTDTLAVAEMAAAMGVAIATAVTDQVLTDGLSS

SEQ ID NO: 10777 - protein, 115 aa, Zea mays
  unsure (1)..(115): unsure at all Xaa locations
  Clone ID: TF_ZmC218_17.pep
VGLATPIGGGGYGSRGGGGSGGGGRSYGGSWGGGRRSGGGGGPGACYKCGEPGHMARDCPSADGGGYGGGGYGGGGYGGGGGGGGGGRFGGGXXGGDRSCYNCGEAGHIARDCPT

SEQ ID NO: 10778 - protein, 247 aa, Zea mays
  unsure (1)..(247): unsure at all Xaa locations
  Clone ID: TF_LIB4765-074-R1-K2-E9.pep
VPRGRPGPPGSSEPSKSKPSPRRIAAAGSASLDPDPGDMPRNDDRYGNTRLYVGRLSPRTRSRDLEYLFSKYGRFXSVFYTTMEVWWKGALDGIGGHSSXIREVELKRDYAFIEFSDPRDADDAQYNLDGRDVDGSRIIVEFAKGVPRGSGGSRDYNGRGPPPGTGRCFNCGVDGHWARDCQAGDWKNKCYRCGERXHIERNCQNSPRNLRRERSYSRSPSPRRGRGRSRSYSRSRSYSRSRSPSIS

SEQ ID NO: 10779 - protein, 574 aa, Zea mays
  Clone ID: TF_ZmC18109_2.pep
MESPSDFGLSKDSTQKHYKMIKLGLRNLKRSLPEETLSKLSTMPYSLSYPHSARSFVMDPLDLLPDFLMLDLGMSTTSDVTKCKECGVLTSQNNTINETADEQTFKTQKDAQPNQQTSDLGTCCCCEYYGIPCRQISTNESKTTKQKNQILFYGINRQMSPQEQLIADSLIPNALSVDELQSIPKRKHHKDAQPQEETQECYIDGWTITCTQFQPHRRIRSKKQKGKHGKSQEITSRKACYQCGREGHYFRNCPEKSSLSDTPEMKQPQSPDMEYEQKCTETSTNNVKTTPPCNLSSRTCFGCGDIGHLVNGCPKKDVEINKVQKKRQRPQTHASTKNKQRKESTGRISYAVTGTIPYDDAVIFGTLVIHTTIATVLYDPRTTHSLISAQFATKYGIFKCPLRSRKTISTPERKVLANYICPKMMNPNGNEVNGDNDNIPTLTTMNEKNESPRYPMNGMKNNKRNRKMFRYMISSPQPQAKATKHMDTQTEGSSQAQLHEIQTPNQPSPPIGQAKLTRKELKARGACYYCKNEGHLIRKCPKKRLDRLEKKAAKQDPNNNPEDQPVISTTMKIA

SEQ ID NO: 10780 - protein, 1568 aa, Zea mays
  unsure (1)..(1568): unsure at all Xaa locations
  Clone ID: TF_ZM4931.C2.o5.fg.pep
MSDGDGPPPVFYGDDFPYWKIRMEAYLEAIDIGVYKAATQGFPEPRDPTNLVGEEFNYEKWNAKAKNTLFRGICKDVFNRVRNHKNVQDLWMDICALHEGTRSEREDRYHIDMRKLNSFEMLANENVNAMYSCLNILVEEVNGLGLTQISQPDVVRKILSVLPIDKYGHIVTMLHQMDLSVTTPTPILGKINAHEIYMHINDKDESSSKRKDLALKANQERKGKAKVQIEEESSSDDDLDANIALMVRKTTKMLKKLNREGIKFDSRKKKFFSSKRKPISEMDCYNCGELGHLAHQCNKPKKNKLKGKKEDDSDDEKKEKRFFKSKDGKHKRFHKKKNGKAYIVGDWLTDIESSSGSSSSKEENDEKVASIARDFSSPPPSPSSTSHLCLMARGERKVQNENDLTDDSDSDDEFASPSYDELADLLKEYTQIVRKSKAKCDKLKIENESLNAKYDIVMKANAKDKCDKLNEANRELKDRLVKIKEDYTKIKFDHDNHLVENELLSCNTHEAINPVVNIDVATSCDDLSQGDQTSLHDELTEKVEVLTLDNQKLKRYLTDATTRGTVAIENNDFNNELAVDNERLKNEVKKLKTENAHLATSVQKFNKGQYLQNELLMNTVMKNNKSDIGYNSLVQKKATTQYKPKQTYKPIKCFECGKEGHFAHNCKAKPPTPLPKHSRPFAFNAHYVLRKVANGKVKVTFRGNPRMFTSLDENVDGQDKITFGDNSKGKVQGLGKVAISNDLSISNVLLVAPLSFNLLSVGHLCDLRLQCLFTPTEVIVSKMDDESMVFKGFRYNNLYLVDFTSEDAYLRICLFTKASLGWLWHRRLAHVGMSTLKKVLKKDMVRGLKDVVFEKDKPCSACQDGKQVANIHPTKAFMSTSRPLELLHMDLFGPTNYVSACGNLYCLVIVDDFSRYTWVFFLHNKSEVASIFKKFAKKAQNEFDCKIKKIRSDNGKEFDNTNIHEYCDEIGIKHEVSATYTPQQNGVVERKNRTFITLARTMIDEYNTPERFWAEAVNTAYVSFWVFGCKCYIYKKRHHLGKFQRCCDIGFLLCYSSKSKAYQVFNHATGVVEETYDVEFNETNGSQGALENLDDVGDEPLREAMKNMPIVAIKPKEDEEEVQNIDRPSSSSVPQDDEKDERHANEDTFVSHEQARVQAKDVDAPGSSSQVVDRRNSSLLHANPKDQIIGSPSQGDPDSVNAMHKELNNFTHNQVWTLEKPPQDARIIGAKWVFRNKQDDQGVMVRNKARLVAKGFSQVEGLDFGETFAPVARLEDICILLAYASCYDIKLYQMDVKSAFLNGFKNELVYVEQPPGFEDPRYPNHAYRLSKALYGLKQAPRAWYERLCDFLIEKGFKIGTVDTTLFTKKHNGDIFICQVYVDDIIFGSTNDYHCKEFGELMSKEFEMSMIGELTYFLGFQVKQMKDGNFLSQEKYTKDVFKRFNMEKCKPIKTPMPTNGHLDLDEGGNPVNQTLYRSMIGSLLYLTVSRPDIMFSVCMCARFQSNPKKAHLRAVKRIIRYLKHTPSIGLWYPKGATFDLIGYSDSDYTGCKIDRKSTSGXCHLLGRSL

SEQ ID NO: 10781 - protein, 335 aa, Zea mays
  Clone ID: TF_ZmC1373_17.pep
GRAPKSFSSAPPQPGAPLDRDPGDMPRYDDRHGNTRLYVGRLAPRTRSRDLEYLFSKYGRIREVELKRDYAFIEFSDPRDADDAQYNLDGREVDGSRIIVEFAKGVPRGSGGSREYMGRGPPPGTGRCFNCGMDGHWARDCKAGDWKNKCYRCGESGHIERNCQNSPRNLRREKSYSRSPSPRGGRGRSRSYSRSRSYSRSRSPSGSPRGGRRERDERRSRSLSYSRSASPRRSVSPAKEKERSRTPNGSRSPSPRAEVSPPLKDNGARNGSDHEGSPGGGENSKRSRSPSDGYRSPVANGRSPSPRDDRSPSPKGNNEDDERPGSPRGSQSPLN

SEQ ID NO: 10782 - protein, 372 aa, Zea mays
  unsure (1)..(372): unsure at all Xaa locations
  Clone ID: TF_ZmC1373_27.pep
SRPAGASWIQSQSNPISSPLRSSLTLSPNPSPPRRHSRARLPDRDPGDMPRYDDRHGNTRLYVGRLAPRTRSRDLEYLFSKYGRIREVELKRDYAFIEFSDPRDADDAQYNLDGREVDGSRIIVEFAKGVPRGSGGSREYMGRGPPPGTGRCFNCGMDGHWARDCKAGDWKNKCYRCGESGHIERNCQNSPRNLRREKSYSRSPSPRGGRGRSRSYSRSRSYSRSRSPSGSPRGGRRERDERRSRSLSYSRSASPRRSVSPAKEKERSRTPNGSRRXPRSPSPRAEVSPPLKDNGARNGSDHEGSPGGGENSKRSRSPSDGYRSPVANGRSPSPRDDRSPSPKGNDRSPSPKGTNEDDERRGSPRGSQSPLN

SEQ ID NO: 10783 - protein, 213 aa, Zea mays
  Clone ID: TF_ZmC1373_9.pep
LGTSRPAGTKSFSSAPPQPGAPLDRDPGDMPRYDDRHGNTRLYVGRLAPRTRSRDLEYLFSKYGRIREVELKRDYAFIQEFSDPRDADDAQYNLDGREVDGSRIIVEFAKGVPRGSGGSREYMGRGPPPGTGRCFNCGMDGHWARDCKAGDWKNKCYRCGESGHIERNCQNSPRNLRREKSYSRSPSPRGGRGRSRSYSRSRSYSRSRSPSGS

SEQ ID NO: 10784 - protein, 1079 aa, Zea mays
  Clone ID: TF_ZM4884.C5.o1.fg.pep
MGRSFSSTAAPVRPAALAAPPLLLFLLLGLLGAAAANVGDSCSTSADCGAGQWCFDCEPQLSGSHCVRSAATNPFQLINNSLPFNKYAYLTTHNAYAIVGEPSHTGIPRVTFDNQEDTNGVRALMLDTYDFKGDVWLCHSSGGKCNDFTAFEPALDTFKEIEAFLAANPSEIVTLILEDYVHAPNGLTNVFNASGLLKYWFPVSRMPPSGQDWPLVSDMVATNQRLLVFTSVSSKQSAEGIAYQWNFMVENNYGDDGMDAGKCSNRAESAPLNDNTKSLVLMNYFPSLPVKFTACLQHSQSLVDMVSTCYGAAGNRWANFVAVDYYKRSDGGGAFQATDLLNGRLLCGCQDIRACSQAFPKSTYNGIEYVVPEQPHKQQLNKKNPTWTLIKEKRGIRLSFREETTSARALMSRDVKTVYSPPLANVLDPTSGIGAEDSIVCGLIIPEWNKMASNNNVHIGKPPHFDRNNYNYWKIRMSMHLRAMGGKIWPIVKDRFVVLKEDEPSISDNENILTNDQAMNVFYDALDINEFNRIKNLTTAHEIWIKLMEIHEGTTIVKSAKLYVCKGKFEQFIMKEDESVSDMFNRLNEIVNELKGLGFNVLDVDFTHKFLRSLPEKYETIVTMLVRSDLSTTSPTEVLGEILTQDIFKKSQADAISLAKKVNNESIALKAKASKAIEKEDSDDEKNESESDGDMALFVKKFNKFMKMKRGQSRRSQTSRRNAFNDRKCFECGEPGHIAMNCPNKKKKGKDEDDKKKKKFYNKKKDGKAYLVEWDSDDSSDDDDDDTSSKLNAGIAIKEAPSLFSSPHCLMANGDAKVKIFTDLNGINDDDDVDDDGYSYDDLVRMLGEVNDYMHKEKEKFKTLKELYINLQVSFEELKTSHNDLKENCEKLAEAQNSSIVHEVVVVTEDVGVTCDLLDSPTSEPLPTNSICDKCKISLINDNIALDESQIIIENEVLVDRVNALTYDLEKAYGGKAKLDFILGSQRCSLNREGLGYVPKKGKNAFVKQKTLFVKECDKVCHKCHKKGHIKKNCPKLKNVSSTCFEHCYVLSHNAKGVHAKFVGTSIVGNKKKAIWVPM

SEQ ID NO: 10785 - protein, 124 aa, Zea mays
  unsure (1)..(124): unsure at all Xaa locations
  Clone ID: TF_jC-zmX700430855a1.pep
LELGLETEQKPEAGYWNVVSARAXDTCTSAPARLHCHTDGSSLCPGCYARAHSAGXRHARIXIHEGCEHSHGCGTWHADXAALCAACDVDIHXVNPLARRHERLPVAPLFCALADTPQPFPSPD

SEQ ID NO: 10786 - protein, 174 aa, Zea mays
  Clone ID: TF_ZmC17423_4.pep
PGVELHKYWGVGGRRCGSCEGAPAAVHCRTCVGGSFLCTTCDARPAHARLGHERVWMCEVCELAPAAVTCKADAAVVPEAFGGSGSGGGSFELDFTRPKPQAYMPYTGTPQSHSVPSADVEVVPERGDLAAVRPVPLMGESREARLMRYREKRKNRRFEKTIRYASRKAYAETR

SEQ ID NO: 10787 - protein, 113 aa, Zea mays
  Clone ID: TF_LIB143-024-Q1-E1-F4.pep
HAQNNWNKVQPKRFSTVPGWNQPRRLSSRSIGGLIGTYWGLGGPLCWACSGSPAAAHCRTCPGGAYLCPGCDTGHARAVHERVWVCEVCECAPAAVTCRADAAALCAACDADI

SEQ ID NO: 10788 - protein, 98 aa, Zea mays
  Clone ID: TF_uC-zmflteosinte79f03b1.pep
MGEGDDDRRDELLGAGRDHEPERADAEEAKKPAPGEAEACAGAGTEAATCDYCGTAAAAVYCRADSARLCLPCDRLVHGANGVCSRHARAPLCAGCCA

SEQ ID NO: 10789 - protein, 320 aa, Zea mays
  Clone ID: TF_ZmC11847_1.pep
MEGDEKSAGGAPAYWGLGARPCDACGAEAARLYCRADAAFLCAGCDARAHGAGSRHARVWLCEVCEHAPAAVTCRADAAALCASCDADIHSANPLARRHERLHVAPFFGALADAPKPFASAAPPKATDDDGSNEDEAASWLLPEPDHGQKEGATTEVFFADSDPYLDLDFARSMDDIKTIGVQQSGSPELDLAGTKLFYSDHSVNHSVSSSEAAVVPDAASGMAPMVAVVSRGLEREARLMRYREKRKSRRFEKTIRYASRKAYAETRPRIKGRFAKRTPGAGEDTLEEHEEMYSSAAAAVAALMAPGGADADYGVVPTY

SEQ ID NO: 10790 - protein, 116 aa, Zea mays
  Clone ID: TF_ZmC153_1.pep
MGHEGSCRCELCGAPAAVHCAADEAFLCAACDAKVHGANFLASRHRRTRLRLAAAADPPPDDEAGYGSAASSCVSTADSAPRPRRGARAPARSVRPEGVLEGWGQRMGLGAGGRPR

SEQ ID NO: 10791 - protein, 212 aa, Zea mays
  Clone ID: TF_jC-zmshLIB3587P024c06b1.pep
LQPVHECDAYFFCLEDRALLCRSCDVAVHTANSFVSAHRRFLLTGVQVGQELEPDDLSLEQREAEASSPPPAKSEPTPPLYSESDFGWAAGAGAGATGSLTDWLAVEEEFDSPAPRLAEVAPRATPKRTPRAPAFGAGQGRIAGGVMDWPLGEFFRGVSDFNGGFSFGESGNSKADSGKLGDSAGGSPYYRSSEEERDANELFGQVPEIQWS

SEQ ID NO: 10792 - protein, 399 aa, Zea mays
  Clone ID: TF_ZmC8680_1.pep
MSSSKHAAGAVGGKAARACDSCLRRRARWYCAADDAFLCQGCDASVHSANPLARRHERLRLRPTDPHSTTLEAGVATATWKKRQQQVAPAWSKRKARTRRPHVKSVGELLSRKLVVVPEVSPIESSEERKAEEEEEEEEGQLLYCVPTFDRALAELCSPPPPVDDPTASSCCRDDVDGAVENNTKAPPVVVAESPVQQLPDSFAGFGPTDAELREFAADMEALLGQGLDDGNELDRSFYMESLGLMAQQAEDVGRIKMEPNGIVSSRSRGEGAPGFGPTEMKPEASSAAAEVLDTDFNCCSPTVMMDNEDEDSFEQKASASNAAAAAAGTQFLKRSLDLSLNYEAIIESWGSSPWTDGQRPSVQLDDFWPHAHLTVRLFPNSRCSSSSTDRLRALSTRA

SEQ ID NO: 10793 - protein, 134 aa, Zea mays
  Clone ID: TF_LIB4756-131-A1-K1-D8.pep
MELHKYWGVGGRRCGSCEGAPAAVHCRTCVGGSFLCTTCDARPAHARLGHERVWMCEVCELAPAAVTCKADAAVLCAACDSDIHDANPLARRHARVPVAPIGSEAAAAAVEAMLFGGWRGARGLRRQRQRRREL

SEQ ID NO: 10794 - protein, 364 aa, Zea mays
  Clone ID: TF_ZmC17423_1.pep
MELHKYWGVGGRRCGSCEGAPAAVHCRTCVGGSFLCTTCDARPAHARLGHERVWMCEVCELAPAAVTCKADAAVLCAACDSDIHDANPLARRHARVPVAPIGSEAAAAAVEAMLFGTGEAAASEADEQHAAAEHAHAHAHALNLNVEAKDMKLDYLFSELDPYLSVEIPRFQHADSVVPNGAGAAVELDFTCGIGVKHSSYSSYTATSLAHSGSSSEVGVVPEAFGGSGSGGGSFELDFTRPKPQAYMPYTGTPQSHSVPSADVEVVPERGDLAAVRPVPLMGESREARLMRYREKRKNRRFEKTIRYASRKAYAETRPRIKGRFAKRADHDGDADADDAEAEAEAAVPMSYVLDFGYGVVPSF

SEQ ID NO: 10795 - protein, 267 aa, Zea mays
  Clone ID: TF_ZmC460_11.pep
PIGGINGSSRTRLNYYRGAVISREKLLRLEAALCARCDVEGDAANKLASKHQRLPLEALSAKLPRCDVCQEKAAFIFCVEDRALFCRDCDEPIHVPGTLSGNHQRYLATGIRVGLASASACSDACDAHDSDHHAPPKATIEPPHAAVSAAVQQVPSPPQFLPQGWAVDELLQFSDYESSDKLHKEPTLGFKELEWFADIDLFHEQAPKASRTLAEVPELFGYQAANDAAYYRPAKAAGGGGAGVRQSKKARIEVTDDEDYLIVPDLG

SEQ ID NO: 10796 - protein, 242 aa, Zea mays
  unsure (1)..(242): unsure at all Xaa locations
  Clone ID: TF_LIB4767-072-A1-K1-F10.pep
MIATTGGSSAKAAAVGGKAARACDGCLRRRARWYCAADDAFLCQGCDTSVHSANPLARRHERLRLCPASPLQTPPARSAAAATATNKRERHDEVAVPAWFGRKARTPRGGHAKSVGQVALSRRLVVPHAAGGDSDSPDERNGGEEEQLLYRVPILDPALAEFCSPPPLEDPAKPDPAAPLAQFCPVGGHFNFGPTDAELREFAADMEALLGHXLDDGNEEESSFYMETLGLLDQWKWATMPR

SEQ ID NO: 10797 - protein, 269 aa, Zea mays
  Clone ID: TF_ZmC26880_1.pep
MDTAAELELGLELEQKPAAGYWSVVGARPCDACAAEPARLHCRADGAFLCPGCDARAHGAGSRHARVWLCEVCEHAPAAVTCRADAAALCAACDADIHSANPLARRHERLPVAPLFGALADAPQPFPSPAPAQGEAVAEDYGSSEAEAASWLLPEPDNSHEDSAADTFFADSDAYLGADLDFARCMDGVKAIGVPVAPPELDIGAGSFCYPEHSMNHILSSSSEVAVVPDAQAAGLPVVVVVSRGEEREARLMRYREKRKNRRFDKTIR

SEQ ID NO: 10798 - protein, 147 aa, Zea mays
  Clone ID: TF_ZmC3809_1.pep
TSPDGYPAWCSAREGRPAGLEWGCIDDKRGLLRCEAHRAILCRECHVSVHTASDLTMRHARFLLTGVRLSAEPAAACPAPEDEEEEDDENSSGSFCCSAGDAAAHPPPLPSSAPATSHGSDSSSISEYLTKTLPGWHVEDFLVDEAA

SEQ ID NO: 10799 - protein, 348 aa, Zea mays
  unsure (1)..(348): unsure at all Xaa locations
  Clone ID: TF_ZmC460_16.pep
MPGASVTMSPSRAFTETRGRLEAAMAAVAAIWAARRWCERIRATRGWISVDRGSKATLPLTMPRRVLSRLQRIQHAARGKGASRRPAAARRPGGLSQWHGPSGANDLTPGRPRGASLPRCDVCQERPAFIFCVEDRALLCRDCDEPIHVPGTLSGNHQRYLATGIRVGFSSVCGASAEGLPPAPPKGSSKPAAVVSAPAAGTTTKTRTVKDALPQEVPSSPFLPPSGWAVEDLLELSDYESSDKXGPNHPKPLFFYSSLGLKELEWFEDIDLLLAWLPAITAMAGVLRKAGRRLVTLPSLFGTEAANGAAYYRPAKATATAGTGVRQSKKARTEVTDDEDHLIVPDLG

SEQ ID NO: 10800 - protein, 413 aa, Zea mays
  Clone ID: TF_ZmC9091_1.pep
MTSAGAATGAALGARTARSCDGCMRRRARWHCPADDAFLCQTCDVSVHSANPLARRHHRVRLPSASCSSPPRDPDAPTWLHGLKRRPRTPRSKPGGSKSNKHEATPSFIAAAASSAAVPDLEAEESGSGILGGNDDHHGFLQDDDEDLLYRVPVFDPMLAEFYNPVADEGEQKPACSLLMPSLAETSPEFASGGSAEADGLSVSFHVPDMELASFAADMESLLMGVDDDGFDCLGFLDEEKPQVNADLDAIVAPAPEPEDKKRKRPEMILKLNYEGVIASWVRDGGSPWFHGERPHLDCHELWSDDFTTGSRELLGGAVTPVTGGEREARVSRYREKRRTRLFAKKIRYEVRKLNAEKRPRMKGRFVKRATLPPLPRPPPPQQQQQQKQLPRAPPHVGMVLPPPPVSNGRLWF

SEQ ID NO: 10801 - protein, 224 aa, Zea mays
  unsure (1)..(224): unsure at all Xaa locations
  Clone ID: TF_ZmC323340_1.pep
SLRFRPPSITSKDRERLARQALHRAVGAGAKSYIYRRTGGRPADGSPPRRLPLRALRRARGRALRGGRGLPLRRLRRQGARRQLPRVAPPPHAPPPRGAGRVRVRVRGELLRVHGGRLGGAGAPGPRPRPRLRARRHGRRAVAGGGGARRDRRRRPRSRRGAAAAGGVRARAGGARGGGGQVHGARARAXGRGRHGRRGGGLGRVRLGRSQVQPATSLIFSRAR

SEQ ID NO: 10802 - protein, 282 aa, Zea mays
  Clone ID: TF_ZmC460_15.pep
RSSATRARARLPRWCAAPTRPRCARAATSRSTPPTSSRASTSASRSRRSPPSSRAAKSTTPALDFFPPLRVVSLCSPAGAHGRSVLVPWPSALSATSSLASAAFFSTAPWLSSASSSTTAPSPSLRGAPVFQARRGALSLQSSRSGVLVVLASALWPSPSRVLVSLLCPAPSSCAWLPARVSGHLQLAGRDPPEVFPMAGSLLNPSRGRVRSSKPQILPRRVRRLDLQPCVIDLCSPDVSPNIDLRAWIRRRVSLSGGRAHPARLLSSTMDGSHLGLFINSA

SEQ ID NO: 10803 - protein, 358 aa, Zea mays
  unsure (1)..(358): unsure at all Xaa locations
  Clone ID: TF_ZmC460_7.pep
MKIQCDACEGAAATVVCCADEAALCARCDVEIHAANKLASKHQRLPLEALSASLPRCDVCQVRTSPAHCACATRGTRQAGTSXNEATTPPRARSQEKAAFIFCVEDRALFCRDCDEPIHVPGTLSGNHQRYLATDIRVGFASASSACSDACDAHDDSDHHAPPKAAVSSAAQQVPSPPQFLPQGWAVDELLQFSDCESSDKARRXRKLRSMTNNLPACTHRLMHGLVCVCVLQLHKESPLGFKELEWFTDIDLFHEQTPKAGRRLAEEPELSGTQAANDAAYYRPAKATATAGAGVRQRSFLRWRRCRFFSDFSRLIFSAYYSSAIIFFFGGIRVRQGKISRIRGSKATEPLTTPEWG

SEQ ID NO: 10804 - protein, 498 aa, Zea mays
  Clone ID: TF_UC-ZMFLB73069A02_FLI.pep
MKSCGGGGADGQQCPCDYCGEAAAALHCRADAARLCVACDRHVHAANALSRKHVRAPLCAGCAARPAAARVSLGADPAFLCADCCEGCAAASAARVSVEGFSGCPSAAELAASWGLDLRRAAVAVGDDGDGGDDDDPFLSVLDYSVLGVGVADTDLRDLYVPCDPPRVPVPDAGARPLRGEALCDQLAEMARRDEADTSHAHPHSDLSPRTPRRTSAASSGRLPSGKMAPPAALPVPAHPPPAAPQEVPLPYTSLLMMASANCSDLIGGGDRVGDTDEQLLWDCAAPSVPPTQIWDFNLGRSRHHDEKSALEVGYGSNHGGFMIKSYSDMLKDISSGTTKDLEDIYDSRYCSTAEDIMSSNICQLSSKNVSTGSNKRKVRSCAASTMDGPTTSGNHNHVPASASGPGAALTREISFGDQTVSAPAAETERPAAVRIDSETLAQNRDSAMQRYREKKKNRRYEKHIRYESRKLRADTRKRVKGRFVKSTEALNAARYNG

SEQ ID NO: 10805 - protein, 503 aa, Zea mays
  Clone ID: TF_ZmC13160_1.pep
MKSCGGGGADGQQCPCDYCGEAAAALHCRADAARLCVACDRHVHAANALSRKHVRAPLCAGCAARPAAARVSPTPSPGGADPAFLCADCCEGCAAASAARVPVEGFSGCPSAAELAASWGLDLRRAAVAVGDDGDGGDDDDPFLSVLDYSVLGVGKADTDLCDLYVPCDPPRVPAPYAGARPLRGEALCDQLAEMARRDEADTSHAHPHSDLSPRTPRRTSAVSSGRLPSGKMAPPAALPVPAHPPPAAPQEVPLPYTSLLMMASANCSDLIGGADRVGDTDEQLLWDCAAPSVPPTQIWDFNLGRSRHHDEKSALEVGYGSNHGGFMIKSYSDMLKEISSGTTKDLEDIYESRYCSTAEDIMSSNICQLSSKNVSTGSNKRKVRSCAASTMDGPTTSGNHNHVPASASGPGAALTREISFGDQTVSAPAAETERPAAVRIDSETLAQNRDSAMQRYREKKKNRRYEKHIRYESRKLRADTRKRVKGRFVKSTEALNAARYNG

SEQ ID NO: 10806 - protein, 168 aa, Zea mays
  Clone ID: TF_ZmC460_17.pep
MHHSPPGLPSLAVHFFLHHSHLISGVILFVLASLVVVGWVLASWEYRPRGGAAMKIQCDACEGAAATVVCCADEAALCARCDVEIHAANKLASKHQRLPLEALSAKLPRCDVCQEKAAFIFCVEDRALFCRDCDEPIHVPGTLSGNQQRYLATGIRVAFAIASGCSDA

SEQ ID NO: 10807 - protein, 176 aa, Zea mays
  Clone ID: TF_LIB3591-076-Q6-K6-E12.pep
SSGKGAARDSAAAGQKHGTGTRCELCGGAAAVHCAADSAFLCLRCDAKVHGANFLASRHVRRRLVPRRAADPEASSAASSGSSCVSTADSAESAATAPAPCPSRTAGRRAPARARRPRAEAVLEGWAKRMGFAAGPARRRARAGAAGADRRVVDGAPAGRPAGGPLGGMGRVLLSS

SEQ ID NO: 10808 - protein, 226 aa, Zea mays
  Clone ID: TF_ZmC101_1.pep
MGAARDSTAAGQKRGTGTRCELCGGAAAVHCAADSAFLCLRCDAKVHGANFLASRHVRRRLVPRRAADPEASSAASSGSSCVSTADSAESAATAPAPCPSRTAGRRAPARARRPRAEAVLEGWAKRMGFAAGPARRRAAAAAAALRALGRGVAAARVPLRVGMAGALWSEVAAGCRGNGGEEASLLQRLEAAAHVPARLVLTAASWMARRPDARQEDHEEGWAECS

SEQ ID NO: 10809 - protein, 255 aa, Zea mays
  unsure (1)..(255): unsure at all Xaa locations
  Clone ID: TF_ZmC460_5.pep
MKIQCDACEGAAATVVCCADEAALCARCDVEIHAANKLASKHQRLPLEALSASLPRCDVCQEKAAFIFCVEDRALFCRDCDEPIHVPGTLSGNHQRYLATGIRVGFASASSACSDACDAHDDSDHHAPPXGRRRHRTAQQVPSPPQFLPQGWAVDELLQFSDCESSDKLHKESPLGFKELEWFTDIDLFHGQTPKAGRRLAEVPELSGTQAANGAAYYRPAKATATAGTGVRXXSKKARTEVTDDEDHLIVPDLG

SEQ ID NO: 10810 - protein, 407 aa, Zea mays
  Clone ID: TF_ZmC1299_1.pep
MGALCDFCGEHRSMVYCRSDAASLCLSCDRNVHSANALSRRHTRTLLCDRCASQPAMVRCLAENASLCQNCDWNGHIAGSSSAGHKRQTINCYSGCPSSAELSRIWSFVSDIPNVAPEPNCEQGISMMSISDSGVSNQDNAAGDSILLDIASATLVSDIGTCDKLLVGSSSGAGVNLLPLATGQTETAGSVDSTPDKVPYTPDKDMFSKDSIYEDFCVDDADLAFENYEELFGTSHIQTEQLFDDAGIDIYFEMKEAPAGNSTESKLKQPANSNAVSADSGMSNPGVKGDSSVCTPLRQARSSLSLSFAGLTGESSAGDHQDCVVSSLLLMGEPPWQPPGPEGSIAGGSRDSALTRYKEKKMRRKFDKKIRYASRKARADVRKRVKGRFVKAGEAYDYDPLCQTRSY

SEQ ID NO: 10811 - protein, 210 aa, Zea mays
  Clone ID: TF_ZmC3762_2.pep
MQVLCDVCGGAPAAVLCCTDEAALCSACDRRVYRADKRRRIPLVQPCGDDSAAAAAAPLCDVCKERRGLVFCVEDRAILCPDCDDPIHSANDLTAKHTRFLLVGAKLSAALVDQAPPSPDDDDDDVAEPDAVPAACAAKASSLESGGGSSISDYLTNICPGWRVDDLLLDDSSFSAPSKTGYSDGHDQVPSVDADLFHVVASGRPGKRVG

SEQ ID NO: 10812 - protein, 330 aa, Zea mays
  Clone ID: TF_ZmC3_3.pep
MCVLHPTVSCACLLTEVHEKTRALEASGYFFCLEDRALLCRDCDVAIHTVNSFVSVHQRFLLTGVQVGLDPADPVPPIAEKHVNAAGGSVNQPVRHQPKRSPTVQFSVEGSASVPTKNVTNGDCSRQNFVPTARGEVVDWTMNNSTIRSVESPPKYMSEESPTLLQSSQTTTVFSNQINGNSDGTYHLSFSSGNVTDSLPDWPVDEFFSNSEYVPNLGFSEHGSSKGDNAKLESAGGSLQCRLAEGSIAEELLGQVPGLITDDYMSRVPENSWTVPEVPSPPTASGLNWHGNLCFPAYDSTMFVPEITSLQNSQNQFTVPSSFKRRRREY

SEQ ID NO: 10813 - protein, 322 aa, Zea mays
  Clone ID: TF_ZmC22615_1.pep
MKVLCSACEAAEASVLCCADDAALCARCDREVHAANRLAGKHQRLPLLAPGGQGAAAVSPPKCDICQECDAYFFCLEDRALLCRSCDVAVHTANSFVSAHRRFLLTGVQVGQELEPDDLSLEQREASSPPPAKSEPTPPLYSESDFGWAAGAGATGSLTDWSAVQEEFGSPAPRLAEAAPRATPKRTPRAPAFGAGQGRIAGGVMDWPLGEFFRGVSDFNGGFSFGESGNSKADSGKLGDSAGGSPYYRSSEEERDANELFGQVPEIQWSVPALPSPPTASGLHWQHGGPDSGAFVPDICTPDGAGRCFPTASGAAKRQRNR

SEQ ID NO: 10814 - protein, 280 aa, Zea mays
  unsure (1)..(280): unsure at all Xaa locations
  Clone ID: TF_ZmC18754_1.pep
MSAADAAGGKEAAPACDSCTGMPAVVYCRADSARLCLPCDRHVHGANTVSTRHARAPLCAGCRAAAAAAARHAXGFLCASCRLGEEKDERDGGGAADSSSDDGGAVEGYAGCPSVADLATILGAGSAWEEPQTLRLESRSSGGELADEVIRQLVELARSEAAARAEMEQLTPWPSPELAAITGQYADFGALDADTAWHDDAAAIAAAVVPSTEEEQQAWIAAGCDVGACRTEEKARENDAALAEPCLSSFVEMSEICPASVVVTLSHGGDEGVDSSGKTA

SEQ ID NO: 10815 - protein, 397 aa, Zea mays
  Clone ID: TF_ZmC300_43.pep
MGEGDDDRRDELLGAGRDHEPEPADAEEAKKPAPGEAEAGNGAGAEAATCDYCGTAAAAVYCRADSARLCLPCDRLVHGANGVCSRHARAPLCAGCCAAGAVFRRASTSAFLCSNCDFGRHRDGGDPPLHDRCAVQPYSGCPPASDLAALLAVPLFDKPAAEDGAWWNIWEEPQVLSLEDLIVPTTPCHGFEPLLTPPSPKNRSISPDRKVNEEILRQLGELAESDGGMQASAGREEAEQAGGDQFPSWASPQYATGHGNFGTEDNHENGRWNNSEYHDLNDACKLEVTYDQAPVNSAEPCLSSFAPLSEICPSMSNGSSKEDNHQANPGIGMPMQGLPKRSGFDVVPCPDRDSVISRYKAKRKTRRFDRQVRYESRKVRADGRLRIKGRFAKANQT

SEQ ID NO: 10816 - protein, 201 aa, Zea mays
  Clone ID: TF_ZmC2446_2.pep
PTRPVAAHCRTCPGGAYLCGGCDAGHARAGHERVWVCEVCECAPAAVTCRADAAALCAACDADIHDANPLARRHERVPVQPIGAAADPAAEKAALLFGLAAEGKDGGDAAKVVVDASKLDLLFADDVVDPFLAQDFARFPHADSVVPNDGSNCGAAVDFDFGGGVAVAAKQPSYSSYTAASLGHSGSSSEVGLVPDVMCGR

SEQ ID NO: 10817 - protein, 211 aa, Zea mays
  Clone ID: TF_ZmC2446_1.pep
MEALVGRYWGLGGRRCGACGGSPAAAHCRTCPGGAYLCAGCDAGHARAGHERVWVCEVCECAPAAVTCRADAAALCAACDADIHDANPLARRHERVPVQPIGAAADPAAEKAALLFGLAAEGKDGGDDDAAKVVVDASKLDLLFADDVVDPFLAQDFARFPHADSVVPNDGSSCGAAVDFDFGGGVAVAAKQPSYSSYTAASLGHSVSVPF

SEQ ID NO: 10818 - protein, 269 aa, Zea mays
  unsure (1)..(269): unsure at all Xaa locations
  Clone ID: TF_ZmC1611_3.pep
MGGEGSTSPAPGGAACAVCGGAAVVYCVADAAALCSPCDAAVHAANLLASRHERVPLSMAAVPSASGAYDDLFAPDDVDAAAPAQAQGLGSPRNGSSSASFTTSGDSGAEGSSLFDFDLLSGVDLAACVTDGVAPLHHDDAAPLWAQPGLAVAWATAWSPADSAAAVVAAAAEREARVQRYREKRKNRRFHKTIRYASRKAYAEARPRIKGRFVKRAAXTSSSLSSAAGTXDDGNDATGAAAKFWLSFSDDARDGFYVDAGAYGVVPSF

SEQ ID NO: 10819 - protein, 276 aa, Zea mays
  Clone ID: TF_ZmC13160_3.pep
MARRDEADTSHAHPHSDLSPRTPRRTSAASSGRLPSGKMAPPAALPVPAHPPPAAPQEVPLPYTSLLMMASANCSDLIGGGDRVGDTDEQLLWDCAAPSVPPTQSSGFNLGRSRHHDEKSALEVGYGSNHGGFMIKSYSDMLKDISSGTTKDLEDIYDSRYCSTAEDIMSSNICQLSSKNVSTGSNKRKVRSCAASTMDGPTTSGNHNHVPASASGPGAALTREISFGDQTVSAPAAETERPAAVRIDSETLAQNRDSAMQRYREKKKNRRHGSMS

SEQ ID NO: 10820 - protein, 258 aa, Zea mays
  Clone ID: TF_ZmC460_4.pep
MKIQCDACEGAAATVVCCADEAALCARCDVEIHAANKLASKHQRLPLEALSAKLPRCDVCQEKAAFIFCVEDRALFCQDCDEPIHVPGTLSGNHQRYLATGIRVGLASASACSDACDAHDSDHHAPPKATIEPPHAAVSAAVQQVPSPPQFLPQGWAVDELLQFSDYESSDKLHKEPTLGFKELEWFADIDLFHEQAPKASRTLAEVPELFGYQAANDAAYYRPAKAAAGGGAGVRQSKKARIEVTDDEDYLIVPDLG

SEQ ID NO: 10821 - protein, 100 aa, Zea mays
  Clone ID: TF_LIB4732-095-Q1-K1-B12.pep
MGAAGDAAAAGTRCELCGGAAAVHCAADSAFLCPRCDAKVHGANFLASRHVRRRLPRGADSGASASSGSCLVTDSAQSRGGAAARDREKGGRAPPRAEAV

SEQ ID NO: 10822 - protein, 196 aa, Zea mays
  Clone ID: TF_ZmC101_2.pep
MGAAGDAAAAGTRCELCGGAAAVHCAADSAFLCPRCDAKVHGANFLASRHVRRRLPRGGADSGASASSGSCLSTADSVQSRAAPPPGRGRGRRAPPRAEAVLEGWARRKGVAAGPACRRRVPLRVAMAAARWSEVSAGGGAEAAVLAVAAWWMTRAARARPPAAGAPDLEEGWAECSPEFVVRQGPHPSATTCGRR

SEQ ID NO: 10823 - protein, 235 aa, Zea mays
  unsure (1)..(235): unsure at all Xaa locations
  Clone ID: TF_ZmC613005_1.pep
MSSWRLPRPVVGLGAKRIRRGSSVRLELEAQKTSRTQQNSSLTSLPLPLPLPLCGPNNLSLSLSLSLFFLSALQTISPSPSLLSKTNETKQETEKSPSPVAVAVAVAARIMSAAAAAEVGKEKGAATPGPGPGPGGACELCGAAARVYCGADEATLCWGCDAQVHGANFLVARHARSLLCRGCARPTPWXAAGPRLGPTVSLCVRCVRRGPRAVARRGHEDMRGAADRDADDAPH

SEQ ID NO: 10824 - protein, 245 aa, Zea mays
  unsure (1)..(245): unsure at all Xaa locations
  Clone ID: TF_ZmC519810_1.pep
MDQDERQHPEPPAMEKELSADALACDYCSGPQAVVYCRADSARLCLPCDRLVHAANAVCSRHLRALLCAACRATGAVFRHAGTEFLCSNCDFGRSRDAELPLHDRCTVQGYTGRPSAHDLAALLGVPDFDKPSAGKADDGWWAIWEEPQVFRLEDLIVPTTSCHGFQPLVTPSSPKIHNSPDGKTNDEVIRQLRELAEVDMGSGQITPREEAEQAAHQLPSWTESQHTTGXGDFRIDNSHGVATM

SEQ ID NO: 10825 - protein, 151 aa, Zea mays
  Clone ID: TF_LIB4829-058-R1-N1-D7.pep
GRESLRCHISPRPKTPSSCAACVLLPPLVHISPPPPRRLPTPLALGRITGDRREAGDLRFLSPGWRRSDDTGVGSGAALGCGRSAMCAGAHRRCSSVRPTRQRFAGPATRRLIPLPTPSDPRRSSSLSQIGRGCCFDWGGGRARWSLLPPS

SEQ ID NO: 10826 - protein, 328 aa, Zea mays
  unsure (1)..(328): unsure at all Xaa locations
  Clone ID: TF_ZmC3_2.pep
HSLFCSVSNPPARPFSCLSLLQEASGYFFCLEDRALLCRDCDVAIHTVNSFVSVHQRFLLTGVQVGLDPADPVPPIAEKHVNAAGGSVNQPVRHQPKRSPTVQFSVEGSASVPTKNVPNGDCSRQNFVPTARAEVVDWTMNNSTIRSVESPPKYISEESPTLLQSSQTTTVFSNQINGNSDGAYHLSFSGGNVTDSLPDWPVDEFFSNSEYGPNFGFSENGSSKGDNAKLGGAGGSPQCRLAEGSVAEELLGQVPGLITDEYMSRVPENSWTVPEVPSPPTASGLNWHGNLCFPAYDSTMXVPEITSLQNSESHFTVPSSFKRRRREY

SEQ ID NO: 10827 - protein, 261 aa, Zea mays
  unsure (1)..(261): unsure at all Xaa locations
  Clone ID: TF_ZmC460_6.pep
MKIQCDACEGAAATVVCCADEAALCARCDVEIHAANKLASKHQRLPLEALSAKLPRCDVCQEKAAFIFCVEDRALFCQDCDEPIHVPGTLSGNHQRYLATGIRVGLASASACSDACDAHDSDHHAPPKATIEPPHAAVSAAVQQVPSPPQFLPQGWAVDELLQFSDYESSDKARRXQAPPTLGFKELEWFADIDLFHEQAPKASRTLAEVPELFGYQAANDAAYYRPAKAAGGGGAGVRQSKKARIEVTDDEDYLIVPDLG

SEQ ID NO: 10828 - protein, 106 aa, Zea mays
  unsure (1)..(106): unsure at all Xaa locations
  Clone ID: TF_LIB4756-104-R1-K1-D9.pep
MSAAWEGGKEKGAATPAPGGACELCGAMARVYCGADEATLCWGCDAQVHGANFLVARHARALLCRGCARPTSWRAAGPRLGPSASLCDRCVRRXSGAVGTGGDVEM

SEQ ID NO: 10829 - protein, 164 aa, Zea mays
  unsure (1)..(164): unsure at all Xaa locations
  Clone ID: TF_ZmC460_13.pep
MKIQCDACEGAAATVVCCADEAALCARCDVEIHAANKLATSXSKHQRLPLEALSASLPRCDVCQEKAAFIFCVEDRALFCRDCDEPIHVPGTLSGNHQRYLATGIRVGGASASSACSFPCDAHDPSEYFARPREDPFSPPIGLRAWLKSQWREAPVCRIMIEPL

SEQ ID NO: 10830 - protein, 143 aa, Zea mays
  Clone ID: TF_ZmC3_4.pep
MRIQCNACGAAEARVLCCADEAALCVACDEEVHAANKLAGKHQRVHLLTDSATAAASPAPAVPKCDICQEASGYFFCLEDRALLCRDCDVAIHTVNSFVSVHQRFLLTGVQVGLDPADPVPPIAEKHVNASGGSVKQSVRHSA

SEQ ID NO: 10831 - protein, 199 aa, Zea mays
  Clone ID: TF_ZM3541.C1.o2.fg.pep
MEIVKTDLRNKMGSDWLNHRMVCGLIRLLMQKQEAKWNKYNNSSSISSATGPKGTLFPMCGMNLAFDRDLIGPAMYFGLMGDGQPIGRYDDMWAGWCVKVICDHLGLGVKTGLPYIWHSKASNPFVNLKKEYKGIFWQEDTIPFFQAVVLPKDCDIALSQQVKEKLGKVDPYFTKLADAMVTWIKAWDSLNAANGKPKK

SEQ ID NO: 10832 - protein, 140 aa, Zea mays
  Clone ID: TF_LIB4730-019-R1-K1-B3.pep
SRHAAGGVVVGGGGGGGCPLLSDFGWSLPEAEPHAANQFMVDWWWASDRCGAQAGGKITGDRGVDGDGAELRLCSHVRCGRRETRRHEFRRCSVCGAANYCSRACQALDWKRAHKVQCVPVDRWLLAAVGDAQEEQQQPQ

SEQ ID NO: 10833 - protein, 146 aa, Zea mays
  Clone ID: TF_ZmC1511_5.pep
MPKYLLPAHVCHWCGTWKGDKICSSCKKARYCSEKHQALHWGTGHKNDCLQIISSSAASNSVLPTVGKVPANTSWPEFEIKIDYEGIFDSDSGDENNSKLLVMQRHGKPDAMMQSWMDQFEADSDNKCWTSFQERVSRAPNQVLRY

SEQ ID NO: 10834 - protein, 290 aa, Zea mays
  unsure (1)..(290): unsure at all Xaa locations
  Clone ID: TF_ZmC312728_1.pep
MLGGGAGGGGAGAGLGLDLSAVIQAAVVGLVLFSAAVVAVRRAASRYFVVDAAGFAASYDDHHHSSPASPMSSKGNRSEQGAAAADLTGPCAACGVVTSKKCSGCKRVRYCSQECQTKHWQIDHKFKCKQMKSLDLADKLSCGGEANSKKTSGFGRISLVPACKKISKGQVLFPYDEFLKLYNWKDLDVVPCGLMNCGNSCFANVVLQCLSCTRPLVAYLLGKDHSRECSVRHEDWCFXLCELQCHIQRASXSLHPFAPTNILSHLPNIGGNLXGVGRQEDAHEFMRFAI

SEQ ID NO: 10835 - protein, 482 aa, Zea mays
  Clone ID: TF_ZmC2175_1.pep
MASWLEQLQRELAARGLTVASIPGKGRGLIATCTFFPGDVILNQEPYASTPNKILVGSSCDHCFTSGNLRKCSMCRVMWYCSSNCQKEEWKLHQLECRAMAALTEDRKKMLTPTIRLMVRLALKRKLQNEKVIPSSSIDNYNLVDGLESHISKVDENQLVLYAQMANLVSLILPFIELDLKEIAQTFSKFACNAHTICDPELRPLGTGLYPVISIINHSCVPNAVLIFDGRTAYVRALQPINKDEEVSISYIETAAVTKKRNNDLKQYFFTCTCPRCVKGFDEDALLEGFRCKNQACDGFLLPNSGKKAYTCQKCGASRDVEEIKNMRSEILQLSDKASSFLSSGNKAEAGSIYKIIEQLERNLYHAFSTTLLHTCETLLKIYLELQDWWTALTYCRLTIPVYERVYPPFHPMIGLQFYTCGKLEWLLEFTEDALKSLTRAADILKVTHGVKSQFMKELFGKLEEARAEVSFRLSSRHGHDE

SEQ ID NO: 10836 - protein, 155 aa, Zea mays
  Clone ID: TF_ZmC56_1.pep
VAYAHVVGNPGCLTSELGCFTTVPASLRGWAHPANRFLCDWFSANPLPFPPRRLLLMCSMPTCGRPETRGLEYRRCPVCGIARYCSRSCQSLHWRMGHTRECVPTHQWLMEAIANHAVVNADDGANAAAMPAVNNNSATHHNNLGGAAADAPAPK

SEQ ID NO: 10837 - protein, 197 aa, Zea mays
  Clone ID: TF_ZmC1168988_1.pep
MECAAKGLAAEPCAGGVADRRCGGCGAVAYCSRVHQIIHWRVHKEECERFAEQMRHIDALSQFPFTFLEPPALNHEFPSARCLFLQSIKLHQKGLWKSECICGRDVAPLKGLSVEAEWNLQSSLCPCAEPKNPVSSALASWEAYYQWRSLPLHSPVAVLLHWPLTLYHCVQLCRTQTPRYDGQDTLCIHYLRPEKEL

SEQ ID NO: 10838 - protein, 165 aa, Zea mays
  unsure (1)..(165): unsure at all Xaa locations
  Clone ID: TF_LIB4756-044-Q1-K1-D6.pep
IGYLDAGRGTRSIGGPCAARFLLLPRVPGAGLEARAQGAVRSPWTAGSSPALPLAAASRRSSTSSERGNGSAADMTYQHRVPYRPTAPLRGPGVAESGARRGRRFGCFLFLFASFSPADELNEVYLAGAACRSDAHFLLSSTREAKSQRAVEIXDXARLSFSLMF

SEQ ID NO: 10839 - protein, 216 aa, Zea mays
  Clone ID: TF_ZmC1511_10.pep
CLVHNTEYISIFTSALLQRPLSVVSSSTYYNSSTLVLTMWLAMACLLRDQHEQWKHKYENPCRSVKIFRCQLPQNNAFYSAQPPKHDGSDKPLCPGAPVCHWCGTWKGDKICSSCKKARYCYEKHHALHWRTGHKNDCLQIISSSASNSVLPAVGIGFVRWFAKASNVHRLHVLDPSCLYSVLFYDQLTIHYLRLMALINNKMELRVSMEMHVAEL

SEQ ID NO: 10840 - protein, 257 aa, Zea mays
  Clone ID: TF_ZmC1511_9.pep
METSTKKLSSLRITSLDDDDEETEIPHQPPQAGLSPAGADYEDDDDEEEEAEVTLGVLSKPKHPGFLLRHLFPSKAGGIPAWLDPVNLPSGKSSYCGFCGEPLQFVLQIYAPIEDNVAAFHRTLFMFMCPSMACLLRDQHEQWKHKYGNPCRSVKIFRCQLPRNNAFYSAQPPKHDGSDKPLCPGAPVCHWCGTWKGDKICSSCKKARYCYEKHQALHWRTGHKNDCLQIISSVASNSVLPAVGIGICLASKWFCYP

SEQ ID NO: 10841 - protein, 68 aa, Zea mays
  unsure (1)..(68): unsure at all Xaa locations
  Clone ID: TF_LIB4073-003-Q1-K1-E9.pep
LCSHVRCXRREXRRHEFXRCSVCGAANYCSRACQALDWKRAHKAQCVPMDRWLLAGVGGGGEVPQPQQ

SEQ ID NO: 10842 - protein, 201 aa, Zea mays
  unsure (1)..(201): unsure at all Xaa locations
  Clone ID: TF_ZmC18797_1.pep
GHVYALRELGHCLQDGYGVRRXDPAEGRRLLVAANARELTLALSAATASRHAVTALPFAAAAAAGVVVGGGGGGGCPLLSDFGWSLPEAEPHAANQFMVDWWASRCAAQAGGKKRGDGSGVDGDGDGAELRLCSHVRCGRRETRRHEFRRCSVCGAANYCSRACQALDWKRAHKAQCVPMDRWLLAGVAVGGGVEAQHHQQ

SEQ ID NO: 10843 - protein, 126 aa, Zea mays
  Clone ID: TF_LIB3596-053-Q6-K6-D7.pep
APECHWCGTWKGDKICSSSKKARYCSEKHQALHWRTGHKNDCLQIISSAASNLVLPAVGIGFVRWFAKASNVHRLLVLDPSEMKLRVSMEMHVAELSQVSSIVCVHAYLASCSSFYGEYKSYGELC

SEQ ID NO: 10844 - protein, 413 aa, Zea mays
  Clone ID: TF_ZmC1511_2.pep
SSAKKLISLRITSLDDETEETEDPHQPPPAGPSAAAADSDDDDEEEEVEVTLGVLSKPKHPGLLLRHLFPSKAGGIPAWLDPVNLPSEKSSCCGFCGEPLQFVLQIYAAVEDNVAAFHRTLFMFMCPSMACLLRDQHEQWKHKHGNPCRSVKVFRCQLPRTNAFYSVQPPKHDRSDKPLCPGAHVCHWCGTWKGDKICSSCKKARYCSEKHQALHWRTGHKNDCLQIISSSAASNSVLPTVGKVPANTSWPEFEIKIDYEGRFDCDSGDENNSKLLVMQRHGKPDAMMQSWMDQFEADSDNKCWASFQERVSRAPNQVLRYCREPNAKPLWALSSGCPSNADIPSCSYCKGPLCYEFQVMPQLLYFFGVGNQPDSLDWATIAVYTCQGACDQSVSYKEEFAWVQLYPTTTTRQ

SEQ ID NO: 10845 - protein, 415 aa, Zea mays
  Clone ID: TF_ZmC1511_3.pep
METSTKKLSSLRITSLDDDDEETEIPHQPPQAGLSPAGADYEDDDDEEEEAEVTLGVLSKPKHPGFLLRHLFPSKAGGIPAWLDPVNLPSGKSSYCGFCGEPLQFVLQIYAPIEDNVAAFHRTLFMFMCPSMACLLRDQHEQWKHKYGNPCRSVKIFRCQLPRNNAFYSAQPPKHDGSDKPLCPGAPVCHWCGTWKGDKICSSCKKARYCSEKHQALHWRTGHKNDCLQIISSAASNSVLPAVGIVPASISWPEFEIKIDYEGTFDSDSGDENNSKSLVMQRHGKPDAMMQSWMDHFQADADNKCWASFQERVSRAPNQVLRYCREPNAKPLWALSFGCPSDADIPSCSYCRGPLCYEFQVMPQLLYFSWCWNQPDSLDWATIVVYTCQGSCDQTVSYKEEFAWVQLYPTTTTRQ

SEQ ID NO: 10846 - protein, 292 aa, Zea mays
  Clone ID: TF_ZmC25699_1.pep
LLCGNHYCTKSCHVLEVPLNHPEGDRTTSISKVNALAMPCEQCNLPCQRVREPPCSHPCPLPCHLNDCPSCKVLVKRPCHCGAMVHAFECVFYNILNAKDQIKIRSCGGPCHRKLPNCPHLCSEVCHPGVCPSVDQCMKKVNTRCACSTLKQEWRCQDVLKEYRKSGRDPKEVPKSQFGVGLLACGEDCKKKLKAPDSELHLRKSQENKIPAVEVVNAPKRRKRRDRGQEVKISKFQEVKTFVLRALLIILLSIIVAAGLYLLWKGIFWLSDWMNEMEEQRASQRYPRGAML

SEQ ID NO: 10847 - protein, 260 aa, Zea mays
  unsure (1)..(260): unsure at all Xaa locations
  Clone ID: TF_ZmC521910_1.pep
MPSSYAAAAAGSSSRKPNRTSSAAAPTLRPPAPSPSPAPAPLAVNPSVISDSDPSSYSSSSADEADFAASDSATASVVSAYLSVAGEGADLSKVGIFLSSAARRRSPPCLICFDPIRPSDPVWSCSSSCFAILHLPCIQSWAHQSASGPAVPCPTWGCPKCRFAYPKSEIPSSYVCFCSKTIDPAPDPWILPHSCGDVCGRRLDANLDSGCEHTCLLLCHPGPCPPCPXVVPKATCFCGAHRXPRRCAHQRYSLXXKCTN

SEQ ID NO: 10848 - protein, 264 aa, Zea mays
  unsure (1)..(264): unsure at all Xaa locations
  Clone ID: TF_LIB4757-062-Q1-K1-H6.pep
GRVCSERIFQCKRECGGMLDCGKHKCERGCHGGKCGECPLRGRRTCPCGKKNYPRLECDAEAATCGSTCEKVLGCGRHRCPERCHRGPCDGTCRLVVTKACRCGGLKKEVPCYQELTCERKCQRLRNCGRHACKRRCCAGDCPPCSETCDKKLRCGNHKCLSPCHRGACSPCPLMKTISCACGKTCFEVPCGTEKNQKPPKCSKKCNIPRLCRHKLECRPHKCHYGACPPCKLICXERFPCXHTCKERCHGPISPPTPXXTLKP

SEQ ID NO: 10849 - protein, 843 aa, Zea mays
  unsure (1)..(843): unsure at all Xaa locations
  Clone ID: TF_ZmC9977_1.pep
TGPRTPGAFAXDRPCPCGXXXIGRRCADRSTPVTCGRPCEQLLPCKRHRCEKVSHASAGSCGDCAVLISVCCFCRNKNETLLCGDLMVKGELSEEDGVFSCNEVCGRTLACGNHACKDMCHPGPCGECELMPRKVSTCHCGKTRLQERRASCLDAIPTCDKICDKKLPCGVHKCKVNCHEGECPPCLVLVEQKCRCGSSGQMVECHKFSMEEFRCKKPCGLKKNCGRHRCSEICCPLSRKVAHLEGGNWDPHLCQISCGKKLRCGQHACQLLCHSGHCPPCLETIFTDLTCACGRTSLLPPLPCGTPTPSCPHQCSVPQPCGHLASHSCHFGDCSPCIVPVMRECIGGHVMLRNIPCGSKDIRCTQPCGKNRQCGIHACNRPCHPPPCDQTPANGDASSSSGGKASCGQVCGAVRRECKHTCTASCHPSSPCPDLRCEFSVPITCSCGRITATVPCGAGGSSMGDNMFEVSIIQKLPMPLQSVESNGRVPLGQRKLSCDEECAKMEKKRVLAEAFDITPPNLDALHFGENSSSSDLVSDLFRREPKWVLAIEERCKFLVLGKVRGSSSSNLKLHVFCPMMKDKRDAISLIAGRWKLSVQSACREPRCFVTIHVTSKSKPPARILGSKAGVPVTAAHPYFDPLVDMDPRLVVAMLDLPRDADVNALVLRFGGECELVWLNDKNAIAVFNDPARAATALRRLDYGSAYQGAAMFMPSSAQASSSGNVWIGEQKDGGFAARNNPWKKPASAAEPDPPSGDWTGVAGHAPAPGRRGVNTASQVMGTTNRWNVLESDAAASSGPGDERKPAQRMDTAYSAIPNVGNAGPSMTKLQPDAEVDHWEEACE

SEQ ID NO: 10850 - protein, 296 aa, Zea mays
  unsure (1)..(296): unsure at all Xaa locations
  Clone ID: TF_LIB4746-096-R1-K1-A6.pep
HWVPRGRPGSLVTPLPPHTCFDTSMDNSKLRLREDRQHQTSASDQDRVSNWLRDASLQEHDDVSEIGDSAPREPATPPPGRSLLVQYCEEVSPTNTNFTSDWASVFDEPDTQCDAWIEDPFGNDVPDASPTHEELHNSQTKVMRSSARSDLTVLNTGRSVAASYDSTEVAETLGEEGANILAEAATAPIDPNKPRITQINSCTQCTVADLKCSRSVPSCSRCNRKGQGSLCLLQRARYRGELDSDLPCSSTVLLXLKDDDESIWQQKVNLSKELEDLWRAQEDRKDWVLASLDVPR

SEQ ID NO: 10851 - protein, 222 aa, Zea mays
  Clone ID: TF_LIB4757-011-Q1-K1-G6.pep
MEDDDMDESPDRGMSKRACDSCRTRKIRCDRAVPCSNCKASKLACKTTAPQQKAQRQRVHISEQYERKIDRIEDRLAGIENVLANLSSKLGNMDLAKDSPETGSQSRSSRVGRSPGSGLQEAPTPAPFEGESSISIQSVYAREMLAQVIDSTPSIGQNEEVKMALTALSEMVSQPSQTMAPSNRLINRSLAEVDPTRLEQPPGGGLQCVGHSYEVFNNDICP

SEQ ID NO: 10852 - protein, 202 aa, Zea mays
  Clone ID: TF_LIB4829-017-R1-N1-F9.pep
RPGDSYLRYPTFAISNHHSSFQLFNFSLFQSLKRETVTVMSLTARERRNPPTRRKSCAACTKAKRRCDFAIPACLRCSQRRIHCQYPSRVMREQFSSSEASVAVSPDYLTTDDSSPQLAESLPSDTPIIEDFNAVISGLDACSEDLGVLEFPLEDNTLKFVEQPWTLTAPSTQDFSHVPQRILNRLQWATDEIKRAPEKMVL

SEQ ID NO: 10853 - protein, 871 aa, Zea mays
  unsure (1)..(871): unsure at all Xaa locations
  Clone ID: TF_ZmC9324_1.pep
MEPKPSSAAHADAPAVEAPRRRGGGGKRKSAGSSFTPSKRQAKERNASFHVPPHLLHSGPPTRAARQSPHKLSGTPSESVPASSAAATGDGVSGGQAVVDAIRPETEETPAPELPLVDEMFEAVRSRGAGVHVVPTFAGWFSWKEIHPVEKQTLPSFFNGKSEKRTPEVYLAVRNSIMMKFHANPQLHLESKDLAELSIGETDARQEILEFLDHWGLINFHPFPPDGHEESKPEETQDNSNDEKASLIEQLFKFESVQSYMTPLPMKEDVRAPPPLPSLIPESVLIQDVVAAAEPSVEYHCNSCSVDCSRKRYHCRTQADFDLCCDCYNEGKFDPGMAKTDFILMDSAGVSGASGTSWTDEETLLXINEKEGKSLSVEKKNNSSMSQHDHQESGIKSVSSDDCSLVEPKTNNAKESGDSTAIGDKKGNCEETKTENASVVVNKDTQNSDGRDSGASPSTEEPKQSSDEQPVVKENSADVDTSGEKLSNVAIDILKCAFEAAGHSPEYEGSFADAGNPVMALAAYLAGLVEDDNTTTSFRSSLKSVSDVSPALQLSSRHCFILEDPPDELKDICASVSKKNRDADQKQDEDMIQNSIDTEKKEINEKEGKSLSVEKKNNSSMSQHDHQESGIKSVSSDDCSLVEPKTNNAKESGDSTAIGDKSATETTKGNTEQVNDLPSVEVEAPDDSSSKGKDELNKTKDAVATPATVQEQKHSQTLGNGDREEPNNIESVVVDEEKGSVVTANRPDSIARLKRAAATAVSAAAVKARFLGDQEEYQIRRLTALVIEKLFQKIEVKMSLFSEIEQVVFRTREYTEKTRKKLLKERNAIIAARMGALPSRPNQPGVAGNRLPPGYGNPPVRPPNAMPRPTS

SEQ ID NO: 10854 - protein, 101 aa, Zea mays
  Clone ID: TF_ZmC50613_4.pep
MFGDPDWGFGILSTLVKLEESDHIRHGSHTCSICRYPIIGSRFKETKHSFSLCNRCYSEGKVPSAFKLEEYRFKEYGNESEALIDKCMCFNLHSKKLETDA

SEQ ID NO: 10855 - protein, 840 aa, Zea mays
  Clone ID: TF_ZmC50613_1.pep
MALSASAASAGRGSRAEKVRRIFERFDTNGDGGLDRNEMAALVVAVNPRVKFSEDQISAILDEVFHTYGEFILPDGRGLSLLGLLRTYDDGAGDVDRDFLALSLPAVDSDASSPDIAAGDAAAHSSPPSGAAAAASLLDDHAKPLGAGGAAPSVSSRAAVAAPAWATSPNHGIAFDSSWGLLDDLEILVKRLRSKQLRKGSIDGAGNNNFDSFSEAGWSREISGAADSASTAAPWDETSRDYLTFVKELAVLRTRADASRSREEAFDNHMIIGRALSEHRLFRDALASFRRACELQPTDVRPHFRAGNCLYGLGRYAEAKEEYLLALEAAEAGGSQSADILPQIHVNLGIAMEAEGMVLGACEHYREAAILCPSHARALKLLGSALFGVGEYRAAEKALEEAIFLKEDYADAHCDLGSALHAVGEDDRAIQEFQTAIDLKPGHVDALYNLGGLNMDAGRFVRAAEMYTRVLSIRPNHWRAQLNKAVALLGQGESEEAKKALKDAFKMTQRVEVYDAISHLKTLQKKKPKPSKGKDDGQGEQAYVVVEASKFKRVGRKTTLRQDLANALDIRAFERMTKLGHCDVELLRKEMNETDVPVSYSGTGIPEKSIRKAALEVILRRLLSFLKPDTFQGAIKAINERILSVLDASGSGRVDLGMFFATIAPICSGPVDMRKRIVFDALLWRPASEGSNGQIRRSDALTYIKLLRAVYIPTHGASDMLEMHGESDPTMVSYTEFLEMFNDPDWGFGILSTLVKLEESDHIRHGRHTCSICLYPIIGSRFKETKHSFSLCNRCYSEGKVPSAFKLEEYRFKEYGNESEALIDKCMCFNLHSKKLEADA

SEQ ID NO: 10856 - protein, 842 aa, Zea mays
  Clone ID: TF_ZmC1346_1.pep
MSDWSSPAAPTFFPFGPQAEGWDVTFKVKYGDTLKRFYGCANGSHFDMNLSALRARIDTAFKFGPDVDFVLTYTDEDGDIVMLDDDDDLRDAALRQRLNPLRITVQLKKNQPTEKKDTSAPVKSAAQDPLSQLMSAIEGLKPVQEDSLAHIKSAIGEAIKSIPEPIPDALAKLSHEILDAAPPPLAELMKPFAQLMAPNNNGNGPSDVHAEGSSSSSSAQVPAEAKNEPKVRPSLGLKTVLKEAAGPVPNAGASQVQQPLMYPSVEEMLFPCNSVDKSVCKGKIDAQSKGKSVTSSGIQPAPHSLRTHAPPPPHPCISEWSRAQRSQHRQLKFEDNAKTTNDSRWRIPMYKMPYAPPPPAVPPPGYVPSPHFPYPGRLLSSGHPYGDLAGNMENSAPHSLHRWIQCDGCGAQPIVGPRYKSNVKEDYDLCDSCFQRMGNEMEYTKIDKPILPHRFLRDPHVYRKVHHPRVLMKSRREKLESRFILDVTVLDGTLMTPSTPFTKIWRMHNNGSVVWPRGTQLVWVGGDQFALQTSVPLEIPVDGFPVDKEIDVPVDFVAPTRPGRYISYWRLASPSGQKFGQRVWVHIQVEDPSFVNDNNRNAAINLNLPPESYSSNTTNLIDVNIEPADSALSAHAKRTKEFHFCSTDFPEPSKSVPFTLATTSLSAAAPTNQTGDVPMSSTPAAACLPSVNVPMHEVVTTHTPSPITPVLPTTIHFSAPVSAPAIAPELASGAVGVPPPVSAVVPELSELDVHNEEKLLRELEEMGFRQVDLNKEILRQNNYNLEQSVDDLCGVNEWDPLLAELEEMGFDDTEMNKELLAKNEGSIKRAVMELIAREKKDK

SEQ ID NO: 10857 - protein, 215 aa, Zea mays
  unsure (1)..(215): unsure at all Xaa locations
  Clone ID: TF_LIB5117-021-A1-PF1-B6.pep
ICWASDGNLGNNSERSPRISHRWIQCDGCGVQPIVGPRYKSNVKEDYDLCDTCFRRMGSEVEYTRIDKPILPHKLSRDPNLCRKIHSRASMKSKREKLESRFILDVTVLDGTLMSPSSPFTKIWRMHNNGSIMWPLGTQLIWVGGDQFALQTSVPLEIPLNGFPVDQEMDVAVDFVAPARPGRYISYWRLASPSGXXFGQRVWVHIPGGRSIFCQ

SEQ ID NO: 10858 - protein, 491 aa, Zea mays
  unsure (1)..(491): unsure at all Xaa locations
  Clone ID: TF_ZmC326_17.pep
PRVRGRVGFKRLKQEKQDRAAAXGKNIDEIPGAEGLVVRVVSSVDKKLEVKPRFLEIFQEDNYPTEFPYKSKAVLLFQKIEGVEVCLFGMYVQEFGAECSFPNQRRVYLSYLDSVKYFRPEIKTVSGEALRTFVYHEILIGYLEYCKLRGFTSCYIWACPPLKGEDYILYCHPEIQKTPKSDKLREWYLSMLRKASKEEIVVELTNLYDHFFLTMGECKAKVTASRLPYFDGDYWPGAAEDMINQLRQEEDDRKLQKKSKTKKIITKRALKAAGHTDLSGNASKDAMLMQKLGETIYPMKEDFIMVHLQYSCSHCCTLMVSGRRWVCHQCRSFYICDKCYDAEQQLEDRERHPCNSRDTHMLHPVDIVGVPKDTKDRDDILESEFFDTRQAFLSLCQGNHYQYDTLRRAKHSSMMVLYHLHNPTAPAFVTTCNVCSHDIETGQGWRCEICPDFDVCNSCFQKGVVTHPHKLTNHPSAADRDAQNAEARQMR

SEQ ID NO: 10859 - DNA, 328 bp, Oryza sativa
  Clone ID: TFbOSC11543j.C1.o1.fg
gaagggtgactactaccgttacttggctgaatttagcactggaactgaaaagaaggctgctactgatcagtcccttatggcctatcaggcttggccttgcgctcaacttttcagtcttcttgagataatgaactctcctgagagagctagccaagtggcaaaacaagcacttgatgaggctactgctgagattaactctgctggtgtggagggttacaaggacagcatgcttatgatgcagctcctgaaggagaacctggcattgtggacatcagaactaactggaggtgaaacatctaaggacgatgatgttgttatggagggctaa

SEQ ID NO: 10860 - DNA, 837 bp, Oryza sativa
  Clone ID: TFbOSC401367j.C1.o84.fg
atggtggaggcaatgaatagtgtggcaaagttagacgaggggctgacaaaggaggagaggaacctcctctcagttggctacaagaatttgattggtgcaaagcgtgcggcaatgcgtatcattggatccattgagctaaaggaggagacaaagggcaaggagagtcatgtaaggcagactgctgagtatcgtcgcaaggtggaggctgagatggataaaatctgctgtgatgtcataaacattattgacaagaagggagattactaccggtaccttgcagagttcaagactgggactgagaagattgaagtgtctgaactgtcactcaatgcttatgaggcatgtgatccttttttcattttcaacttgtttctgttttctcaagtcacttgtttcattgagttcaccatttatcaagtcttggttgtatatactgcttccaaaactgcgcagacagatctcactccaactgaccctatcagacttggtttagctctgaatatatctgtcttctactgtgagatcatgaactcacctgacaaagcttgccaacttgctaagaacgcctttgatgaagctgttgcggagcttccctccctcagtgaggagaattacaaagatagtacactgatcatgcaacttctgagggataatctagcactgtggaattctgatatggctgatgatgcagacgatattagggaacgaacagatacaactggtgctaaaggtgaccctgcagcgtgccaggtgcgcattgatacgtgttgccatctaacttatgagagctcaccagcgcggtatgtatgtgaccatgttggttttctagccctgtga

SEQ ID NO: 10861 - DNA, 405 bp, Oryza sativa
  Clone ID: TFbOSC11544j.C1.o1.fg
atgaaggagagggagaaggtggtgcgactggccaagctcgccgagcaggcggagagatacgacgatatggtggaatttatgaagacacttgctaggatggatgtggatatgagtgctgaagagaggcttttattttcagttggttttaagaaaactattggtgccaggagagcatcatggagaatccttgaatcacttgagcagaaggtgacagctggtgaccaaccaggtgtaacaataaatggctacaaaaagaaagtagaggatgaactaagggcagtttgcaatgaagtattatcaattattgctattcattgccttccattggccaattcgggtgaaaatgtcgtgttcttttataagatgtatgtgcaggttttaccaaatgatgctaaggtttcatag

SEQ ID NO: 10862 - DNA, 187 bp, Oryza sativa
  Clone ID: TFbOSC412316j.C1.o1.gp
ccgccgtcaccaccttctccatgaactccaccatctcctcgtacctctccgcctgctccgccagcttcgccatgtacaccatctcctccctcgtccctcctcccgccgccgccgccatcgtctctctctctctctcttgcggattcgggtggagttgagttgagcctgtgagtgggtgggggcgacc

SEQ ID NO: 10863 - DNA, 927 bp, Oryza sativa
  Clone ID: TFbOSC410930j.C1.o5.fg
atgtcgcagcctgctgagctttcccgtgaggagaatgtgtacatggctaagcttgcagagcaggccgagaggtatgaggagatggttgagttcatggagaaggttgctaagacagttgactctgaggagctcactgttgaggagcgcaaccttctatcagttgcttacaagaatgttattggtgctcgccgtgcgtcatggcgcatcatatcatccattgaacagaaggaagagagccgtggtaatgaggatcgttgcacgctcatcaaggaatacaggggaaagattgaaactgagctctccaagatctgtgatggcatcctcaagcttcttgactcccaccttgtgccttcatccactgctccagagtccaaggtcttctacctcaagatgaaaggcgactactacaggtacctcgcagagtttaagactggagctgagaggaaggatgctgctgagaacaccatggtggcatacaaagccgctcaggatattgccctggcagagttgcccccaactcatcctatcagacttgggctggccctcaacttctcggtgttttattacgagatcctcaactctcctgaccgtgcttgcaatcttgcaaagcaggctttcgatgaggctatctcagagctggacactctgagtgaggaatcctacaaggacagcactttgatcatgcagcttctgcgtgataacctgacgctgtggacttccgatatctcggaggcgctccccatttatgttgtgctaggaaaccttgcagctgactcgctgcttggctggtggattctcgagctgcactttctttggggggagcctcagggtggaaccttcatgtcacttattggatcgattgttttcggtatgtcagttgtgagccttatctccagagtccacagtcctgccaagtgccctgcttga

SEQ ID NO: 10864 - DNA, 4692 bp, Oryza sativa
  Clone ID: TFbOSC900048j.C1.o23.gm
atggtggtttcccccaccgtttgcaatgtgaagttggggcgtgtcctcatagacgggggtgcagccctcaacatcctttcccccgcggcctttgacgccatcaaggccccggggatggtgctccggccgtcccagccgattatcggtgtgacgccggggcacacttggccgctaggtcatatcgacctcccagtcaccttcggtggttccgccaacttccgcacggagcgggtgaacttcgatgtggcggacctcagtctgccctacaacgcggtcctggggaggcccgcgttggtgaagttcatggcggcggtccactacgcctatctccagatgacgatgccgggccccggtggccccatcaccatccatggcgacctcaaagtcgcgcttgcttgtatggagcagcgcgcggaccacctcgccgcggcgtccaagcccgcgggtggtgacgagaggctcagcacctccgtccctgccgccccgagggcaggggatgatcacgaagacgcgctcgtctccttcctgcgggcaaacgccgacgtcttcgcctggagaccggcagacatgcccggggtccccagggaggtgattgagcaccgtctcgccgtgcggccgggcgcaaggccggtccagcagaaagtgcggcggcaggccccggaacgtcaagccttcatccgcgaggaggtggcgcgacttctggaggccggattcatccgtgaggacatccatccggagtggctggcgaacccggtcatcgttcccaaggcgaacggcaagcttcggatgtgcatcgactacaccgaccttaataaggcatgtcctaaggacccttaccccctgcctcgcatagatcagattgtcgactccaccgcggggtgcgaccttttgtgttttctagatgcatactctggtcctacttttcaacgtactactcgaatttctttgggtagccaaataggacgtaatgttgaggcctatgttgacgacttggttgtgaagacgcgcaaccaagagaccttactctcggatctagcggaaactttcgaaagtctccgctccgcccgcataaagctgaaccccgacaagtgcgtgttcggcgtgcctgcgggcaagcttcttgggttcttggtctctgcccgaggcatcgaggccaaccccgagaagatacgagctatagagcggatgcgcccccccagcaagcttagggatgcgcaatgcgtcaccggctgcatggccgccctaagtcggttcatatcgaggctgggagagaaggcgctacccctatttaagctcctcaaacgctccgggccgtttacctggacggaggaggctgagcgggccttcactcagttgaaggcgtacctcagttctcccccagtcctggtcgccccagagccagatgagccgttgctactctacctggcggcaaccccgcaggtggtcagcgcggcgttggtcgtggagcgcgacgaggacaaccctcactccgcgcatccccaccctgtgtcgactcgacccgggagagagcagggaggagaggcccccgagccgaacggcggcccgaggcccccgacggtcagagctggccctctgcccgcttgtccgacggtgccaggcgcccccgacccccaggatggccccggggccactgcgggaaggccgcgcctgtcgccctctgaccccgaggtcgtcggcacagaagtcgagtgcgcccctggtggcctctcggacgaagagcgccctggagatgcggcccctggcgaagaggatcggccccgccgaaaggtgcagcggcccgtctacttcgttagtgaggccctccgggacgccaagacccgataccctcaggcccagaagatgctttacgctattctgatggcttcgaggaagttgcgccattatttcctggcgcatcgggtctcggtggttacgtcttaccccctcggccaaatcttgcataaccgagagggtactggacaggtggtgaaatgggcaatcaaactctctgagttcgatttgcactttgaaccacgccacgcgatcaagagccaggccctcgccgactttgtggcagagtggaccccagctcccgagcccgtctccgtcctcgaggccagctcgggcccctcgcagctgcctcacaccgcctactgggtgatgcagttcgacggctccctatctcttcagggcgccggtgcgggggtcacgttgacctcgctgaacggagacgtcctcagatacctggttcgcctcgactttcgggcgaccaataatatggcggagtacgagggactccttgcgggactcagggtggcagctggactggggatccgccgcctgctggtgttaggcgactcccagctggtcgttaaccaggtctgtaaggagtaccgacccccaccgggcgcctttgaagaaaggcttgcccagccgtcggcgcgacccgaccccctaggggagacggacgcgcctgaacggcccccgaggcccgtcggagtccaggcctcgggacccgatgggagcgttcccagctcccttagattgattgcttggatcgctgagatccaggcgtacctcgcagataagactctacccgaggaccgcgaagggagtgaacgcgtccagcgcatctccaagcgctacgtgctggccttgcagaccatacctctttcgtggctgtttgctgtctgggggctcgatatcctgggtccgtttaggcgggccccgggcgggttcgagtatctgtatgtcgctgtcgacaagttcactaagtggcccgaggcttatccggtcatcaagatcgataagcactccgcgcttaaattcatcaggggcatcactgctcggtttggggtgcctaaccgtatcattacggataacggcacccagttcactagtgagctcttcggtgactactgcgaagacatgggcatcaagctctgcttcacctcccccgcccaccccagaagcaatggccaagtggagcgcgccaacgcggaaatcctcaagggcctcaaaaccaagaccttcaacatcctcaagaagcacggcgactcatggatcgaggagctgccagcggtgctctgggcgaaccgaaccacgccaagccgagcaaccggggaaacgcctttcttcctcgtctacggcgcggaggcggttctcccatctgagctcaccctgaggtcccctcgggccaccatgtattgcgaggctgatcaagatcagcttcgcagagacgacctcgactacttggaagagcgaaggcggcgcgcggccctccgagccgcgcgctaccagcagagcctgcggcgctaccatcagcgccacgtccgggcccgatcactctgcgtcgacgacctcgtcctacgccgcgtccaaacgcgtgctggactgagcaagctctcaccaatgtgggagggtccgtatcgagtgatcggtgtcccccggccgggctccgttcggctggccatgggcgacggcacagagctgcctaacccgtggaacatcgaacaccttcgtcgcttctacccctatggaaccatgaatagagtacccaccagttggggttttgtttattctagggtgaacaaggttaccactttggctccggcgtttatgttgtgggtcttgtgcgggtaccgtgtgcccacgggatccgtgtgggcccagggttccccaagaggggaaggctctcggtcgctttttggagcgcaaagggccggcacgcggttgcattggcggaacggcccggttgccgtggaccgccaacgggtccgggcgagtggacatgcggggcaccaaccggtccagcaacggcgcttcgtcgtcgtcgtcaaaagattccccacgttccccgtccccaccaaagccgcgttcgcatccgccaccacaaccgcaacccgccgccgccgacgccgacgaggagaggaggagagggaaggcgagagggaggcggagcggtacgaggagatggtggagtacatggagcgcgtggcgcgcgcggcggggggcgcctccggcggggaggagctcacggtggaggagcggaacctgctgtccgtggcgtacaagaacgtcatcggcgcccgccgcgcgtcgtggcggatcatctcgtcgatcgagcagaaggaggagggccgcgggaacgacgcccacgccgccaccatccgctcctacaggggcaagatcgaggccgagctcgcccgcatctgcgacggcatcctggccctgctcgactcccacctcgtcccctccgccggcgccgccgagtccaaggtcttctacctcaagatgaagggcgactaccacaggtaccttgcggagtttaagtctggcgacgagaggaagcaggctgcggagagcaccatgaatgcatacaaggctgctcaggacattgctctcgcagatttggctccgacccaccccataaggcttgggcttgcactcaacttttcagtgttctactatgagatcttgaactcccctgaccgtgcctgcaacctcgcgaagcaggcgtttgatgaggccatatcagaactggacagccttggtgaagaatcctacaaggacagcactttgatcatgcagctcctgcgtgacaacttgactctgtggacttcagatgccaatgatgatggtggtgacgaaatcaaggaagccgcagctccaaaagagcctggggatcagtga

SEQ ID NO: 10865 - DNA, 184 bp, Oryza sativa
  Clone ID: TFbOSC34756j.C1.o1.fg
agctagccaagtggcaaaacaagcacttgatgaggctactgctgagattaactctgctggtgtggagggttacaaggacagcatgcttatgatgcagctcctgaaggagaacctggcattgtggacatcagaactaactggaggtgaaacatctaaggacgatgatgttgttatggagggctaa

SEQ ID NO: 10866 - DNA, 768 bp, Oryza sativa
  Clone ID: TFbOSC401803j.C1.o29.fg
atgaacatggaaacacgccgctacacttctctctctcacaggaaggcgagaagcatggaatgcttcccctctacgcagtgccccgttaaaaggggcaaagccatcgcaacgctcctgaacatatcagaaccaccactggagctcaccaggacattgctggaagcagatgcagactcagcattccagccggacagaagagggtccttcccaatccacatcgcggcctcggctgcaggtcggctctcggcggtcatcgccttgctcaccatattccccggttccgccggattgcgcgactccgatgggaggaccttcgttcatgtcgcggccaggaagaagaggtacagtgttgttgcacacgcttgccagacgccggcattgtcagggatcttgaacaagcaagacaacgaagggaacactgctctgcacctagctgtagaagctggggattggtggattttcgcctgcctgttcgtcaacaagcaggtggacttgaacttaccaaacagtagtggacataccccgctggaactctctattaacactatcccgacaggactctactgtctcctgaactcgcggattttgatacaggaaacactgatagccgccaatgctacccgcggcatttctcggatggatgctgctggtacggaagaacacggaccccaatctgaagccgagaatgaggaaaaagggtcagaaatagtactacctctatattatattttaatgtatgacgccattgactttttgttcaacgtttga

SEQ ID NO: 10867 - DNA, 777 bp, Oryza sativa
  Clone ID: TFbOSC401247j.C1.o12.fg
atgacagtccaggctggtgctgatgtgaattatgcttatccaaacactcccttggtggtgtccacgacagctggcttaactgactgtatcaagtacttgcttgaggttcatgcagatcctaacattccagataaacagagcggacttacacctatagaaattgctgcaagtgttggaagaagagatcatgtggagattctatttcctttcacttcccctgtcagagcagtaacaaactggacagttgaaggaattattgctcatgggaaatcgagacgcttgattcccaagttccaaattctgaagataaaacggtcacttgatagctctggtcatgatcatttgaatccccattatttcttgcagggtgagtcatgtagcaaggtcagtgacagaaaggctgagctaaaatcacagggagaaaaagccgttaagagaaaggactaccttgctgcatcaaagatctacactaaggcgcttgagctagactattttgatgcaaccctgtattcaaacagaagcctttgttacctacaaattggaaaagcacaaaaggctttgcttgacgcaaaaaaatgtgtaaaactgcggcctaagtggatgaaaggtcactaccgggaaggagctgctttgatgttgctaaaggagcacaagaaagcattcgaggcattcttgaacgcgctgaaactggatcctgctaatgccgagattgagaaagtgatgtgggaggcagttgaggcgatgaaaaaggatgatgccgctgaagataaaacttaa

SEQ ID NO: 10868 - DNA, 825 bp, Oryza sativa
  Clone ID: TFbOSC406054j.C1.o2.gm
atgcatgatgcagcactgcaggctctgcctatggttttggaatggctcaagaataagaaactgaagacggccaacgtcgacatgcagcagctcactagccagagagacaatgacaacgggagcacccctcttcacttggcggcatcaatggctgggctgccgtccctagggtcgatgctgctgctggatgccaacgtgtccacggcgtaccagccggacaaccaagggcagtaccccatacacgctgctgcgtcggcggacagcctggaggctgtgaaggccctgctcgagaaatgcccggactgtgctaccctccgagatgcgagaggaagaacttttctccatgctgccgttgagaagaagagttttgatgacgacaacggggtacgattggatatgcggaataaggagggcatgatgcccgccgatgtttcatggagcatgatgcctttaaagacttattatgcatggaattcaagcatacgcatacgaaaattactcttgaaactgggagctccacttggtgaaagtagaggtgacctcttcgatgaaaagcacaatagaatcatcggagaaaaatctaaatgggacatggaaaagatgtcggagaatgtaacagctgcagcacaagtcttggcccttttctccgtccttattacaacagtgacatttgcgtcggctttcacgctgcccggtggctaccgatcagccggcgacgatggtggtgctgctgggacgccgaggcaggcccaaggccttcccacttttcacaagagcaaatcgatgaggatgagtgcgcgccgtgtcaggacggagaatggttag

SEQ ID NO: 10869 - DNA, 1239 bp, Oryza sativa
  Clone ID: TFbOSC408633j.C1.o3.fg
atgtcggaatcgattccagacaagcaaatagtggtgagatttcccaatcatgtactgccagcaagtttgcgcgaaaatatgggcaaagaaggagcaaccgtagataacatggatccttcctgtccttttctagttcttgagaaatatgatagaaaaaagtcctatgagtggctgaatctaagagctgcttgggtcgccaagtccatgccaaatgatataattatcccagaccctactcctgagagggtgcgagatgccttctctgaaatatctcgcagcttgagcaatgtcatggcagaggacagcgtccagtgcttcctaaacatgttcttggaatctccttcaaccttcgcatacaggttcaccatcacctcagaaaccttaaccttcatgatcaggtacaatgccttgcgatgcatgaaagccgtgttggagggcaaggcacctggcctcggctcgatgcacgccaatccaaactgcatgagcccgtatggatgcttccctctccatgaggctgcagaacggtgttcgcctcggatgatcaggttgctcttcaggcacggagcttcagcaaactatcgtgaggattgcgtctacaggctcgttcatctgctgtgcctacctgatatgatagtttccttggaggtgattagactgcttgcccaaaaaacagataatgtagtcgatgagctctggaattacatgaagaacggcaagcttgcacaggccacagttttattcctggcagcccaaaaacattttcgcaagggcaaacctaatgggttttctatcatcgcgcaacgcatatttggagactatgattccctaacgtctgacaaaggtaatggagaggcacataagcagttggaggaaagaaaagcacttttgaattgccaatgtctgctttataatataatttcgcaagctggcgaggctctttatgattacgttcagacacattcagaggtgtcccacgtggaggtccttgcgcatgtctcatctattctcaaggaatttgggttttgccccaaggaagagtacattgacaccatgaacctgtctccttataacctggataatttttacagcgtcgtatttcaggaaggtcaaaccaagccagttgaacaaacgtcttctccgaatgctgcagagaaaaagggctttgcagccccatttctcttactagaaatgagcatcatcttacagagttttgttcagataacaacagcaaaagactag

SEQ ID NO: 10870 - DNA, 285 bp, Oryza sativa
  Clone ID: TFbOSC28352j.C1.o1.fg
atggggaagcaggagcaggagaagatgctcctccaggccgcctacgatgacaacctccgcctcctcaggaagatggcgcgagggctggacaccgggcagggcgaggctgccgtcgtggcggcggtggcgggcagggccgacgggaaccgcgctctccacctggcggccgcccgaggaagcatggatgtcctcaggtacctcgtggaggacctccacctcagcgtcaaccagttcaatgccaaaggtcttgcattgcctctcttccgttctattttttcagtttga

SEQ ID NO: 10871 - DNA, 1389 bp, Oryza sativa
  Clone ID: TFbOSC900150j.C1.o15.fg
atgtccagggcaaacagtcgacagacaaaggcacaaagctgtgaagggctgaatgctgaagggatcgccggcggcccagcgtggggtgaacttgcagaggcgccgtggagggcgcagggcgatggaggcggattggcggagactgccgccgcactgtctgtactgttagagaagtgcaagaatgtcgaggtcaatgtacagcaagaagaccaacaaaggagtattcctcttctcttgtacctcactagtcaaagtgacaaaaatgggagcactcctcttcactttgctgcatcgttgaaaactagtattgaaggtttcacatcgagattatgtgaacattttcgcccgaaacaaagcccaacaacattgcttcttggactcaatgaatctgctatatatcagccagacaacagaggatcatatcctatacttgttgctgcctccaatgggatactcaaggttgtcataaccttgctcaaaaggtatccagattgtgccactttgcgtgacatccaaggaagaactttcttccatgttgccgtggagaagaagcggcgtaatatcgttgcatatgtgtgtgaaaggccaggattttctcctatcttgaatatgcaggacagccatggggatactgctctacaccttgctgtcaaagccggctaccacatgttaatctttcagaacccacgatatatgataagtcaactattagcactttctggaggtactgttggttacagtcgccaggaccacttcttcgaaaaatacagcaagaaaagagacgaagtaatcgattcaaacgatatgacaagtgcggcacaggttctcggcatttcttcagcgcttatagcaaccgtgacatttgcagctgcattcacgttgcctggaggttacagagcagatgaccacactgatggtggtacaccaacacttgctgggagctacccttttgacgcgttcattatctcgaacagcctagcattcatttgctctttgctagctaccgtgagtctgctctactctgggatacaatcgagggacatctccatccggcgcaggtactacgcgttctctatgctcttgatgcagagttcaactacgagcttcactgttgccttcgccatgggaatgtacctggtgctagctcctgttactcttaatgcagcagtgtctgtctgcatcatagcatttgtttctctgctacctggaaatatggaaatcggggtatccctagctatcgcaaacacattgaggattagattgggaatttgggcagcgatgtcccaagcaaggccagttctcctgttcacgtggaaaagagtttggtcctgcataattatctttggattgcctggattgatgaagattcatagaaccaaaatggcttga

SEQ ID NO: 10872 - DNA, 1902 bp, Oryza sativa
  Clone ID: TFbOSC400095j.C1.o16.fg
atggaggacgcgtccaagtacgcgcacagcccggcccacctcgccgtggtgcggcgggaccacgcctcgctccgccgcctggtcgcggggctcccgcgcctcccgcgcgccggggaggtggccaccgaggaggagtccatcgccggcgaggccgtggccgacgcggtctccgccgccatcgaccgccgcgacgtgccgcggagggagaccccgctccacctcgccgtgcggctccgcgaccccgtcgccgccgacatcctcatgtccgccggcgccgactggtcgctccagaacgccgacgggtggtccgcgctccaggaggccgtctgcacgcgggaggacgccatcgccaccatcatcgcgcgccactaccagcccctcgcctgggccaagtggtgccgccgcctcccgcgcgtcctcgcctccatcaaccgcatccgagacttctacatggagatctccttccacttcgagtcctccgtcatacccttcatcggccgcatcgccccctccgacacttaccgcatttggaagcgtggagctgcgctgcgtgccgacatgacgcttgccggcttcgacggcttccgcatccagcgttcggaccagaccttcttgtttctcggggatggtgctcgtcctgaggatgctgggggcaaagagttgcacccaggttctctcatagtgctggctcataaggacaaggagatcacagatgcattggagggagcaggggtgcaaccaacggaggccgaggtcgcacatgaggtggcgttgatgtcaaagacgaacatgtatcgtcccgggatcgacgtgacgcaggcagagcttgtgcctcatttgaattggcgccggcaggagaggacggaagccgttggacattggaaagctaaggtttatgatatgttaaacgttctggtgactgtgaagtcaaggcgtgtgccgggggcgatgacagatgaggagctgtttgcgatggagggggaggagaagaatgggaggggcactgaacttgacgcggagctggatgaagtgttgacagccgaagagaggaaacagcttgattctgcgttgagaatggggaaccaggaagaagaatttgaggagaggtgcgaggaaggtgatggcggggctgatcatttggatgcaaatggcgtggcaaaagataagaagggatggtttggttggggtggcaagaaaggcaccaagaatgacgagaaaccatccaaggcgaatcaagggagtaaggatgaatcaggtgacctaggaaagggaaaggagaagaacagcagcaagaagaagaagggtgcatcatcaggggattctactaaacatgaaagtgaatacaagaaggggttaagaccagtgttgtggctgacaccagatttccctttgaagacggatgaactgatccctctgcttgatgtcttagcaaacaaagtgaaagctgtcagaaggcttagggaactcttgactactaaactgcctccaggcacatttccggtgaagattgcgatacctattgttccaacaatacgagtcatcgtgacattcacaaagtttgaggaattacaacctttggatgagtttgctaccccaccctcaagcccaacgcaattccaggatgccaagggcaaagaatcagaaggatcaggctcatggtattcgtgggttagaggggggcgtggtgcacagtccagtgatagtggtgatagccgtaactggaaagatgaggttgatccattccaaataccttctgactacacctgggttgatgccaacgagaagaaacggaggatgaaggcaaagaaagccaagaacaggcggggctcaactcggaaacaatcatcgaaaagcacctcgtcggaaggaggtcacccgatgatggatggctttgaggagtaa

SEQ ID NO: 10873 - DNA, 1334 bp, Oryza sativa
  Clone ID: TFbOSC101172j.C1.o1.gp
ccttgtcgaacagcttctgctggtactggtccagcgcgagcatctcgaggtcgaagtcgagctcccgcgcgccgagcgccgtcttgaggcggctcgctggggacgacggccaggcggggctcatcatcgccgccgccgccgccgccatgtcgagcccgttgggcggcgaggagcgcggcgacgatacggtgggctgcatgccgacggacacggcggaggggttgacggcgcggagctcgtcgggcttgtgggcgaagaagcagatgcggcgcgcgcagccgacctcgtccttgcagaggcgcgtcctgtactgcgccgggtggagccagcactcgaacacgccatgggcgtactcgcacgcgtcgcccttgcggcacgagccgcccttgcggaactccgggcaaggcacgcagctgtaggagtagcggcgagggtcgcggcggcgcgcgttctcgccggggtggacgaaggggcactcggtccagtcatgggagtaggcgcgggagcacggcttcaccttgaagctgtacatgcggaactcgtcggtgctgaacagtccgctcttgaggtcgggcagcgtcaggtcaggcgggtactccttcttcgcctcctgcggcggcggcggcgacggcggcgaggccgacttcttcggcgacgacgacggcgacacggccggcgacttgagcagcagccggatggccttctccgccgcggtggcgcgcgggaggaggtcaccggcgcggagccccgaagccgagagcgcgtcgaccgacgcccccgcggcgagcaacaggcgcgtggccgcgaccgcgttcgccgcgccaccggcagccgccatgtgcagcggcgtggccccatccgtctccgacgcgcgcgcggcctccgccggcgctgccgccacgacatacccaagcacccccgtgctcccgtacagcgccgccaccatcgccgccgtcctccgctccatcccgagcctcgccacgccgctcgccgaaggcccataccacaacccagccacgccaagagacaccttctcctcctccacgaccctcctcaccgccgccacgtcgtccgctgccgccagctcaagaagcaaggacgccgccatcaccgtcgcctccttctgctgctgcggcagcggcggtgtggacggcttgcgcggcccagagcacatgacacacacaaacaaacacgcacgcagagtgttcgaccgagttcttgttagtcaaaacaaacacctagttcttgatttcttgttaaattcagagaggagaagaagaacaagaagagggagaagaggaattctcgatcgatggatggatttggagagtggt

SEQ ID NO: 10874 - DNA, 1740 bp, Oryza sativa
  Clone ID: TFbOSC900232j.C1.o15.fg
atggcggcgtccttgcttcttgagctggcggcagcggacgacgtggcggcggtgaggagggtcgtggaggaggagaaggtgtctcttggcgtggctgggttgtggtatgggccttcggcgagcggcgtggcgaggctcgggatggagcggaggacggcggcgatggtggcggcgctgtacgggagcacgggggtgcttgggtatgtcgtggcggcagcgccggcggaggccgcgcgcgcgtcggagacggatggggccacgccgctgcacatggcggctgccggtggcgcggcgaacgcggtcgcggccacgcgcctgttgctcgccgcgggggcgtcggtcgacgcgctctcggcttcggggctccgcgccggtgacctcctcccgcgcgccaccgcggcggagaaggccatccggctgctgctcaagtcgccggccgtgtcgccgtcgtcgtcgccgaagaagtcggcctcgccgccgtcgccgccgccgccgcaggaggcgaagaaggagtacccgcctgacctgacgctgcccgacctcaagagcggactgttcagcaccgacgagttccgcatgtacagcttcaaggtgaagccgtgctcccgcgcctactcccatgactggaccgagtgccccttcgtccaccccggcgagaacgcgcgccgccgcgaccctcgccgctactcctacagctgcgtgccttgcccggagttccgcaagggcggctcgtgccgcaagggcgacgcgtgcgagtacgcccatggcgtgttcgagtgctggctccacccggcgcagtacaggacgcgcctctgcaaggacgaggtcggctgcgcgcgccgcatctgcttcttcgcccacaagcccgacgagctccgcgccgtcaacccctccgccgtgtccgtcggcatgcagcccaccgtatcgtcgccgcgctcctcgccgcccaacgggctcgacatggcggcggcggcggcggcgatgatgagccccgcctggccgtcgtccccagcgagccgcctcaagacggcgctcggcgcgcgggagctcgacttcgacctcgagatgctcgcgctggaccagtaccagcagaagctgttcgacaaggtgtccggcgcgccgtcgccgagggcgagctggggcgccgcggcgaacggcctcgccaccgcgtcgccggcgagggccgtgccggactacaccgacctgctcggctccgtcgacccggccatgctgtcccagctccacgcgctgtccctcaagcaggccggcgacatgcccgcgtacagctccatggcggacaccacgcagatgcacatgccgacctcgccgatggtgggcggcgcgaacaccgcgttcgggctggaccactccatggcgaaggcgatcatgagctcccgcgcctcggcgttcgccaagcgcagccagagcttcatcgaccgcggaggccgcgccccggcggcgcgttcgctcatgtcgccggcgacgaccggcgcgccgtccattctctcggactggggctcgccggacggcaagctggactggggcgtccagggcgacgagctgcacaagctccgcaagtcggcgtcgttcgcgttccgcggccaatccgccatgccggtggcgacgcacgccgcggcggcggagccggacgtgtcatgggtgaactctcttgtcaaggacggccacgccgccggcgacatattcgcgcagtggccggagcaggagcagatggtggcatga

SEQ ID NO: 10875 - DNA, 2682 bp, Oryza sativa
  Clone ID: TFbOSC400269j.C1.o25.fg
atggacgaaccatcaattgtgaaacttccagaatatgaactgccagatgctttccgtggagaaattgatggcaaaggattagaagaaggagcaaccatagataacatggatccttcccgcccttttcttgttctcaatgtatttgattgggataaggtcgacgagtggatagctctaaaaactgcttggatcgccaagcggttaaaaaatgatataatcatcccggacccagtacctcagatcgggcgagacgccttctttgatattactccccgcttgaccactgtattggaaaaggatagcgtacggtgcttcctccccttgtttgtgcaatgtgagtcgatcatgacgtatcagtgtgccatcacctcagaaaccttaacccacatggtcaggcataatgccttgcgatgcgcaaaagttgtattggagggcaaggcagcagaactccgttgtaagcacgctaatccaaactgcatgaatccgtatggatattttgcactccatgaagctgctgaacggttctctgctgacatgaccaagttgctcttccgccatggtgcttcagcaaatgtacgcacagccagcgatgccggaattcagggactactaccgcttgatgttgcggttgaaaatgcttgcatgcacaagtatctggaggacaatctatctccgactccaatgcagtatcatgaggattacatctacaagctcattcatctcctctgcctacctgagatgaaggttttcttggatacgattagacttcttgccgagaaaacagataatcttgttgatgagctctggaattacatgaagaacggcaagcttgtacagaccgcagttttactcctggcagctcaaaaacatattcgcaagatcaaacctgatggattttgtattatcacgcaccatttatttaaagagtatgctaattccctaagatgtgccaaaggtgatactggagaggcgcagaagcagctggaggaaagggaagcacttctgagttgtaaatccgagctttttagtataattttgctagctggtgaggctcttgataactacattcaagcacattcagaggtgtcccatgcggaggttcttgcacgtgtctcatctattcttaaggaattcgggttttgccctaaggaaaaatgcattgacaacataaaactgtactgctccttttgtattcaaaatcataattttttgtctccttatatgtacgggacgtcttactgtgacatatttcacaaaggtgcttattggcatgtagctgttgataatcatgtttctgcaaactgttatgcggttcatgtttctctgagatttgggaggatggcaggacctcatggcccatgtcgtgtattcggctccttgaaccttattgatgtgcgatatctggacacgtgccatcgcatgagccgatctcgaaagaactctgagattaagcgtgcttggtctgcagcaatttcgggatgggtgaccgaccagaaaattcttctcgggtgcgaagcgtgcttggtctgcagcaatttcgggatgggtgaccgaccagaaaattcttctcggagcttcatcctggagaggccacgctacacatcacggctgcagttgaaagtggaggtgatggagaagcagagtatcgacttcggcaaggttttggaagagatccaggagtcactggtggtgctgaatctcaagcaaggagctgcgcgaggaagtgttcgatctgcgtcaacaaatggagctcatgaacaaggcttcaagttcgtctgcggcgaatccttccccaactcgagttccgttgatggacgaggagaggaaggctccgctactccctacgccgcctacgccacatgtggctgtgctaggaggaggggacaaatggcctcatggccgctgcgatgcaacagatcaccggggaagggtttcggggatggttaccaccctgatcccgactccggtcaagagtatgatttccctaccaatcctctaataatttcgagcaatctgaatttgggtgtggagaaattggatttggagacagcattggcaattgcttctttgcaagaggaggttattttggaatcctctgcagtgtcagtttcaaatccgaagaagattgacaatgggttgcagattcgaccaaatcttgcttacaagggtgctttacctttgcccttaccaccaaatcgtggggtgactactggcagtgtgtctcgaatggaagatcgcaagactcttgacaacggtaagttggtgaacggtactgataagatttctgcgctaaaggctcaacgcagagctcatggtttatgttatatttgtgctgagaaatggtctcctactcacaaatatgctaatactgttcagttgcatgctgttcaggaattacttaccaccctgggttctgaaattttgtatgatcaggaatttactgaagaatgtgaaggatctgacagtcagggcttaatggctatttcagttcagtcaatgcatgggtctgaaactatgggctgtatgcgtctgttaggatttattcaaggtagagaggtgctgatccttgttgattctggcagtacagctggtttccttagctctcaggttgctcagactatctcaatgcgtcacgcaattttgctggacctcatgttccacatagaccaaaaactatgttag

SEQ ID NO: 10876 - DNA, 804 bp, Oryza sativa
  Clone ID: TFbOSC900390j.C1.o18.fg
atggtttcattgctactacagtggaaaccaacacttgctactaaggttgacagcaacatttgtgacaaccaaggccaaagctttctacatgcagcagctatgaagggccattcttccatcatctcatacgctgtaaagaacagcatgcttaagcatcttttgaatgcccaagacaaagaggggaacacgccgctccatttagctgtcgttgtagaggaatgcaaggttgtttctaagctattatcaagtggagaggtaagtttagtagtaaagttgcatgagtcaggagcacagtttcaaccacaaaggcaagatcttatagagaaatggaatgctcaagacatcatgaaatggagagacaatacatcaaaaaatctcgctgttgtttcaacacttatagcaacgattgcctttgccgcagcattcaatgttcctggatcatatggagatgatgggaaagcgaatctagcgggtgaccccatgtataacgctttcctgattctagacaccatctccatggttacttcagttgtggcgacaatactgctggtatatgggagggcctccagatctcatcgctcatggctgagctttgtgatctcaatgtactttctgtggctgtcaataaattgcatggtgttcggcttcttcacagcaatagccgcagtaagcaagaagggcataaagattgcaatgtcccaactgatctaccatgggatgtacatcttgacaatgcagcttacatttttagcaatgccagggtcatttataagcactatgaagttcctcgtattttatggatga

SEQ ID NO: 10877 - DNA, 1215 bp, Oryza sativa
  Clone ID: TFbOSC21353j.C1.o1.fg
atggaccgcccgcggcagcagcacgagccggagcatctcggcggcggcggcatcgacgtcgaggtcgagctcgacccggaggacctccagccgtcggtgcccctcaagaaggtccccgcgggggacctcttcgaggcggcccgcgcgggggactgcgcccgcctcgccctcctcctcggcggcggcgccaacgtcaacgagcgcgaccgctgggactccgtcgcgctctactacgcctgcctcgccggccacgccgacgccgcccggatgctgctcgaggccggggccgtctgcgccgagcgcaccttcgacggcgaccgctgccactacgccgcgctcaacctccgcctccggaggctgctcaaggcgttcgaggccaggcccccgccgctgccgccgctccccgccgcgctcagggccacgttcctcgcctgccccgccaaccgcgccgccttcctcgagatgctccagtggaccgccggctccgaagccgccgccctcgccgctgctgctggatttgggccaacggacaatccatcaagtactagcctattccctccggacattacattctacgtggatggaaaaccaattgaagctcatcgggtcattctttgtgcccggtcatccttctttcggaggaaattcaatacagactggaaagacaggaaggaagtgagattttctagccagaagttatcttttggtgccttgtacagccttgtccatttcttctattctgatagactcgaagtggatgtggatgatatggaaaatttggcgcgggcgtgcaaagtttgtaagtgtgagggtttgcaaaagatattgattaaagaagctactctccagagatatgcagaacacaagtcaccgagagatttggacagttcacagaagaggttcattttacatgggcaatccttgccagaggaggatcgccttccatcagccctgcggcatatttttgaggaatgtctagctaactcaagagaacaagaatgttataacgatgaatcaaatgaaatgagcagagactctggtgtagatgctgctgctgatctttatataaaagtgattttagcctcaagatcagagtactttaaagctaggctatctagaaacatggattttcttgaagtcaagagtgggcttcaatcaactcagagccttccttttcttgaagagcatgacatgagtacagaagcatttgaaaag

SEQ ID NO: 10878 - DNA, 282 bp, Oryza sativa
  Clone ID: TFbOSC28359j.C1.o1.fg
atggaggagaaggggatggggaagcagcggtgggagaagatgctcctccaggccgccttcgacggcaaccttcgcctcctcaggaagatggcgcgcgggctggtcacgacggggcgcggccgcggcgaggcggacgtcctggcggccgtggcggacggcggcagcgggagccgcgcgctgcacctggcggccaccgaggggaggatggacgtcctcacgtacctcgtcgaggacctccgcctcgacgtcaaccaaaccaacgacagaggttctgatctctga

SEQ ID NO: 10879 - DNA, 3078 bp, Oryza sativa
  Clone ID: TFbOSC400945j.C1.o7.gm
atgctgcgggaggcggatgagagggcagcggagggcggcagaagagtgccgctcgacggcagaagagcgctgctcggtggcagacggcaggaggtttctgtgttcggacttttgggttcatcggaggtggcaggcttggcagaacggccaactactgagattttagctagccgaagacctctagttggctttagcaatgtcatcaaaaaggtggatgatattattgatggaggtataacacccttagcatgtgcggcatacaatggttcagttacaagcatgaaaacgttgttgcaggctggagctaatgttcagatttcaaagccaatcggcaaagctatagtagctgacctcacttcatctgaatctatggttcagattctacttgattctggtgctaatgcagacgcaattgatgaggacgatgtccatacagcagcaagagttactgcgctgcgtgagcgcatgtttaatgctttggaaaacataaactacttgctagctgatatttgctgtaaagcgctgagaaatgatgacaagggcaaggaggttatgtgtttgaaggcagcgttggcgctgaaccctcaaaatgagagagctgaaagtcttttgaggcacggcccggcggccggccgggccgacacgggcccgacccccatcgggccgggccgctcctcggaggacgccacgacggcgaccgggaagaagatgaacccgctccctgctctggccagccggctgtgggaggcgagcatccgcaagctcaagtactccaccatccttcgcggctccgtcgtcccctccggcggcaccttcgacggaccggcggccgccaccggcaatgccgctggaggtgaccccatcacgctcaccccaagcctctccgtcagctcctccacctccaacaccatctaccagtacgacgacggcgacgaagacatcgactccgtcctcgacgacgttgacaccgacgacgacgacgtcgacgaggcgtcgctcggcgagcccagccactccgaccagctgctgcccagcggagacttctaccagggcgacctacgctgtgacctcccccacggcgccggcaagtatctctggacggacggcagcatgtacgaggggtcgtggcgcggcggccgcgcggccggccgcggcaagttctcgtggtcgtcgggcgccatctacgagggcgacctcgccggcgggtacatgcacggacaggggacgtacatcggcgagctcggggacacgttcgccgggctgtgggcgaacaacctccggcacggccgcggcacgcaggcgtacgtcaacggcgacgtgtacgacggccactggcgcgacgggctgcaggacgggcacggccagtacatctggcgcggcggccacgagtacatcgggacgtggaaggccggcgagatgcacggccgcgggacggtgatatgggcggacggcgaccggtacgacggcgcgtgggaggacgccaagcccaaggggcagggcacgttccggtggtccgacggcgggatgtacattggcctgtggtgccaggagtccggcgagacgcagggcaagggcgtgtactacccgccgtccggtggcccggcggtgccgttgccccgggaacccaagggggtgatcacgaagctgctcgaggagctggagatgtccgaggggaagacggtgtcgctgctgccgtcacagaaggtgctgacatggcctggggtggagcccgtgacgaagaagccggtgtggctgccgccggaggtcgccgctgaccaagggatgtggcggccgccggaggttggagctgaccaagggaggaggtcgagcaggaggaacaacatgtcgtccgacattgacagcctggttgagggggaggacggcggcgaggagagtcgcaacgacaggtcatgggtgcggacaccgtcgtgtatgcgcgcgccgacgatgccgaagccggggaagaagcagggggagaccatctccaaggggcacaagaactacgaactgatgctcaacttgcagctgggaataatattagatgtacctatcattgccacccacttctcagcggagcgcacaatgtcgctgaggggagggggtgaatccgccggcagcgattctccttgtcggcgagaggaggccaagagtaggactcctcggccacagccgggctcagccggcgagcgtagcgcggcggcctccgctgagatgtcgtcgaggggagggagcaaatcttgcggaggcgattcactgcagccaggcgaagccggcgagcatggtgtggcgccctccgccgccgccgtggagacaagctccgaggtcgccaaggtcaggggccaggcggccacgccctactcggctgccccctttgatgaatccatgctggtgcagcattcaacaggcaaggcgatggggaatcgtgaggctgacgttgctgctgttggtttgggtccaaaaaactcaggcctcaagatctgtccagctcgttccttgggacgacgccgcggaggtggccgggagggagcagcggggcacgctgtcgatgcggtggcggaggaggaggacgccggccaccgcgccgcggctggatccggcggggagggcgtttcatggagggggggtgggcggccgaggtacacgacggcggactcgctggcgttcgtggcggcgagcctcgggaagggcaggtggcgcggcggcggagggtggaggaggtgggtggcggagaggtcgtcgctgcggcgggtgatcggcgccgccacgctgcgtgacaccgtcacgccgctgctcgtcccgtgctacgacctcgccaccgcggcgccgttccctcttctcccgtgctggagccgttcctcttctcccgtgccgacgccgtcgagaggacagcttcgacttcaacggacgacaaccgtcgttgtcgttgtcgtcgccatccccaacctcctcaccggacgacactatccagaacgccgcagcaagaatcgggtggagtccaaatcggctacgatcaaggatcaaatcaattggcacgctcatacacctaaaggcaagcttttggacctgcactggagttaa

SEQ ID NO: 10880 - DNA, 218 bp, Oryza sativa
  Clone ID: TFbOSC28352j.C1.o1.gp
caagatatcttctcgatcacggttctgatcctacgattgataaatcagtgttaccttttcatgctgctgcaacgaaaggacactgcgaaatagtagagttgtttctttcaaaaggagttgatgtggatttatattctatcgctgggaccccattgctggcagctgcgattagtggccaacatagcacgatgaagatcttattggagcatcatgctgat

SEQ ID NO: 10881 - DNA, 1299 bp, Oryza sativa
  Clone ID: TFbOSC9793j.C1.o1.fg
atggcatttaagtgtaacatcacctcagaaaccttatcctgcattgtcaggcataatgccttgcgatgtgcgaaaactgtattggagggcaaggcacctcagctcagttgtatgcatgccaatccaaactgcattaacccatatggaatttttccactccatgaagctgctgaacggttctctgttgacatgatcaagttgctgttctgccatggtgcttcagccaatttacacacagtcaatgatgctggcattcccggactactcccgctccatgttgcagttggaaatacttgcttgcataaatatctggaggacaatctatctcctgtgcagtatcatgaggattatatctacaagctcattcatctgctgtgtctacctgagatgaaggtttttttggatacagttagactgcttgctgaaaaaacagataatctagctgatgagctctggaattacatgaagaatgacaagcttgtagaatccgcagttttactcctggcagcccgaaaacatatccgtgagggcaaacctgatgggttcgacattatcgcgcaacgtatatatgaggactatgattccctagtgtgtgataaaggtgatactgcagaggggcagaagctgctggaggaaagaagagcacttttgaaatgtaaatgtctgattgtcactataatttcgcaagctggtgaggttttggataactacattcaagcacattcagaggtccacaacaatgaaactgacctgatgaagttcatgttagcgagaaccactatcatgttgtccaccatgaaatatgatttagtgcccaatgtggaggtccttgcgcgtgtttcatatattcttaaggaattcgggttttgccctaacgaagaatacattgacaccatgatcctctgtccatataacaagatttcttacagcgacatagttcacaaagatgtaaccaaggctgttgcacaaatgtctacttctctgcctgctgcagaaaaaaaggctgcgagaaaaaaggcacttaaaggatgggatccaacattcataaagagaaattttttcccctactggagatcagtattaggggcccagctgtctgtatccaatggagcagcagatgagaagtcaatgcttcatcgtccacagttccgtaattcagtaaatgctcacgaaggtgctaaagacatgagcaaaaaggtgcctagtggcatgttgctgttgataaccataggtctgcaaagtattatgctgcgcacgtcttttgcggacaccttaagaaggttgcgaatatacatgtga

SEQ ID NO: 10882 - DNA, 1287 bp, Oryza sativa
  Clone ID: TFbOSC400769j.C1.o1.fg
atgatgtgtgaaatgacaaaattacccctagttcctttctcacatgtccagagtagaggaggggccgatgtctgtggggactccttccccggtggcaacaatggtttgcgtgggcggcaacgctgtagtgggggcgaccacgacgccctctccacaagcgccaaggccacctccgaccacctcgctgcatctggttgcggcgacgtccatggccactccctcttcttcttcgctccaccctcgcttctacctctccgccatcgacgaggaccgtccctggtaccaggccgacaacgatgcggcggggctcgaggagctcctcaccgcatgcccctcctcgctaacgggcccacgctgtggtaccagctcgacgacgacgtggcagggctcagggagctcctcgccgcgtgcccctccctcgccgacgagcccgcgccatggtactccttggctcgcggcacggaaccgctaaccccgctcatggtcgccaccgcgtacggctcagtggcttgcctcgacgtgctcctctcgccgccctacctcgtggaccccaaccgcgcctcggcctcatcgctctccaccccactccacctcgccgccgcgggaggggctacctctacccccacatcggtttcccgcctcctcgccgctggcaccgacaatgacaacgacgaggtcgaagagcgacaaggtgaggaagggagagctcgaaatctgcaaaaattatcggataattcgggtgaatttgagaggggcagtgtggatttacaaatgatccgatttgaagagctacttgttttttttttctcctttggatttatgggctatttcagtttgttgctacttaaaccttaccaaattttgggaaataaaccgaaattttcaactctgaagggaggtgatgggatgcgcgacccttctctcatgcacatgggtggccctcactgcacgagctcaatttcagatgatcatgaggagctaagctcgatttctggcgttttcagcatgcctagctcaagaccatacaacgtccctcccctgcacgcgggggcgtctcaaatacacctgatcaaagaaaaacaacaagaacaacaaatcaggagagcccaaactccaatccggaagacgctagcgtgcgcggaaacatcgcgtgagacgccaagcttttgcctaattgcctcccaggggaggcatccaacgctgtccgtccattctcccctccgcgtttctgatgacgaactgactagcgacaatgatcgccctctgctacaggctacagcagcttaa

SEQ ID NO: 10883 - DNA, 585 bp, Oryza sativa
  Clone ID: TFbOSC421348j.C1.o4.fg
atggagatggaaggaggtgataatgacttcgccaaagctgttttagctgggctggacaaatgtgaagagctgggatatgaagatgttgaattgtggagcgacagtcagagagcatgtggcgtcctgagtgattttgaaactatcaatatggatgacaggaatcggatggagtgcatgcttcttaggtttaagtcaactaggtttaaaagattggtctctgtgcaaaaaccaagggaaatcaaagattggtctctgtgcgaaatcttgttcatggttgatgatattctcatagagaaagttcattcacgctaccttctgcgtaatttgctaaagaagtggtctccatatttgagaggacaatccatctatagcatcacacgtacgaagctcacaaggtacatcattcgtacgaagctcacaagggacatcatccgccatccgataggagccgttccactccatgaagctgctgaacggttctctgttgacatgatcaaattgctcttccgccaaggcgcttcagccaacattggtcctaattcagattttattttgctgggagatttggtcctaattcatacttaa

SEQ ID NO: 10884 - DNA, 1301 bp, Oryza sativa
  Clone ID: TFbOSC900089j.C1.o35.fg
gtcaacttatgttggacagaccacttgcaaacagtgctcatcattactgcaagattttatgtgtgagaccaattgctgctcctttttcaacaaaagtgaatttcagggtagaaggcttgaacctagtcagtgattcctcaaggctaatttgctcatttgaagggagttgtatattccaggaagacaccgataatatagttgatgacgttgagcatgatgatattgaatatctgaacttctgttgtcctctccctagttcaagagggagaggatttgtggaggttgaagatggtggatttagcaacggcttcttccctttcataattgctgagcaggacatatgctctgaggtctgtgagctggagagcatatttgagtcctccagtcatgaacaggcagatgatgacaatgccaggaaccaagctttagagtttctaaatgagctgggctggcttcttcatagagcaaacataatatctaaacaggataaggttcctctagcatcctttaacatatggagattcagaaatcttggtatatttgccatggagcgggaatggtgtgctgtgaccaaactgctgttagatttcttatttactggactcgttgatatcgggtcccagtctccagaagaggtggtgttgtcagaaaatctgctacatgctgccgtgcggatgaaatctgcccaaatggttaggtttctgctgggatacaagccaaatgaaagcctgaagagaactgcagagacattcctattcagacctgatgctcaaggcccttccaaatttacccccctccatatagcagctgccacagatgatgcagaggatgtattggatgcacttactaatgatcctggactggttgggatcaacacgtggagaaacgcgcgagacggcgcaggcttcaccccagaagactacgctcgccagaggggcaacgatgcttacctgaatatggtcgagaagaagatcaataagcatcttggcaaaggccatgttgtcctcggcgtccctagcagcatacaccctgtaataaccgatggtgtgaagcctggtgaagtcagcctggagatcggcatgaccgtgccgccgccagcaccgagctgcaacgcctgcagccgtcaggccctgatgtaccccaactcgacggcgaggaccttcctgtacaggccagcgatgctgaccgtgatgggcatcgccgtcatctgcgtctgcgtcggcctgctactccacacctgtccaaaggtttatgcagctcctacattcagatgggagctgttagaacgtggaccaatgtga

SEQ ID NO: 10885 - DNA, 2994 bp, Oryza sativa
  Clone ID: TFbOSC401265j.C1.o5.fg
atggaggctgcccgggtcggggcgcagagccgccacctgtacggcggagggctaggcgagcctgacatggacaggcgcgacaagaggctgttcggctgggacctcaacgactggcggtgggacagtgaccgcttcgtcgctacgccggtgcccgccgcggaggcgagcggcttggcgctgaacagctcgccgtcttcctccgaggaagccggggccgcgtcggtgagaaatgttaatgctagaggtgactccgataagaggaagcgggtggtggtcattgatgatgatgatgtggaggatgacgagctggtggagaacggcggcgggtcactgagcttgagaattgggggtgatgctgttgcccatggagcaggggtgggtggtggtgctgatgaggaagacaggaatggcaaaaagatcagggtgcagggaggcagtcctagtggccccgcgtgccaggtggagggctgcactgcggaccttactggtgtgagggattaccatcgacgacacaaggtctgcgagatgcatgccaaggctaccactgctgtggttgggaacactgtccagcggttctgccaacaatgtagtagaaagtcttacattgtgaaacggagggactattatggaagtaatgattttggatcgtaccttttgattttgaagaataattttagattccaccctcttcaagaatttgatgaagggaagcgaagttgccgccgacgtttagcaggccacaacagacgaaggaggaagacccgccctgaagttgctgttggtggttctgcatttactgaggacaaaattagcagttatttattgttgggtctccttggagtatgcgccaatttgaatgctgacaatgctgagcatttaagaggtcaggagttgatatctggtcttttgagaaacctgggggcagttgccaaatcattggatccaaaagaactctgtaaactcttggaggcatgccaaagcatgcaagatggatcaaatgctgggacctctgaaacagctaatgctttggtaaatactgctgtagcagaggctgcagggccatctaactctaagatgccttttgtgaacggtgatcaatgtggcctggcatcatcatctgttgtaccagtacaatcaaagtctcccactgttgcaactcctgaccctccagcatgcaaatttaaagattttgatttgaatgacacttatggtggcatggaaggtttcgaggatgggtatgaaggttcacctacaccagctttcaagacaactgattctcccaattgtccatcatggatgcaccaagattctactcaaagcccaccacagactagtggcaattcagattcaacatcagctcagtcactgtcaagctcaaatggagatgctcagtgtcggactgataaaattgtcttcaagcttttcgagaaagttcctagtgatttacctccagttttgcgatcacagattcttggttggttgtccagtagccctactgatatagagagctatattagacctggttgtattattttaacagtatatcttcgcttagttgagtctgcatggaaagagctctctgataatatgagctcatacctggataagcttctgaatagttccaccggcaacttttgggcatctggtttggtatttgtaatggtacggcatcagatagctttcatgcataatggtcaacttatgttggacagaccacttgcaaacagtgctcatcattactgcaagattttatgtgtgagaccaattgctgctcctttttcaacaaaagtgaatttcagggtagaaggcttgaacctagtcagtgattcctcaaggctaatttgctcatttgaagggagttgtatattccaggaagacaccgataatatagttgatgacgttgagcatgatgatattgaatatctgaacttctgttgtcctctccctagttcaagagggagaggatttgtggaggttgaagatggtggatttagcaacggcttcttccctttcataattgctgagcaggacatatgctctgaggtctgtgagctggagagcatatttgagtcctccagtcatgaacaggcagatgatgacaatgccaggaaccaagctttagagtttctaaatgagctgggctggcttcttcatagagcaaacataatatctaaacaggataaggttcctctagcatcctttaacatatggagattcagaaatcttggtatatttgccatggagcgggaatggtgtgctgtgaccaaactgctgttagatttcttatttactggactcgttgatatcgggtcccagtctccagaagaggtggtgttgtcagaaaatctgctacatgctgccgtgcggatgaaatctgcccaaatggttaggtttctgctgggatacaagccaaatgaaagcctgaagagaactgcagagacattcctattcagacctgatgctcaaggcccttccaaatttacccccctccatatagcagctgccacagatgatgcagaggatgtattggatgcacttactaatgatcctggactggttgggatcaacacgtggagaaacgcgcgagacggcgcaggcttcaccccagaagactacgctcgccagaggggcaacgatgcttacctgaatatggtcgagaagaagatcaataagcatcttggcaaaggccatgttgtcctcggcgtccctagcagcatacaccctgtaataaccgatggtgtgaagcctggtgaagtcagcctggagatcggcatgaccgtgccgccgccagcaccgagctgcaacgcctgcagccgtcaggccctgatgtaccccaactcgacggcgaggaccttcctgtacaggccagcgatgctgaccgtgatgggcatcgccgtcatctgcgtctgcgtcggcctgctactccacacctgtccaaaggtttatgcagctcctacattcagatgggagctgttagaacgtggaccaatgtga

SEQ ID NO: 10886 - DNA, 1842 bp, Oryza sativa
  Clone ID: TFbOSC400938j.C1.o12.fg
atgccggtccaggacccttcctcccccgtgccggcggcggcgcggccgaagcgcacgtcgtcggcgccgatccggccgtcggactacacgcacagcccggcgcaccaccgcgtcgcgctgcgggacgccgccgggctggcgggcgtcctccatgggctcccgccgctcgcccacccgagccgcatcctcaccgccgccgacgccgcccgcgaggcccgcctcgcggcgtccgtgtccggggcgctcgaccgccgcgacgtcccgggcggggacaccgcgctccacctcgccgtgaggctcaggctcccctccctcgcctccgcgctcgccgccgccggcgccgaccccacgctccagaaccacgccgggtggacgcccctccaggaggcgctctgcctgggttgcaaggacatcgccgcgtgcctcctccgcgcccaccgcctcgccgcctgggccaagctccgccgccgcgcccccgcgctgtccgcggcgctccgccgggtccaggacttctacctcgaggtggacttccacttcgagagctccgtcgtgccgctcctctcccgcgccgcgccctcggacacctaccgcatttggaagcgcggcgcggagctccgcgcggacaccacgctcgccggcttcgacggcctccgcatccgccgggccgaccactcgttcctcttcttcggcgaggaggccgacgccggcggccgccacctccccccgggctcgctcctcgtgctccaccgcggcaagcgcgaggtgcacgacgcgttcgcggcggcggcggccgccggcgacgaggattcggccacatctgacgcggccgcgtatcgaccggggctcaacatctcctccgcgaggctcgtgccgaggacgacatggctacggaaggagaagacggagagcgtcggggagtggaaggctcgggtgttcgacgtccacaacgtcgtcttctccttccgcacgctcaaggcagccaacgccggccgcaaggacttcaccttcgagctcgccggagacgacgacgacgacgacaacaacgacgacgaggaagacttcctccccctggagatccgcgacgatgacgaggacggcgacttcctggtcgccgacatccccccgcccccgtcgcgccgcagctgctacgtgcccggccggcgcagcgtggcggcgccgccgtcgcacatggcgacgccgcagaggcggcggaacagcgtggacgtgccgcggcggctcccggcgtgcgcgtccgtcggccgcggcgagggcggcgtgttcggccgccacgccaccacgacggggggagccaggtggaaggaggaggagacggtgaagacgctgcggccaaccgtctggctcaccgaggacttcccgctcaccgtcgacgagttcttgccgctgctcgacatcctggccagccgcgtccgcgccgtgcgccgcctccgcgagctgctcaccaccaagttcccgccggggacattcccggtgaaggttgccattcctgttgttccaacggtgagggtagtgatcaccttcaccaagttcgtccctctcctcgagccggaggaattcttcacgccgatgtcaagccccagcctgttggtgagcccgggtccgggatccatcatgcacaaaccagacactcagaagagctcctatttgaagtggggcttgaagaactccagatcgaagccggtgaacctgtcgcaggttgcggacaacaccgacccgttcacgatcccgagtgactacacttgggtaagcctcgggtctaagggccaagacaagaagtcatccaagactaagaaggggaagaccaaagagaccaagcttagctag

SEQ ID NO: 10887 - DNA, 804 bp, Oryza sativa
  Clone ID: TFbOSC8653j.C1.o1.fg
atgtcatcaaaaagctcgccaagggaactgactggaaagaagaaactgactaaacatgacgatgaagcattaaggtttattgagctggctgagaatggtaccgaccccgcaactatcgatgcatccgaagccaaggtggatgatattattgatggaggtataacacccttagcatgtgcggcatacaatggttcagttacaagcatgaaaacgttgttgcaggctggagctaatgttcagatttcaaagccaatcggcaaagctatagtagctgacctcacttcatctgaatctatggttcagattctacttgattctggtgctaatgcagacgcaattgatgaggtcatgtttgaggacccacccatcattgctgcagccaaaaggaaacagatgaatgttgtccaacttctattgagttcttccaccccaatcgaaggtgttgactggagcttgaatggtataatagcatatacagaatctgttacgtttaaagcagaggacgatgtccatacagcagcaagagttactgcgctgcgtgagcgcatgtttaatgctttggaaaacataaactacttgctagctgatatttgctgtaaagcgctgagaaatgatgtgagtacaacagagtgggacaggttgaggaatctcaatctgctttatctttcacacagtttccatggtcagaaacctgtcctgtcatctgacgccattgttaatatggccttggtttatcaaaaacaggacaagggcaaggaggttatgtgtttgaaggcagcgttggcgctggcccctccaaaatga

SEQ ID NO: 10888 - DNA, 3096 bp, Oryza sativa
  Clone ID: TFbOSC414561j.C1.o1.fg
atggcggagacacgcaagttcttgatgcccaaccagcccccggatatttcgcagatggtgctggaggctaggaagcgatggttgcgacccactgaaatatgcgaaatactctcaaactacaggagtttctctctctcgcctgagccaccaaacaggcccggaagtggctctctttttctatttgaccgcaaaacattaagatacttcagaaaggatgggcataactggaggaagaaaaaggatgggaagaccgttaaagaagctcacgagaaactaaaagctggcagcattgatgttctacactgctactatgctcatggagaggaaaatgagaacttccaaagaaggacctattggctgttggaagaggatttcacgcacattgttcttgtacactatcttgaagtcaagggtgtaaagcaaagttttagtcgtgctaaagaagaaattatgcagttatctggtgctgatagtccatcgtgttcaaattcgattactagtcagaaccagatgaccccacaaataatggatgcagctgaaagcccaattagtgggcagatttcagagtatgaaggtgctgaaccagcgaaattcggtgcagcagataattgcccagcaagctccagatacaaccctctcattgagatgcagcagcctctggatggaatcgtgatggataacattttatacccttcttcttcagccatctgtaaccaagtttcaggttatcatggtgaattgccaccaggaacatctaatctaaatggtcatacattttctcacagtgacatagctagaatgtttgatgattccagctctgggctaagagacatttccagaaccctgtttgattcaatgccttacgatgagcatttctcaggatatgcaaatggattcatggagccaactcttcattcttctttttccatgatagaggctaacaatctggaggatagctctcttctggagacatatacatctgaagctctttacactaacaacctcagccagaaggaagctgatgcactaagttttgctggcatatcatcgccagaggtgaatggtaataaatatactgaaggaagcaccaagcatccgctcctgaagcaattgtcattagatctatttaagattgagtcttctggtttaaagaaacatgacagcttttcaaggtggatgagtaaagaacttggagaggtggttgatttgggtatcaaatcaagttctgatgctctctggagtagcattgagattgtgaatgctgccgatggtcctagtgcaccaactaatgaacagttagatgcttatgcagtgagcccttcacttgcgcaagaccaactattcagcattcttgacatttcaccaagctgctcatatattggtttgaagacaaaggttctggtaactggtacattcctggcaagtaaagagaatgtggaaaattgcaagtggtcatgcatgtttggggatgttgaagtaccagctgaggttttagctgatggttccctacgctgctatgcaccagaacatcaatctggaagagttcccttttatgtgacatgctcaaacaggatcgcttgtagtgaagtgcgagaattcgagtaccgggattctgatgctcagtacatggagacatcacattctcaagccaatggtataaatgaaatgcatctacaaattcgtcttgagaagctactcactttggggccagatgacaatcaactgcttgtttgtggaaatgaaaaacttgagttaatcaatgctataaactccctgatgcttgatgagaaatggtcagatcagggatcaccatccggctctaaagatgttgtcaccccaaggaaccaaagtttaaagaaattgatgaaagaaaagcttcattgttggcttatctataaaatatatgattgtgagaagggcccaaatatactgggaaaggaaggacagggtataattcatttggcggctgcactgggcttcgattgggctataagaccaatactagttgctggtgtcaatgtgaactttcgggatgctcatggatggactgcacttcattgggctgcgtcttgtggaagagagcgaacagtgggcgtccttatagcaaatggagctgcagcaggtgcattgacagatcctacttctgaatttccttctggaagaactccagccgatttagcctctacgaatggacacaagggaattgccggttttctcgcggaatctgctttgacaagccatctgtcagcacttactttaaaggaatcaaaagatagcaatgcggaagaagcatgcagattaacaattcctgaagatctccctgaaatgaattatggtcagcttgctgtacaggattctcatgctgaatcattaaaggattcattaagtgctgttcgtaaatccgctcaagctgcagctaggatattccaagccttcagggtggaatcattccacagaaagaaggtcgtggaatatggagatgatgattgtggattatctgatgaacacacattttcacttatttctcttcaaaaggtcaaacaagggcaacatgatacacgtttgcattctgctgctgtacgtatccaaaataagttccgaggatggaagggaagaaaggagtttatgatcattcgccagagaattgtgaagttacaggctcatgtgcgaggacatcaagtgaggaaaaactataaaaaagtagtctggtcagtaggtattgtcgagaaagttatattgagatggaggagaaagggacgtggtttgcgtggctttcgacctgagaaacaattagaaggccagacacaaatccagcctgcaaaaacagaggatgaatacgattacttgcaggatggcagaagacaggctgaaggcagactacagagggcactggaccgggtgcgctctatgacacaatacccagaagcaagagaacagtaccgtaggcttacaacttgtgttgctgaaatgcaacagtccaggatgatgcaggacgagatgctaagtgaggcagctggtgctgacggaagtgatttcatgaatggactggaggacttgatatgcagagacgacccccaaatgtctgccatttggtga

SEQ ID NO: 10889 - DNA, 1506 bp, Oryza sativa
  Clone ID: TFbOSC9750j.C1.o3.gm
atggcagaaactcctgctgcagcagcagccgtggaattcgggcctcatcctcatgacatgttgacgctcgacggggaacttttgcgagtgctcatcaccggcgacagggtccgcttggaggagattttgagagaagcgggtagctatggtggcgacggtgaacaccctggggatggtggcaatggaggatcaccacctcatgaagttcctccattggtggacgggcaccgcgaccctcgaagggatggcccggagctgatcgcgattaacttacccgatcatgcggcaccagccgtggtggtggaggcagggttgtcgttgagcccaaggagatcttacggctatctgaagagtggcgcctgcagcgcgacacggagcgggctgccttctcggagtgacgagcaacgggaacacggcctgcacctcgtcgccagccgcggccacgccgagctcgcggcgctcatccgcgtgagggcgccctcgctcgtcgccacgcgcaaccggtgcctcgacacgccgctccactgtgcggcgaaggccgggcaccgcgaggtggtggcccgcctcctagatacgcgcaccggcgtggccgaggctgaggtggagttggcggcggcggtggcggaggcggctctgcgggtgaggaactgcctgggcgccaccgtcctgcacgaagccgtccggcatggccataccgaggtggtgcatctcctcatgtcaagggcgggcgcggctgagctggcctccgtagcatccgacgacggcgtctcgccgttgtacttggcggcgacgaccggctcggtgcgcatggtccaggagctgctgcttcgtccggcggatgacgggagacgacgatcatcggcgtcgttcactggccgggagggacagtccaccttttcactttgtcctctgtacccgcgggaagggcacgttatcccgcacaacccaaccgctgtgacgtacatagttcttggcggcttcggccggggcactaggacgtccatcttcttccacttccgttatgatgtgccgaccctcaagcttcttcgctgcacctcgttgcccgcgtgccctcttctgtccaacggagggttgactaccactagcctcctcctcctggttcccctccacatccctttccacgtgcccctgctggttcccctccgcatccctctccacgttcccttcctcgttcaagtactgcgcttggcgcggcggcgtggcgacggcggcggcggcgtggcgttgcatgcggcggcggtgttgcgcggcggcgaaggcggtggtgtggcgtggcggcggtggcgttgcgcgcgtggcggcgaaggtggcggcgtggcgtgccggcggcggcgtggtgcggcgtcgtcgtggcgcggcgtctcgtggcgggcgagatgcggcggcggtggaggaggcggaggcggcggcgaggacgatgagctcgagacgacggcgagatacggcggcgtcggcgcggggatttgccctaggcagtggcggtga

SEQ ID NO: 10890 - DNA, 1407 bp, Oryza sativa
  Clone ID: TFbOSC401064j.C1.o99.fg
atggagccgaagccaagcacgccgacggccgcggcgaccccgcggtttaagctggggaagcagtcgtcgatggcgcccgaccgcggcggtgcgggggagagctcggaggaggggtcgagcgaggcggtcggggtcatgggcttccagctgatgtacatggcccacgagggcgacgtcgaggggatccaggagctcctcgacgccggcgccgaccccaacttccgcgactccgacggccgcacggcgatgcacatcgccgcctgcgaggggcaagccgaggtcgtcgagctgctcctccagcgtggggcggatgccgtcgccgaggaccagtggggcagcacgcctttggcagacgcattgcattaccagaaccatgatgtgatcaagatcttggaaaagcatggctccaagcttaagattgctcctatgcatgttaaaaatgtccgtgaggttcctgagtacgagatttccccgaacgagctagatttcactaatggaaatggtatatcaaagggtacatttaggaaagcaacatggaggggcattctggttgctgttaagaagcttgatgacgatctaattatggacgagaacaaagtacaagcattcagagatgagcttgatgtgctacaactaatacggcatccgaatgtcgtgcaatttttaggtgctgtaacacaaagcagcccaatgatgattgtaatggaatttatgcccaagggtgatttgcgcaagcacttgagtaggaaaggggctctggaaccgtcatatgcagtgaaattagctcttgatattgcaagagggatgaattatttacatgagcataaacctcaagctatcatccaccgtgaccttgagccttcaaacatattgagggatgacactggacatctgaaggtggcagatttcgatctgtgtaagatgctaaaatggagaagaaaagttagagaagagaaagctgtaacttctccaggcaatgcatgtaggtatgtagctccagaagtcctgcgaaatgaagaatatgatactaaagtggatgtcttctcatttgctttgatacttcaagagatgattgaaggatgtctccctttttatgacaagaaaaataatgaaattgagaaggcacataattctaaagaaaggccacctttcagagctcctccaaagcattatgcttacggattgagagagctgattgaacaatgctggagtgaaaatcctgctagcaggcctgactttagaacgatcattgaacaattgtcttatatccagaatgaaatatctcagagaaaccgttggaaggtgaaacctctcaaatgcttcctgagctttgagggcatgtggaagaaagatcgaaatgagggcagcaccactcgttcatcacgttcatcgagatcctatttttaa

SEQ ID NO: 10891 - DNA, 1485 bp, Oryza sativa
  Clone ID: TFbOSC400896j.C1.o7.fg
atggggaactctctggggtgctccgcctccggggagaggctggtgtcggcggcgcgggacggggacgcggtggaggcgcggatgctgctggagctcagcccggcgctggcgcggtactccaccttcggcggcctcaactccccgctccacttcgccgccgctaagggccacctcgacattgtgacgctgttgctggagaagggcgcggatgtgaacgtacggaactactgcgggcaggtgttccatttctattcatccattttatctttatccgagttggaacattttgttgatatttttcttcgtttatttggaatggtggatgaagactgcgttgatgcacgcatgccggcatggccactgggaggtggttcagatgcttctgctcttcagatgcaatgtatggttaccagggcggattacttgagtggccgaacagcattgcatttcgcagcacatgatggacttgttcgtgctcgtttgagatatatcaacaaacctgctgatggcggtgttacagcacttcatatggcagctttgaatggagctggcagtactcctttgcattatgcagctggtggaggaaatgctgagtgttgccagctacttctgtcaaaaggcgctagcaagttgacactgaactgtaatgggtggcttcccattgatgttgctaggatgtttggacgccgtttcttggagccattactttctccaaactcaaactcgagtatccctgcatatcaaccatctaattatcttgccttgccattcatgagcatacttaatatagctaggccagattatgtgctctgtagaattgcaataatttcagaaactgttaagttaggaagagaatttgggttgctgcacaccgtagcctctgtggatgatagtgatctttgtgcagtttgccttgaaaggtcttgttcagtagctgctgaaggttgttgtcatgagttctgcatcaaatgtgctctttatctttgctcaacgagcaatacccgtgttgagttcactggcccacctggatcgattccgtgccctctttgtcggaatggaataatgtcatttaccaagttgccaagcacgccaacagaagggcttaaatctagctcagcactcacgttctgtaatccatgcatgctaaacacccgatctgtagactcaccagcaactatcagcaaagcagaaataaggcgcaaccgtgttgcagctgtctcttcagagctagtctgcccactaacctgcagcccatttccatcgtctgccctcccgacctgcaggtgcagtgacgatgatccatgtgatgccatagaaacacaggatggttccgaggtgcaatctcctcagccatcgcactgcgcaagcatggagatggacaagagggaacagcaggatcttgaccggactagctgctcaggcatgttctggagccgaagaagctgccacagggaggagcagtgtaatgcagagatcaatgcttga

SEQ ID NO: 10892 - DNA, 2130 bp, Oryza sativa
  Clone ID: TFbOSC32694j.C1.o2.fg
atggatcatcatcgtcagatgcaggacatccagctcgcgcgctgttcttcgcagcaccatggctcggaggcggcggtgacggcgagaggtgattctgcaggtggcttggagatgtgcccggctctgtatctcgctgcctccaaagggcgagccgaggaggtcatggcgctccttcttcagccacggcatggtggtgttgcgcagggacatcttgatcaagtcaatggtacttggatggtaccgcataatggtagagaggtggaagggcccggccctggggcagggcgagcagtgcaagcgccctgggccccgccaagtcaggggccccctgaccagcggcatggccagtgcaacatatcagaggtgagcgcggagagtaacaccgtgtttcacgtggctgcggagcaaggacacgacgagctgatccgggaggtgtacctcaggttcaaggagagcagcctcctctctcgccggaactcgtcgcaggacacgccgctgcactgcgcggcgagagccggacacgccggggccgtcacggccatcgtccagctgctggccctggacagcatcctgggatgcaagaacgaggccggagatacggcccttcacctggcggcgaggaacggccatggcgcggcggtagaggcccttgtctcggcggcggcgccggagctgtcctccgagctgaatgccgccggcgtgtcgccgctgtacttggcggtgatgagtaagtcggttacagccgtgaaagcgatcattaccacgtgcagcgatgcatcgcccgttgggccgaacaagcagaatgctctgcacgctgccgtcttccagatctcagaaatggtcgacctggtattgaaatggaagccagctctgtctggacaatgcgacgtcaaaggcagcagcccgctccatctcgcgtcgtccgacggcgaccgctccatcgtaagcgcgatcgtgcgcgccgcgccgccgtccacggcgttcctgaaggactcggacggcctctcggccatccatgtcgccgcgcggatgggccaccaccatgtcgtcgaggagctgatatctgcctggcccgacgccgccgagctccgcgacggccgcggcaggacgttcctccacgccgcggccgagaaagggcacgcgccggtcatctcgctcgccgtcaagaacccgatgctttgcggcatcgtgaacgcgcaggacaaggatggcaacacggcgctccacctcgcggtggctgcagccgcgtccaagggactagccgcactactttccgccggagacaacgtacgagtcaacatcatgaacaacgatgggtacacaccgtttgatctcgctgccaactcgtctagcttcctctccatgtcttctgatcttctccttgagactgaatccgggaaaaaggagaggaagaagagagatatgagaacaagcagagaagatacctggtctaaaataagccttgtggtgacactgtctgcctacggggcacaatcctgcccgcagaggcaagaccacctgaatcaatggagaggcaatgacacaacagattggataaggaagacgtccaacagcctcgctgtcgtggccgtgctcgtcgccaccgtcgccttctccgccacgttcaacgtgcccgggggctacggggacgatggcaaggcggtcctccaggcgaagaccgcctacaaattcttcatcgtcttcgacagcgtcgccatgacgacttccgttgtcgcagtgatacttattgtgtatgggaaagcatctggttcatggaagagcttcattttagctctgcacttcatgtgggtttcgatgatcggcatgatcgtggctttctgggcggctctggtcgccgtcatgagaaggaggacaatcaatattgtgatatacgaagtcataatcaatgggatctatgtcttggtcttgagcatcatgatcttgactaagccggcgtcgtggatcagcttcgtgaagtttatgttcagcagtttattgcctgagagacatcacaggcgtgtcgctcggcagtatccgtttgccggcacttactcgcgtaactattctgtcttcgttgtcacaaacatcttggcatacgttggtgccttcttggcactttcaaaaagctga

SEQ ID NO: 10893 - DNA, 2676 bp, Oryza sativa
  Clone ID: TFbOSC100304j.C1.o3.fg
atgccgaccaccaagtgcgccgtcccgctggtgagcggcgccgccggcggcgggggatcggcggagctgacgcgtcagctgtcgtcgacgcaggcgagcccgcggttcagcttctcgagcggcgtgctgccgtcgctgggctccaggggcggcggcgagcgccacgcccggctccggcggttcatcgtgtccccctacgaccgccgctacgagctgtggaacaactacctcatcctcctcgtcgtctactccgcgtgggtgacccccttcgagttcggcttcgtcccggagcccgccggcgcgctcgccgccgccgacaacgccgtcaacgccttcttcgccgtcgacatcgtgctcaccttcttcgtcgcctacaccgaccccaagacgttcctcctccaagacgacccccgcaagatcgcgctccgctacattaccacctggttcgtcctcgacgtcgtcgccaccatccccaccgagctcgcccgccgcatcctcccaccggacctccgctcctacggcttcttcggcatcctccgcctctggcgtctccaccgcgtcggcatcctctttgctcgtctcgagaaggacaggaagttcagctacttctgggttcgatgcgtgaagctcgtttgcgtgacgctgttcgcggtgcactgctcggcttgcttctactacctcctcgccgacaggtaccctgacccgacgaacacctggatcagcgcctacatgcccaacttccacaaggccagcatctggagccgctacgtcgcctccatgtactggtccatcaccaccctctccaccgtcggctacggcgacatgcacgccgagaacaccggcgagatggtcttcaccaccacctacatgctcttcaacctcggcctcaccgcctacatcatcggcaacatgaccaacctcgtcgttcacggcaccagccgcaccaggaaattcagggacatgatccaagcggcgacgagcttcgcgcagcggcatcagctgccggcgaggctgcaggagcagatggtgtcacatctgagcctcaagttcaggacgaattcagaagggctccatcagcaggagacattcgaggcgttgcccaaggccatcaagtcaagcatctcacaccatctcttctttggccttgtccagaatgtctacctcttcgagggtgtctcaaacgatctcatctttcagctggtttcagagatgaatgctgagtactttgcgccgcgagaggatatcatactgcagaatgaagcgcctgcggatttctacatcatagtctctggtagtatgctagcagggatggccaagtcaggagatgtcgtcggcgagatcggggtcctgtgctacaggcctcagctcttcacagcaagaacaagatcactgtgccagcttcttcgcttggaccgggccgcattcctcaggatcatccagtccaacattgcagatgggacaattgtcatgaacaatcttattcagtatctgagagagaagaaagaaattgcctccattgttgctgtcgcaaaggagatcgatgacatgttggccaggggccaaatggatttcccaatcacactctgctttgcagcttccaaaggggatagcttcttgttgcatcagcttctgaagcgtggattagaccctaatgaatctgatcattatggccgcacagctctgcatatagcagcttctaatgggaatgagcagtgtgtcaggcttctgttggagaatggagctgattcaaattcgagagatccagaagggagagtgccactgtgggaggcgctgtgcaggaggcaccagaccgtggtgcagctgctggtggacgccggcgccgacctgtccggcggcgacgcggcgccgtacgcgcgcgtcgccgtcgagcagaacgacgccgcgctgctcggggagatcgtccggcacggcggggacgtgtccggcgcgtgctccggcgacggcaccaccgcgctgcaccgcgccgtcctcgacggcaacgtgcagatggcgaggctcctgctcgagcacggcgccgacgccgacgccgaggacgtcaacggcctcacccctcgcgccgtcgccgagcagggcggccacgccgacatgcagctcgcgttcgcgtcggcgacgcgccacgagccgcgcaaggctcggccgccaccgccggcgtcggcgatcgtgccggtgccgctccgcgacggcgtggactcctcgccgtcgtcgtcgtctcggcgagggcgcacgtcctccacctccgccgcctccgcgcgcagcacgccgcagcggatggccaacttccgcaactccctcttcggcgtcatctcctcgtcacacgcgttccatcacgaaggcggatacaggggcggcggcggaggcggcggcgccgccgccgagagggagaggtcgtcgagctcgccgccgctggtgagggtggccatctcctgcccggagtcgcgaggcgggaaggatcacagcagcaagctggtgttcatgccggagacgctgcgtggtctcctcgagctcggcgcggcgaggttcggggtgtcgccgacgagggtggtgacgagcggcggcgccgacgtcgacgacgcgcggctcgtcagggacggcgaccacctcctcctcgtcactgacaagtgggtcccacccgaaaatcgtagtaggaatcaatag

SEQ ID NO: 10894 - DNA, 519 bp, Oryza sativa
  Clone ID: TFbOSC900166j.C1.o8.fg
atggatgaggatgatcggcaatcgctcacctctgtgaggatggaggggtatgagccactgtttgaggcagcaagctcgggaaaaattgatctctgcaagtacttggtggaggagcttgggttcgatgtcaatgccgaagctaatcatgattccggtatgacacctttgttttgcgctgtgttggatggacaagagattactgtgaagtattttcttgacaaaggtgctgatccgaataagaaagatgcagcaggctttgctcctcttcatgaagctgcaaaaaaagggcacgttggaatagcacgactgttgttatctaaaggagctagtgttgatgtatcttcttctgaagggacacctcttcatgttgctgcctctaatggaaaatctagcactgtgcagattttattagagcaccgcgcaaatattcaacgatcacaagttgatgcaaaaagctttcgaaacagggtccaagtgttctatgtacctgctttggtttgctactgtcttaccttctga

SEQ ID NO: 10895 - DNA, 1491 bp, Oryza sativa
  Clone ID: TFbOSC100279j.C1.o9.fg
atggggttcctcagccttgtgggcaactcatttgggtgctcggcttccggcgagcggctcgtctcggcggcccgcgacggcgacctgcaggaggcgcgcgcgctgctcgagtacaacccgcggctcgcccggtactccactttcggcggccgcaactcgccgctgcactacgccgccgcgcagggtcaccatgagattgtttctctgttgctcgaatccggcgtcgagatcaacctcaggaattacaggggccagactgctttaatgcaagcctgtcaatatggccactgggaggttgttcagacactgatgcttttcaatgcaaatgttcataggacagattatttgaatggcggtagtgctctccattttgctgcactacatggtcatgcccggtgccttcgtcttgtgcttgcggattatgttcccagcatgccaaacttctggaactcgatgaaggacagcctatctgaagaaggtccatctgctgatcttgatgaagatggtttgttcaagatggtaaatcagaaggcggatggaggactgactccgcttcatatggcagcgttaaatgggcatgtagagtgtgtgcaattgttactggacttgggagcatctgttattgaggccactattgaagatggaacaactattgacttaataggagctggtagcaccccgcttcattatgctgcatgtggtgggaatgctgtctgttgtcaacttcttattgctcgaggagctagcctttctgcacagaatgctagcggctggaccccgttgatggtagctcgctcatggcataggaactctcttgaggaaattcttagcaaagaaccagagagtcgaatacgcactgttccttctccatatttgtgcctcccgcttatgagtatcatgagcattgccagggaatttggctggaggtacctaaaccaatcacctgtatgtattgacccatgtgctgtctgcttagaaggaagctgctctgttgctgcagaaggatgcaaacatgaattctgcacgagatgtgctttatacctttgctcaaccagttacacatcagtgagcccagcaggtgccataccatgccctctctgtcgacacccaatcatcgctttcactgcgcttcctgggacaagcccaataagagagctcccaagaaacagtctttcattgtcattttgcaccacatgcccagctgtgaactccgattctactccctcaatcgccagccatctgtaccggactgaattccagtgtgcacgcatgccacctatgggttcatcctccttccgttccttgagctgccagaggttgccggcgatgaagcttaacccgtcgttttgtatgggtgctatggatacaaatccctgcctaataagatgctcaaggttcggacctagctttcgtcggtcggcttcccaaggagaaagtagcaggagagcatggcctctaacctttgatccaattgctgccactggtagctga

SEQ ID NO: 10896 - DNA, 1265 bp, Oryza sativa
  Clone ID: TFbOSC12218j.C1.o1.fg
gtccgacagaaatgatactcggatggaacagtggcctcgccaaacaaggggacgaaaaggggaggactccactccatttcgccgcatccaccaatcgtttatcgatgcgggctatggttaagctcctactggagcacgacagatcctgtgtgtatcagcctgacgacgagggatcatacccgatacatgtggctgctgcattgggcggtgtagccggattatttgccgtgaggttgatgatcgaattctgccccgattccgcgggtttgcgagacggcacgggccggagtttcctccatgtggccgtcgacaacctgtgtccgtcagtggtcgcgttggctcgtttctcacctgggttacgatccgccgtcatgaacatgcaggatggaaacggcaacaccgcgctgcatcaggccgtccatgtttgtgacataatgatcttcttcttcctactgattgacaggcgggtgctgctagatgtgaaaaataacatggggtatactccggttgatcttgcacgctttaagaaccatctgaaaggtctgaattatcccgtgaatccacagtgtatgatgtcttcgtccctgacccatacggccggcaaccatccatcgggtgacaacccaaccgacagcttaaacgaaaagcgagttgagaaggaggagaggggggagctttccacgatatacaaagacgcagctcagaacctgaccatcggcgcggtgctcatcgtcaccgtgaccttcgccgcaacgttcacgatgcccggaggctacgtatcctcctccgacgacgacggcgaacgccgcggaacgccgaccttggccggcacctgcgccttcgacgcgttcgtcgtcgccaacacgctcgccttcatgctctccgggatggccaccttcagcctgatgtacgccggctacacgccgctcgacttcgccttccgcgagcgctgcgtgaagctctccatgggcctcctgcacagcagcgtcaggtccgtgggcgccgccttcctgacggcgacgtacgtgatgctggcacgggtcgcccctaagctcgtcatcgctgtctacgccgccgctgccgttggtctggtctacataaatttcgaggtttggatgcttggctggatgacgctcgcgctgctgtctagaggggacattttggcggcgctaatcgtcggcctgcaaaccgtcgcggtggcgttttggttttcttggccctttgcagtaatcttcgttttgccactgattcttaagggccactga

SEQ ID NO: 10897 - DNA, 269 bp, Oryza sativa
  Clone ID: TFbOSC28351j.C1.o1.fg
gacactgcgaaatagtagagttgtttctttcaagaggagttgatgtggatttagattctatcactgggaccccattgctgacagctgcgatgaatggccaatatagcacgatgaagattttattggagcatcacgctgatgttggtgctgatgtgaattttagagatcccaatggtgttacttgtgtgatggtcgcagcaaatcatggctctcctgtcatcatgaagtgcttactagatgctggtgctaattcaaatattccagatgaa

SEQ ID NO: 10898 - DNA, 1353 bp, Oryza sativa
  Clone ID: TFbOSC401179j.C1.o5.fg
atggaggcggcggcgaagctgaagaggagcatatcgcggcagctgtcgtcgggggcggcgagggtgtggcggcagctgtcgctggagccggtgtacactccgcggcgggcgggggcggtgggcggtggtggtggaggaggtggaggagggggagggggagggggaggggcgaggccgacgaggttcgggctcgcgaggcagtcgtcgctcgacccgacgccgcgggaggggggcggggcggcggaggatgggtcgggggcggcggcgatgctggccgtgccggagaacctggacgcgacgatgcggctgctgttcgcggcgtgccagggggacgtggccggggtggaggagctgctcagggacggggtggacgtcgacagcattgacctcgacgggcgcacggcgatgcacatcgccgcctgcgaggggcagggggaggtggtgcgcctgctgctcagctggaaggccaacatgaacgcccgcgaccgctggggcagcacgccagcggcagacgcgaagcattacgggcactttgaagtttacaaccttctgagagcaagaggagcaaaaactccgggtcactatgttgccaggtggtatggatccaaagtgtttgttaagatacttgacaaagacagcttctcagacgccaatagcataaatgaatttaaacacgagcttactttactggagaaggcccgccatccaaatttggtccaatttgtgggagctgttacacaaaatgtaccaatgatgattgtttcagagtatcatcaaaagggtgatttagccagttatcttgaaacaaaaggtcgcttgcagccttacaaagctatcagattttcccttgacattgcgaggggattaaattatctccacgagtgcaagccagagccaatcatccatggcaatctgtcaacaaaaagcattgtgcgggatgatgaagggaaacttaaagtggcaggctttggctcacgtagtctgattaaagtctcagaagataatccacaaatggatcagacgacatcaaaatttaacagtgtatacaccgctcctgagatgtacagaaatggaacgtttgacagaagtgtagatgtatttgcatttggtctcattctttatgagatgattgaaggaactcatgctttccacccaaaaccaccggaggaggcggcgaaaatgatttgtttggagggtatgagaccaccgttcaagaacaaacccaaatactatcctgatgatttgagagagcttatacaggagtgctgggatccaacaccttcggtcaggccgacgttcgaagagataatcgagggcaagcagataatgaagtacatgaggaatataccttag

SEQ ID NO: 10899 - DNA, 1128 bp, Oryza sativa
  Clone ID: TFbOSC409420j.C1.o3.gm
atggccaagaggcccgaggcccgatggcccggcacacagcacggcgttttggtccggcccaagcacggcacggcccgtcaggggtcaggcccgtgccggcctggctcaaccactgggccgtgcctgggcctctccaccggcacgatgggccacccgcgccttcgggccggcccggcacggcccgacggctggtggtcgttcctgggcgggaggcgcagcccatgggccggcacggcccggcacgaagtgccgatcgggccgtgccggcccgatggctggtgggccgtgcctgggccaggccgtgccgggcgggccatctatatcgacagacaactcctggaagcagccaaatctggtgattccacaacgttgaaggaggacatggctgcccgtgaagcagacgtgctgcttcgaacaactaagaacgggagcaactgccttcacatagcctgtatccacggtcacctgaaattctgcaaggacgccctcgagatcaaccagtcgtctctcctcgccgccgtcaactcatacggggagacgccactactcgccgccgtgacaagcggacatactgcattggcttcagaactactcagatgttgcagtgaatctggcttgggcgacgtgattctgaagcaagatggcagtggatgtaatgcgctgcaccatgctattcggtgcggccacaaggaccttgcactggagctaatagctaaagagccggcgctgtcgcgagccgtgaacaaggacaacgagtcacccatgttcattgcgatgatgagagattttgctgacattttcgagaagttgttggctatcccagactcctctgatgtaggatgcaaaggtttcaacgctctacatgctgccgtgagaagtggaaatgcaggatttggattggatggatctatcaagaactatcaagaactgaagtatgaaatgcactggattcactatttcgctggatcaggagactggagggcgtcggctgctggatttggatggatgggcgacgaggaagacgagagtagcagccgctgtggcgccgtctcgccgccgccatctcccgtctcccgtctcggctgcgccgctgcggctgcgtctcgcgtctcccagtctgtgccctaa

SEQ ID NO: 10900 - DNA, 1488 bp, Oryza sativa
  Clone ID: TFbOSC401887j.C1.o2.fg
atggaggaaaccctcaagtcgctgtccatggactacctcaacctgctcatcaacgggcaggcgttcagcgacgtcacgttcagcgtggagggccgcctggcctcttcttccgcaagttcttctgcggcgccgccgccgaccaggccgccgcgccgccgggcgcgcatcctcctggatcacctcagcccgcgctccccttccggcggcgcctccgcctcctccccgcgcggcgccgggggctccgccgccgccgccgccgcggcgacgcccggcgccgtgataccggtcagctcggtcagctacgaggtgttcctgctgctcctccagttcctgtacagcggtcaggtgtcgctggtgccgcagaagggtgagccacggccgggctgcggcgagcgcggctgctggcacacccactgcgccgccgccgtcgacctcgccctcgacaccctcgccgccgcgcgctccttcggcgtcgaggagctcgccctcctcacccagaagcagctggcaggcatggtggagaaggcgtcgatcgaggacgtgatgaaggtgcttatggcgtcgaggaagcaggacctgcaccagctgtggacaacgtgctcccacctcgtcgccaagtcggggctcccgccggaggtgctcgccaagcacctccccatcgacgtcgtcgccaagatcgacgagctccgcctcaagtccatgtcgcgccgctcgccgttcctctcgcaccaccaccaccacccgcacgcggccgccgccggcatcgaggcgtcgtcggcggccgagctcgacgaccaccacaagatccgccgcatgcgccgcgcgctcgactcctccgacgtcgagctcgtcaagctcatggtgatgggggaggggctcaacctcgacgacgccctcgcgctgcactacgccgtcgagaactgcagccgggaggtggtcaaggcgctgctggagctcggcgccgccgacgtcaaccacccggcgggccccgccgggaagacgccgctgcacgtcgcggcggagatggtgtgcccggacatggtggccgtgctgctcgaccaccacgccgaccccaacgtccgcaccgtcgacggcgtcacgccgctcgacatcctccgcacgctcacctccgacttccttttcaagggcgccgtgcccggcctggcgcacatcgagcccaacaagctccgcctttgcctggagctcgtgcagtcggcggccatggtgatgtcccgggaggacgcccagaccgccgcggtcaatgcggcgcccatctacggcgagtcccccggcggcggcggcggcggtggcgtgtacaatgccagtggcaccagctcgagcatggtgaacctgagcttggacaacaggatggtgtacctgaacctggggatggacgcgcagttcgggaagatgaacgacggtggcgacggcgacgacggcgggagcagagggccatcgtcgttgttctccccacatggcttcccctga

SEQ ID NO: 10901 - DNA, 4866 bp, Oryza sativa
  Clone ID: TFbOSC32692j.C1.o2.fg
atggacacacctctgcactgcgcggcgagggcagggcacgccggcaccgtgacgatccttgtaaatctggcccaggactgcgaggagaatatcctgggatgccagaacgcggccggggacacggccctacacatggcagcgaggcacgggcatggcgccaccgtggaggctcttgtcgtggcacgtgcgaaggcgaccgtgttagttagcatgaaagttgttgagagcgttgatcaattccctaagagatcaatactcatggcctcgtcgtccagtacggctgccacaaatccgttccaaggccacccaatctcagagaagcttgggaaggcaaatcatgcgctctggaaggtgcaagtaagcgccgcagttagaggagcgcggcttcaggggcatctcaccggtgcaaccaagcggccgccggcagagatcgctgtcacaaaagatggcgccaccaagaaggagccgaacccagcccatgaagactgggaagccaccgaccagcaagttctggggtaccttctctcgtcgctgacaagagaggtgctgatgcaggtcgctacatgcgacaccgcggctgaagtgtggagcgccatcgagcagatgtactccacccacacacgagcaagagcgattaacactcggtttgctctcaccaatacaaagaaaggtaacatgtcaactcctgagtattttgcaaaaatgaaatccttaggagatgagatggctactgccggaggtcgcccgatcgatgaagaggagctgattcagtatatcatcaccggccttggcgagggctacagcgaggtggtgtcggctgtctgcgctcgggttgaaccaatctctgtgagtgatctgtactctcaagtgttgaactttgaagctcgccaagccatctaccgcggcgcacaggaggtcaccgtcaatgttgccaaccgtggaggcttcagccacggggggcgtggcaacagcaatggtggccaaggaggttcgcgcggcggcggcggcggcggccatggtcgcggcaacggaggaggtggccgtggtcgaggccgcacaccaggaggcgttgataaaagaccaatctgccaagtgtgtttcaaacgggggcacacggcagcagattgttggtataggtacgacgaggattacgttcctgacgccaagcatgttgcagctgcagcggttaactcctatggagttgacacaaattggtacatcgacactggtgctacagatcatgtcacgggagagctggacaagctcactatgaaggaaaaatacaacggtggtgaacaaatccacacagcaagtggtgcaggacacatctatatttctcgcgatgttgtctttgatgagaatatttttcccttcactgaacttcatgccaatgctagtgcccgtcttcgttctgagattgatattctcactcctgaactgctaggacccatacggtctgttgggaatgaacaatgcatgcatccagtgactaatccattatctgctgatgtttctgctgctttatctaatcgtgctaatgagccacatagagatggtgcagtacatcccgctgatgcagaagatccgccggcgacgcctcctctggatgccagttttggtccagaaccagaccgtgtcgtccaccactcccctgcggccacgtcatcaggccgtcatccgggtcccacacctggttctgtgccacggggggtagcatcatcgctagcagaggagacagcagaagactcagtgtcgcaggcggtgcaggagcaggagtcgcaggtggtgcaggagcaggagcagtcctcaccagcgcaggaacatgcacaggctgtcacagatgagactaatacattacagcatgcagatgtgactgacacaggttcagaggcaccggcaggaccgcgcaccaggttgcaaagtggagttcgcaaagaaaaggtatatactgatggtactattaaatataagcattcttggtttactgcttcaggtgaacctacaaatgatttagaagccttaaaggataaaaattggaaactagcaatggattcagagtatgatgctttagttaagaataaaacttggcatcttgttcctcctcagagagggagaaatattattggctgtaagtgggtgtataaaattaaaaggaaagctgatggtaccctagataggtataaggcaaggttagtagcaaaaggatttaaacagaggtatggtattgattatgaagatacctttagccctgttgttaaagctgccactatcagaataatattgtctttagcagtgtctaaaggttggagtcttagacagctagatgttcaaaatgcctttctgcatgggtacctagaagaagaagtttatatgctacagccaccaggttttgaggatcctactaagccacatcatgtgtgtaaacttgataaagctctatatgggttaaaacaggcacctagagcctggttctctagactaagtaaaaagttgatggaccttggttttaaaggatcaaaagctgatacgtctctgttctttctgaataaaggtgatataactatgtttgttctggtatatgttgatgatatcattgtagccagctcttcagagaaggccactgcagctttacttcagaatctaaaaggggaatttgcactcaaagatcttggtgagctgcattattttctcggaatagaggtaagcaaggttcagaatggcattgtactgaatcaagacaagtatgccaatgatttattgaagaaagtgggcatgatagattgtaaacctgctaatacacctctttcagtaagtgagaaactctctcttcatgaaggctcattgttagggcctgaagatgcaagtcactatcgcagtgttgttggtgctttgcaatatttgactcttactagacctgacatagctttctctgttaataaagtttgccaattcttgcatgctcccacaactgtacattggattgctgtgaaaaggattcttaggtacttaaagcaatgcactcggttaggacttgaaattcataagtcaggatctactttagttagtggcttctctgatgcagactgggcaggctgtttagatgacagaagatcaacaggaggatttgcaatatttctgggttcaaatctggtctcctggaatgctagaaaacaagccactgtgtctagatctagcacagagtcagaatacaaagctattgccaatgccactgcagaaataatgtgggtgcagactttacttgcagagttagagattaaaagtccaaaagctgctaaaatatggtgtgataatcttggagctaagtatttgtcagctaatccagtgtttcatgccagaacgaaacacatagaagttgactatcactttgtcagagaacggttgttaagtcgtttcatcaatctcggcttcggttgttctcagctgcgccgaactctgtatcgccacgatgggggctgttcccatcacatatatattaacacgaaggcgacgcacaggattagtgcgatcgtttccacccaaactaattcacagaccgagctaaacaaagccggtgtgtcaccgttgtacttggcagtgatgagcagatctcaagcacaaaacaagaatgtgtttgtcaactcgattgataaatttgtgtctttggcagagatggttcacttattattgcaatggaagccagaactggctagccaggtcgactgcaatggcagcaccccactccatttcgcggcatccgacggcaaccgcaaaatcgtacatgcaatcctagccatcgtgccaactggcacagtgtacatgaaggactcggatggcctctccgctcttcatgtcgcggctaggttgggacatgccaatgttgtcaagcaactaattgggatctgccctgatgctgttgagctccgtgacggccatggagagaccttcctgcacaccgcggtcagggagaagcagtcctcgatcgtgtccctcgctatcaagaaacacaagcaggtcggtggccttctggacgcgcaggacggggttgggaacacgccgctccacatcgccgtggttgccggctcgcctgacattgtgaatgccttactccataaggggaaagtgcaaagcgatgtcttgaacgacgatggacactcgccgcttgatctcgcttcgacatcgaccaatttgttcaacatggtaagctttgtggtgatattagttgcttttggggcacaaggccgaccacaaaggaatgaccatctaaagccgtggagcggccgcgacataggtaaagggatagagaggacaactgacagccttgcggtggtggccgtgctcatcgccaccgtcgcctttgccgccggattcaacatgccaggcagctacggagacgacggcacggcgaacctcaagggcaggttctcattcaaatggttcatggtcctcgacaccgtcgccgtagcggcatcggtggtcgccgtgatcctactcgtctacgggaaggcatcgcgctccgccggctcgtggaagagcttcgtggcggcgttgcactttatctgggtctcgctcgtcagcctgatcctggccttctttgcggcttttcgcgccacgatgagaacctcgagggcagtctccatcgtgttcatggttatctacgtgtgcctcatcgttttggttgtcaatgtcggaacatgggttgaacctgtaacgacgatgcgtatattctggaggtttgtgtggcgcagtcaccggactaatgccgtcaagaggcagtatccattggccgtcgctaccgtctacaactgtcttctcttttcggttataaattttataatatttgccggtttgggagtggtaccgtcctag

SEQ ID NO: 10902 - DNA, 1578 bp, Oryza sativa
  Clone ID: TFbOSC401247j.C1.o14.fg
atggggaagaagggtaagggaaggcaccgcggccgcggcggcggaggcggaggcgggggtggtggtggtggtggtggtggtggtggtggtgtgggtggggatcgcggcggtggagggagcggaggaggagggccgggaatggggcggcgcgggagcgatgcgcgtgcccagcaggcggcggcggcggcggcggcaatcagcggcatcgccacccgcctcgggttcgggtgcaccgtcaatgtcggcggcgggatgccaccgcagatggagttcctcatggcgtgtacggacggcgacgtcgcgcgcctcaagggcaatgcaattgtaatgggagctgttgtatgtgaggctagtcttgatagggtcaggaaccgtctttaccttaccatgaagagtttaactatagttacagcactgggtatgacgcctttgttttgcgctgtgttggatggacaagagattactgtgaagtattttcttgacaaaggtgctgatccgaataagaaagatgcagaaggctttgctcctcttcatgaagccgcaaaaatagggaacgttggaatagcacgactgttgttatctaaaggagctagtgttgatgtatcttcttctgaagggacaccacttcatgttgctgcctctaatggaaaatctagcattgtgctgattttattagagcaccatgcaaatccaaacgtgatgacgccagattgttatacaccactgactgcagttctttctgccactcctgaaatagtgaatgaatctgagtgtttgaagtgcatgaaactccttatcaaggctggtgctcattataaacttgcaactcctgatactccattggagatagcaactagaaatggcttaactgagtgtgttgcatacttgttggagatcagcactgttgttagactaagtgaacatgacaaaggaagtgatggagacagaaaatctaagctgaaattacatggtggaaaagcatttgaggagggtgactatgcgggtgcaatcatattctacactgagtttttatgcaaatataatttcttcaataatccaagcccgaactataaacaacagagattagcacaaaagaacccaactccacacataccacatcgcagaagcatggcagtctctgcatcccagttgacatctaggatactattatcacttctattgtctaggaactattgctgtgttaacaaaggaagactcagtttgaatttccaatggcattgccatcatgtgggggatacacttgcaatgaaacttgatcctgcagatgccacactgtattcaaacaggagcctttgccatctgagaagtggtgcagcgcaagaggctttgctggatgctaatgattgcataaaactcaagcctgagtggactaaaggttactatcgcaaaggatgtgcccacatggcactcaaggaatacgaagaagcttgtactgcattcatggctggaacaaagctcgatcctttaagcgatgaaatgcagaatgcattttgggaggcagctaaagcaatgaagaatgaatatatggctggaaggcgcgtcagctcggttgattag

SEQ ID NO: 10903 - DNA, 1176 bp, Oryza sativa
  Clone ID: TFbOSC421303j.C1.o3.fg
atggcgtcagctttcttcaacggagccatgtacgccggtggatggatgcagcacatgctcttcgaggcggctcacaacggcgacctcgacctcgtcagggggatggcgatgctgctggttgaagggagggggcggctcggggaggcggtgcaggcggcgaggctgcgggggacggggccgttggacgggatgggggcgctgcacatcgccgccagcaaagggaggctggaggtgtgccgctacctcgtcgaggagctgcggctggacgtggatgacactgaccaggaaggtaggactcctctgattattgcaatagtcttcaatcatgtaagcactgtcgagtatcttcttgatcgtggtgccgacgcaaacaaagccagccataacggcctcacccctatacatttcgccatttgtttaggagaatgtggaatggtacagctattacttgcaaaaggagcttgtgtggacccagtagcttactgtgggacaccacttcatgttgctgctactgaagggcgagatggtgctatgaagattttattggaccacaatgcagattttaacaagatggtagatggtctgacacctcttgatactgctatggattctggtgaattaaaatgcataaatctcctgattaaggttggtgctgttgtcagtgaagatcgcatgttaactgctgaaaacagtggttctacagagtgcttcaattacttaatggaagagactggtgccaactgtaacatttctgataatggtgagcctgtcaataaaaggaaagcaacagatttaaagtcactgggtaataaggctgtcgagaaaaaggattatctatctgcaacaggattctacagtaaggcactgtacctttaccctgatgatgctaccttgttctcaaataggagcctttgctggcatcgcatgggtgatggaggcaaggctttgctggatgctcatgaatgtaggaagttgcggtctgactggccaaaggcctactaccggctgggtgctgctctgatgttactgaaggactatgagagtgcttgcgaagcactttacaatggattcaagttggatccagggaactctgagattgaggatgcatttcggtatcctttctgcctattttggtcgcattatggcaatatggcttatgatgatagctttggctag

SEQ ID NO: 10904 - DNA, 1221 bp, Oryza sativa
  Clone ID: TFbOSC402924j.C1.o4.gp
taaaatcctcttcttcaggccatcaacactagtagctgcagctggatcgagcatgctcatctcctggtggatcgatcacattggagactacagctccaatattacaagatgaacattgcttgatggtttgaaactttttgaacaaattagctagcatgcaacagtttgctgcgcgcgcaagcgaatcaatcatgcgaaagatcgaacaatccacatcaaataccactaaattgttgcccattatcctagctatatagtagctagctacaccatttgctgctcatcttgtcaaccatgcataaccccacaaatctcaacacggctagtagaagagaaggatagggaataatattacttatgcgaagccattggggaagtacatggcgggcggcgggctccctcggccgttattgcttttcctcccctcgccggcggccacggccgccgccatttcctggccctggtacatgagcgtcgagttcatcgtcaggctcaccaagctgtcgtcggcgtcgctcctcgggaagttgccgccgtcgcttccgccggcctcggcgccgccggtgacaggcgcgccgtcgtcacgcgtggtcaccatcaccgccgactgcacgagctcgaggcagagcctgagcttgttgggctcgatgtgcgtcagccccggcacggcgcccttgaagaggaactcggaggtgaggctgcggagcacgtcgagcggcgtgacgccgtcgagcgtcctggagttcgggtcggcgtggtggtcgagcagcacggacaccatgtccggggagaccatctccgccgccaggtgcagggcggttttgcctgtcgggccggcgcgggagttgacgtcggcggcgccgagctcgagcagcgccttgacgacgtcgcggttgcagtgctgcacggcgtagtggacggcgagcgcgtcgtcgaggtccaggccctcgcccatgaccatcagtttgacgagctcgatgtcggcggcgtcgagggcgcgccgcatgcgccggatcttgttgtcgcggtccgccgcggaggacgccgggttcatggggaggtagtggtgcgtcaggaacggcgagcgcggcgcggccaccgcggcgagcggcgacttggcgcggatctcctcgatcttggcgaccacatcgatggggaggtgcttggcgaggagatcggcggagaggccggagcgcgcgacgaggtgggagcaagtcgccc

SEQ ID NO: 10905 - DNA, 1221 bp, Oryza sativa
  Clone ID: TFbOSC900071j.C1.o24.gp
aaaaatcctcttcttcaggccatcaacactagtagctgcagctggatcgagcatatgctcatctcctggtggatcgatcacattggagactacagctccaatattacaagatgaacattgcttgatggtttgaaactttttgaacaaattagctagcatgcaacagtttgctgcgcgcgcaagcgaatcaatcatgcgaaagatcgaacaatccacatcaaataccactaaattgttgcccatttatcctagctatatagtagctagctacaccatttgctgctcatcttgtcaaccatgcataaccccacaaatctcaacacggctagtagaagagaaggatagggaataatattacttatgcgaagccattggggaagtacatggcgggcggcgggctccctcggccgttgttgcttttcctcccctcgccggcggccacggccgccgccatttcctggccctggtacattagcgtcgagttcatcgtcaggctcaccaagctgtcgtcggcgtcgctccgcgggaagttgccgccgtcgcttccgccggcctcgcctccggtgacaggcgcaccgtcgtcgcgcgtggtcaccatcaccgccgactgcacgagctcgaggcagagcctgagcttgttgggctcgatgtgcgtcagccccggcacggcgcccttgaagaggaactcggaggtgaggctgcggagcacgtcgagcggcgtgacgccgtcgagcgtcctggagttcgggtcggcgtggtggtcgaggagcacggacaccatgtccggggagaccatctccgccgcaaggtgcagggcggttttgcctgtcgggccggcgcgggagttgacgtcggcggcgccgagctcgagcagcgccttgacgacgtcgcggttgcagtgctgcacggcgtagtgcacggcgagcgcgtcgtcgaggtccaggccctcgcccatgaccatcagcttgacgagctcgatgtcggcggcgtcgagggcgcgccgcatgcgccggatcttgttgtcgcggtccgccgcggaggacgccgggttcatggggaggtagtggtgcgtcaggaacggcgagcgcggcgcggccgccgcggcgagcggcgacttggcgcggatctcctcgatcttggccaccacatcgatggggaggtgcttggcgaggagatcggcggagaggccggagcgcgcgacgaggtgggagcaagtcgccc

SEQ ID NO: 10906 - DNA, 1485 bp, Oryza sativa
  Clone ID: TFbOSC900071j.C1.o23.fg
atgagctccgaggactcgctcaaatccttgtcgcttgactacctcaacctgctcatcaatggccaggccttcagcgacgtcgccttcagcgtcgagggccgcctcgtgcacgcccaccgctgcgtgctggcggcgcggagcttgttcttcaggaagttgttctgcgggctcgatccgaatcaccagccgccgccgccgccaccgccgccgttaaactggccgacggcggggggaggcggcggcggctctggtggtggagggcgtggcggcgccggtggtggtggaggagcgcctgccacgccggagcttgtcatccccgtcagctcgatccggtacgaggtgctcgtgctcgtgctgcagttcctgtacagcgggcaggcgtcggtggcggcgcccaagagcgggccgctcccggggtgcggcgcccggggttgctggcacacgcggtgcggcgccgccgtcgacctcgccctcgacacgctcgccgccgcgcgctccttcggcgtcgagcagctcgccctgctggttcagaagcaactggagagcatggtgaaggaggcgtcggtggacgacgtgatgaaggtgctgatggcgtcgcgcaagttcgagatgcaggagctgtgggcgacttgctcccacctcgtcgcgcgctccggcctctccgccgatctcctcgccaagcacctccccatcgatgtggtggccaagatcgaggagatccgcgccaagtcgccgctcgccgcggcggccgcgccgcgctcgccgttcctgacgcaccactacctccccatgaacccggcgtcctccgcggcggaccgcgacaacaagatccggcgcatgcggcgcgccctcgacgccgccgacatcgagctcgtcaagctgatggtcatgggcgagggcctggacctcgacgacgcgctcgccgtgcactacgccgtgcagcactgcaaccgcgacgtcgtcaaggcgctgctcgagctcggcgccgccgacgtcaactcccgcgccggcccgacaggcaaaaccgccctgcaccttgcggcggagatggtctccccggacatggtgtccgtgctcctcgaccaccacgccgacccgaactccaggacgctcgacggcgtcacgccgctcgacgtgctccgcagcctcacctccgagttcctcttcaagggcgccgtgccggggctgacgcacatcgagcccaacaagctcaggctctgcctcgagctcgtgcagtcggcggtgatggtgaccacgcgcgacgacggtgcgcctgtcaccggaggcgaggccggcggaagcgacggcggcaacttcccgcggagcgacgccgacgacagcttggtgagcctgacgatgaactcgacgctaatgtaccagggccaggaaatggcggcggccgtggccgccggcgaggggaggaaaagcaacaacggccgagggagcccgccgcccgccatgtacttccccaatggcttcgcataa

SEQ ID NO: 10907 - DNA, 1485 bp, Oryza sativa
  Clone ID: TFbOSC402924j.C1.o1.fg
atgagctccgaggactcgctcaaatccttgtcgcttgactacctcagcctgctcatcaatggccaggccttcagcgacgtcgccttcagcgtcgagggccgcctcgtgcacgcccaccgctgcgtgctggcggcgcggagcttgttcttcaggaagttgttctgcgggctcgatccgaatcaccagccgccgccgccaccgccgccgttaaactggccgatggcggggggaggcggcggcggctctggtggtggagggcgtggcggcgccggtggtggtggaggagcgcctgccacgccggagcttgtcatccccgtcagctcgatccggtacgaggtgctcgtgctcgtgctgcagttcctgtacagcgggcaggcgtcggtggcggcgcccaagagcgggccgctcccggggtgcggcgcccggggttgctggcacacgcggtgcggcgccgccgtcgacctcgccctcgacacgctcgccgctgcgcgctccttcggcgtcgagcagctcgccctgctggttcagaagcagctggagagcatggtgaaggaggcgtcggtggacgacgtgatgaaggtgctgatggcgtcgcgcaagttcgagatgcaggagctgtgggcgacttgctcccacctcgtcgcgcgctccggcctctccgccgatctcctcgccaagcacctccccatcgatgtggtcgccaagatcgaggagatccgcgccaagtcgccgctcgccgcggtggccgcgccgcgctcgccgttcctgacgcaccactacctccccatgaacccggcgtcctccgcggcggaccgcgacaacaagatccggcgcatgcggcgcgccctcgacgccgccgacatcgagctcgtcaaactgatggtcatgggcgagggcctggacctcgacgacgcgctcgccgtccactacgccgtgcagcactgcaaccgcgacgtcgtcaaggcgctgctcgagctcggcgccgccgacgtcaactcccgcgccggcccgacaggcaaaaccgccctgcacctggcggcggagatggtctccccggacatggtgtccgtgctgctcgaccaccacgccgacccgaactccaggacgctcgacggcgtcacgccgctcgacgtgctccgcagcctcacctccgagttcctcttcaagggcgccgtgccggggctgacgcacatcgagcccaacaagctcaggctctgcctcgagctcgtgcagtcggcggtgatggtgaccacgcgtgacgacggcgcgcctgtcaccggcggcgccgaggccggcggaagcgacggcggcaacttcccgaggagcgacgccgacgacagcttggtgagcctgacgatgaactcgacgctcatgtaccagggccaggaaatggcggcggccgtggccgccggcgaggggaggaaaagcaataacggccgagggagcccgccgcccgccatgtacttccccaatggcttcgcataa

SEQ ID NO: 10908 - DNA, 1485 bp, Oryza sativa
  unsure (1)..(1485): unsure at all n locations
  Clone ID: TFbOSC413271j.C1.o2.fg
atgagctccgaggactcgctcaaatccttgtcgcttgactacctcagcctgctcatcaatggccaggccttcagcgacgtcgccttcagcgtcgagggccgcctcgtgcacgcccaccgctgcgtgctggcggcgcggagcttgttcttcaggaagttgttctgcgggctcgatccgaatcaccagccgccgccgccaccgccgccgttaaactggccgatggccgggggaggcggcggcggctctggtggtgaagggcgtgncggccccggtggtggtggaggagcgcatgccacgctggagcttgtcatccccgtcagctcgatccggtacgaggtgctcgtgctcgtgctgcagttcctgtacagcgggcaggcgtcggtggcggcgcccaagagcgggccgctcccggggtgcggcgcccggggttgctggcacacgcggtgcggcgccgccgtcgacctcgccctcgacacgctcgccgctgcgcgctccttcggcgtcgagcagctcgccctgctggttcagaagcagctggagagcatggtgaaggaggcgtcggtggacgacgtgatgaaggtgctgatggcgtcgcgcaagttcgagatgcaggagctgtgggcgacttgctcccacctcgtcgcgcgctccggcctctccgccgatctcctcgccaagcacctccccatcgatgtggtcgccaagatcgaggagatccgcgccaagtcgccgctcgccgcggtggccgcgccgcgctcgccgttcctgacgcaccactacctccccatgaacccggcgtcctccgcggcggaccgcgacaacaagatccggcgcatgcggcgcgccctcgacgccgccgacatcgagctcgtcaaactgatggtcatgggcgagggcctggacctcgacgacgcgctcgccgtccactacgccgtgcagcactgcaaccgcgacgtcgtcaaggcgctgctcgagctcggcgccgccgacgtcaactcccgcgccggcccgacaggcaaaaccgccctgcacctggcggcggagatggtctccccggacatggtgtccgtgctgctcgaccaccacgccgacccgaactccaggacgctcgacggcgtcacgccgctcgacgtgctccgcagcctcacctccgagttcctcttcaagggcgccgtgccggggctgacgcacatcgagcccaacaagctcaggctctgcctcgagctcgtgcagtcggcggtgatggtgaccacgcgtgacgacggcgcgcctgtcaccggcggcgccgaggccggcggaagcgacggcggcaacttcccgaggagcgacgccgacgacagcttggtgagcctgacgatgaactcgacgctcatgtaccagggccaggaaatggcggcggccgtggccgccggcgaggggaggaaaagcaataacggccgagggagcccgccgcccgccatgtacttccccaatggcttcgcataa

SEQ ID NO: 10909 - DNA, 537 bp, Oryza sativa
  Clone ID: TFbOSC3754j.C1.o1.fg
tatgtcgacaagcttcttattgccaaagataccaatcaaattaccattgatatattggaggctgtaaggacgaatgatgtgagggcagcatatcgcattcttgtgttggctgatgtgagccctaacatgatatatgatgagttaaacaatgatgttcatcatgatccttcagtaacagatgggaagttatttgatccagcatcttgtgatgtaaaggatgattctgggaaaccagaaggttgtctacaaggctgttccctgttgcacattgcttgccaatatggccattctataatggcagagcttctgcttctttttggtgcggatattaataagcaagacttccatggacggacaccgttgcaccattgtgtccgaaggaaaaatgatgcacttaccaagcatctgctaaagaggggtgcaagaacaaccattaaagatggtggagggttgactgctttagagagaagaatggaacttggagcaataactgatgaagatttgttcattttatttgtaaggtatgatcaagattag

SEQ ID NO: 10910 - DNA, 1950 bp, Oryza sativa
  Clone ID: TFbOSC407383j.C1.o4.fg
atggtgttgggtgtcaaggtgtggaggacttgtgggctacgcattatgccagacatggagcaccagagtgagggcaggttttttgcatggcatatacaaattgaggttgatcatatgcttagtgaacgtttgatgcaattcattgatgtggatttgcatggcgtgaaggcacgtgaaaaatttgtatcagtacggaaagggactagagcagaagtagtgacaggacttgaggaggatctacacaatgccaagtcagctttcgaacgatgccgctttaacctaggatatgaactactgagtcaaatggaaccattcattcaccaggttctaacatatgcacagcaatcaaaagaaatggctatcaatgaacaagataaacttgcaaagagaattcaagaatataggactcaagaggaaattgcgaacttgagaatggctagtaatgtggacacatctaccagtggtgatggtatccatgttgttggtcttcaatcctataaaaagattgaagccctaatgcagtcaactgccaatggcgaggttcaaataatcaaacaaggttatctctttaagcgttctgaaaattcacgagaatggaagagaaggttctttgttctcgacagtcacgggactcttttctactacgggaataaaggacaatcgcaaggagcggcatcacagcaaacagctggtgaagggactggtgtttttagtcgtttcagattcttgaaccaaaaggctccaactcagggtgacaatgcactttcgtgccacaaaattgatctaagaacttcaacaattaagattgatgcagaagaaaatgacctaagattttgcttcagagtaatctctcccatgaaagcatacactttacaggcagaatctggtgctgaccaaaaggattggattgagaaagttactggagttattgcatcactgcttaatttaccattcccaagacaggtgtcgtatggaaatctagaggcggaacatcatggttctgcaaattctgttgattctctctctcttgaggagaacaaaagtccagagggacatgatgatatattcaatcatctcaggaatattcctggaaatgacagttgtgcagaatgtcgttcaccggatcctgattgggcatctctaaatttaggaattcttatttgtatagagtgttctggggctcacaggaatcttggagtccatatttcgaaggttcgatccttgcgattagatgtcaaggtatgggagccagtgataatggacttgttccatgaacttggaaatgactacactaattccatttgggaagctatgcttccgaaagaagatcaaggaataaacgagtttaatgatgctattcttttcattgaaaagcctaaacctactgatgctttttcaataaaggaaaggtacatacagacaaagtatgtcgacaagcttcttattgccaaagataccaatcaaattaccattgatatattggaggctgtaaggacgaatgatgtgagggcagcatatcgcattcttgtgttggctgatgtgagccctaacatgatatatgatgagttaaacaatgatgttcatcatgatccttcagtaacagatgggaagttatttgatccagcatcttgtgatgtaaaggatgattctgggaaaccagaaggttgtctacaaggctgttccctgttgcacattgcttgccaatatggccattctataatggcagagcttctgcttctttttggtgcggatattaataagcaagacttccatggacggacaccgttgcaccattgtgtccgaaggaaaaatgatgcacttaccaagcatctgctaaagaggggtgcaagaacaaccattaaagatggtggagggttgactgctttagagagaagaatggaacttggagcaataactgatgaagatttgttcattttatttgtaaggtga

SEQ ID NO: 10911 - DNA, 2294 bp, Oryza sativa
  Clone ID: TFbOSC407404j.C1.o11.np
atggcggccttcaccaagctcgaggactcccccatgttccgcaagcaggtcaattctatggaacagctaagcgatgaactgaaacaacggtgttcaaatcttcataaaggatgcaaaagattcatgggatcacttgatgaaggatacgcgggagatctaacatttgccgatgctctagaagcatttggtgctggtcaagatgatcctgttagtgttgccattggagggcctgtaatgtccaagttcactactgcttttagggagcttggaacatacaaggaactccttcgttctcaggttgatcatatgcttagtgaacgtttgatgcaattcattgatgtggatttgcatggcgtgaaggattgtcgtcagcgtttggatagggctacagtggggtatgatcaggcacgtgaaaaatttgtatcagtacggaaagggactagagcagaagtagtgacaggacttgaggaggatctacacaatgccaagtcagctttcgaacgatgccgctttaacctagtgcacgcactttcaaatattgaagcaaagaagaagtatgagttcttggaatcaataagtgcagtgatggatgcccatttgagatatttcaagcagggatatgaactactgagtcaaatggaaccattcattcaccaggttctaacatatgcacagcaatcaaaagaaatggctatcaatgaacaagataaacttgcaaagagaattcaagaatataggactcaagaggaaattgcgaacttgagaatggctagtaatgtggacacatctaccagtggtgatggtatccatgttgttggtcttcaatcctataaaaagattgaagccctaatgcagtcaactgccaatggcgagataatcaaacaaggttatctctttaagcgttctgaaaattcacgagaatggaagagaaggttctttgttctcgacagtcacgggactcttttctactacgggaataaaggacaatcgggaagcaaggagcggcatcacagcaaacagctggtgaagggactggtgtttttagtcgtttcagattcttgaaccaaaaggctccaactcagggtgacaatgcactttcgtgccacaaaattgatctaagaacttcaacaattaagattgatgcagaagaaaatgacctaagattttgcttcagagtaatctctcccatgaaagcatacactttacaggcagaatctggtgctgaccaaaaggattggattgagaaagttactggagttattgcatcactgcttaatttaccattcccaagacagtcccaggtgtcgtatggaaatctagaggcggaacatcatggttctgcaaattctgttgattctctctctcttgaggagaacaaaagtccagagggacatgatgatatattcaatcatctcaggaatattcctggaaatgacagttgtgcagaatgtcgttcaccggatcctgattgggcatctctaaatttaggaattcttatttgtatagagtgttctggggctcacaggaatcttggagtccatatttcgaaggttcgatccttgcgattagatgtcaaggtatgggagccagtgataatggacttgttccatgaacttggaaatgactacactaattccatttgggaagctatgcttccgaaagaagatcaagggtatgttgaagagtttaatgatgctattcttttcattgaaaagcctaaacctactgatgctttttcaataaaggaaaggtacatacagacaaagtatgtcgacaagcttcttattgccaaagataccaatcaaattaccattgatatattggaggctgtaaggacgaatgatgtgagggcagcatatcgcattcttgtgttggctgatgtgagccctaacatgatatatgatgagttaaacaatgatgttcatcatgatccttcagtaacagatgggaagttatttgatccagcatcttgtgatgtaaaggatgattctgggaaaccagaaggttgtctacaaggctgttccctgttgcacattgcttgccaatatggccattctataatggcagagcttctgcttctttttggtgcggatattaataagcaagacttccatggacggacaccgttgcaccattgtgtccgaaggaaaaatgatgcacttaccaagcatctgctaaagaggggtgcaagaacaaccattaaagatggtggagggttgactgctttagagagaagaatggaacttggagcaataactgatgaagatttgttcattttatttgtaaggtatgat

SEQ ID NO: 10912 - DNA, 2568 bp, Oryza sativa
  Clone ID: TFbOSC900240j.C1.o3.fg
atgaagacctcgagcttcgagagcgctagtagcagcggcggcagcggcggtggcggtggcggcggtggcggcgagggctccggctcgttcaacctccggaacctatccaagctcatcctgccgcctctcggcgtgccggccggcggccacgcccagtccggccatgccggccccaacgacaggcgtgtcatctcgcctctcgactccagatacaggtgctgggacacgttcatggtggtgctggtggcgtactcggcgtgggtgtacccgttcgaggtggcgttcatgaacgcgtcgcccaagggcggcctcgaggtggccgacatcgtcgtcgacctcttcttcgccgtcgacatcgtcctcaccttcttcgtcgcctacatcgactccaggactcagctcctcgtccgcgacaggcggaggattgccaccagatatctgtcgacgttcttcatcatggatgtggcgtcgactatcccgttccaaggccttgcctacatcgtcaccggcgaggtcagggagagcccggcgttcagcctcctcggcatcctccggctatggcgtctcaggaaggtcaagcagttcttcacaaggctggagaaggacatcaggttcaactacttctggatccgctgcgcccggctcatcgcggtgacgctgttcctggtgcactgcgcggggtgcctgtactacctgatcgcggacaggtacccgcacagggagaagacgtggatcggcgcggtgatcccggacttccaggaggcgagcctgtggatccgctacacctcctccgtctactggtccatcaccaccatgaccaccgtcggctacggcgacatgcacgcccagaacaccgtcgagatgatcttcaacatcttctacatgctcttcaacctcggcctcaccgcctacctcatcggcaacatgaccaacctcgtcgttgagggcacccgccgtaccatggaattcaggaacagcattcgtgctgcctccaatttcgtgggccggaaccacctgccgcctaggctgaagcagcagatactggcctacatgtgcctcaagttcagggcagagagcctgaaccagcagcagctgatggatcagctccccaaatccatctgcaagggcatctgcgagtacctcttcctccccgtcgtcaaggacgtctacctcttcaagggtgtctcaagagaagtgctccttctcatggttacgaagatgaagccggagtacataccgccgaaggaggacgtgatcgtgcagaacgaggcgccggacgacgtctacatcgtggtgtccggcgaggtggaggtgatctactccgacggcgaagccgaggagcgggtggtggcgacgctggggacgaggggcgtgttcggcgaggtgagcgcgctcagcgaccgcccgcagagcttcacgctgcggacgcggacgctgtgccagctgctgcgcctgcgccaggccgcgctcaaggaggccatgcagagcaagcccgaggacagcgtcgtcatcatcaagaacttcctcaagcatcagatcgagatgcacgacatgaaggtggaggacttgctcggggaggacgccgccggcgagtacgaccacggcaacataccgtgcaatctgctgacggtggcagccaccgggaacagcagcttccttgaggatctcctgaaagttggaatggatcctgacgtcggtgactccaagggaagaactgcactgcatatagcggcatcgaaggggtacgaggactgcgtgctggttctcctcaagcaagcgtgcaacgtaaacatcaaagacgcgcagggcaacacggcgctgtggaacgccatcgccgcgaggcaccacaagatcttcaacatcctgtaccacttcgcgcgcgtctcgagcccgcaccacgccgccggcgacctcctctgcctcgccgcgcgccggggcgacctcgacacgctccgggagctcctcaagcacggcctcgccgtcgactcggaggaccgggacggcgccacggcgctccgcgtcgcgctcgccgagggccacgccgacgtcgccaggctcctcgtcctcaacggcgccagcgtcgacagggcggccagccacaacgagcagcaggcggcggcggcggtgtcggtcgacgagctgcgggagctcatgaagacgcgcgagctcgcgcacccggtcaccatcgtcgtcgactcgccgtcgccggccgccgcagccgtcatccgggaggtcggctcgtcgggggacagccggaatgggcggcgccagagcgcgagatcagacggcgcgcactggccacgggtgagcatatacaggggccatccattcgtcagaaaccgtagctcagaagccggcaagctgatcaacctgcccggcaccatggaagaattcagaatcatcatagaggagaaactgaaagtcgacgcgaggaagacgctgatcatgaacgacgaaggagcggagattgactcgatcgacgtgatccgggacaacgataagctgttcatagtgaccgaggagcatatgacagcagtagcatcgatggactcggtgtctggatcatag

SEQ ID NO: 10913 - DNA, 1902 bp, Oryza sativa
  Clone ID: TFbOSC100264j.C1.o5.fg
atggcgtcggagatcgaggtgctcgaggacaccaccgccgccgccgccgccccggccgccaccatcggaggcggagaggtcgcgggcgcgggcgcgggggaggagggggaggcggcggcggatgcggaggcgctcaaggacgacgtgtacacgggcgcggcgtacggggacctcgagaagctgcaccgcctcgtggagcgggagggccggccggtgacggagcccgacgccctcggctaccacgcgctccagtgggccgccctcaacaaccgcgtcgccgccgcccagtacatcctcgagtatgtcctatccttttcagttgtttgctttggtgggatgacggttctcagcttgttgtctggacagcatggagcagatgtaaatgctatagaccatacagggcaaacagcactccactggagtgcggtacgtggtcatattcaagttgcagaactacttctgaaagaaggagctaaggtggatgccgctgatttatatggatatcagactacacatgttgcagcacagtatggtcaaacatcatatctttatcatattgttgcaaaatggaatgctgatcctgatgtccctgataatgatggaagaagtcctctccactgggctgcttataaaggatttgcagattctctcaaatgcttttcattaggttgcactcctttgcattgggctgctatccgcgggaatttggagtcatgcactgtgctggttcaggctggtaaaaaggaggatcttatggtgcaagacaataccggcttaactccagcccaacttgctgctgataaaaatcatcggcaagttgcctttttccttgggaatgctagaagagtacatgagagaggatgtgttatctcaggacaatatagcagtaatatgacattactatttgggttattttcatggttgggaattttccttgctactgccggattggttatgttctataagtgtagcagaaaagatcctggctacattgacaagaatacaagagatgcccaaaatcaaagagatgatgaacctttgttgaagaggggtctagacaaccctgaacttctggctggcaattggtctcagctatgtataacctgcaaaattgttaggcctgtacgctcaaaacattgctctacatgcgatcgctgtgttgagcaatttgaccatcactgcccttgggtgtctaattgcattggaaagaagaacaaatgggaattttttatgttcctgatcctagaagtttctgcaatgattattactggtgtgacggccgtcataagagtagtaggagacccagattctcctgcatcatttggtggatggcttaattattcagccactaaccatccttgggtggtgtcttttgttgtgatggatctctttcttttctttggcgttataactctaactgtagttcaagcatcacagatatccaggaatttaacaacaaatgagatggcaaatgccatgaggtatagttatctcagaggcccaggtggccgattcagaaatccatttgaccatggggtgcgtaaaaactgttctgacttcttgctgaaagggtacaatgaggatattgagagggtagaacagacattacaacctgatgaggaattgggaatgattcaaatgacaagaagtgcagtctcacagaatggcgagagcatgtcacttcatgctaatggcacagaccatggttgtgctgatccacaagggaactcaaaatcccatcgtcactcgcacggttcatcacaatgttgcagtcacagtaagagacctgacaagacccccttggggctaggattgggccttggtcgtaacaacccatctagccgctacacacgttcacttccttccattcattcggagagtagtgcttatttgcccttgtga

SEQ ID NO: 10914 - DNA, 1557 bp, Oryza sativa
  Clone ID: TFbOSC423045j.C1.o7.fg
atggcagggaggcacacttcacacacaatggaacacaaattgctcaaagctgttgccaccggcgatgcagacctcttagcgcaggctctaggcatatggccaacagcaacagctgagcaaggtgacgttgatcagagctgctgcctaaaaggtgtcacagcagagggcagctctgtgctccatatcgcagccagccgtgggcacctgaagctcgtcgtgatgatatgtactcacgacatctcgctcatcaagtcgaggaacaatcagctggacacacctctgatctgtgccgcgagggctggccatgccgatgtggtcgattaccttgtccgtgctgcttcagccatgcaagaacctgaacgttctgtgctgagggcatggaattcaggtggagcgaccgcgatgcatgaggcggtcaggaacggctacgcaccggtcttgcagaagctgatgtcgagcgatagcggactggccaccgctgtacttggcggttgtgtccaaccggccagatatggtcgccagcaagctacgcggggccagatggaaaaaccgcgttgcacgctgcggtctacatcggtaaaggggttcacaactcccaccctcgttttccgcgcgcacgcttttcaaactgctaaacgagaaatgagcgagtccctgaggcgctgggagccaacacttgccgaaaaggttgacatcgatggaagaactgcccttcactatgctgtattaactggggaaactggattggtcgaacttctactggacaacagttcagctgcatacattccagataatgatggcctatttcctgtgcatgttgctgctatagccggcaaggccagtgttacccgtatgttgatggaaatgtgtttaaactgtgatgagttgcttgacaacaaacagagaaatgttttacactgcgctgttgaatatggaaggttaatggtggtgtggtacatatgcagaaacccaaagttcacgaggttgttgaatgcaggagattgtgaaggaaacacaccgctccatctagctgtaaagcatggcaatgcaattatcatctcctgtcttatgatgaatactagagtgaatctcagcattattaaccatgggggatcaacacctctagatgttgccttcaacaagagcactcgttattattcattatcatggctctctagtaccagcatcaccatgtgcctacaagcttgtaatgcttataccagcagattcctaaatcgagctgataagaggttcttggaagacaaggaggaatcaagcgtttacaccaatgtgtcccaaagtatcttatgtatctccgtactaatcgcagcaggttcatttgctgctgctttcactcctcctgggggatacattgcagacggtgaggatgctggcatgccattgctcaaagaatatgctgaattctcgagctacgtggctgcaaatagcatgtcgttctattgctccacatttgcgacatgtctgcttgtgcatgacagtctaacaaataggcgtgttaggaactcccaacgattatctctcaggaactggaattaa

SEQ ID NO: 10915 - DNA, 846 bp, Oryza sativa
  Clone ID: TFbOSC400151j.C1.o22.fg
atggagaatgaatatatatacagagaagaagaagagtcaatcaaggaagacgaagagtcgtggcccttccggagaaatcagcctaacgtaattatcaataatggagccggtagtcccctgatgagttcccttatctaccgatcattgaagtgtatgaagctactcataaaggctggtgctgatgttaatggcaagggtacagttgtaacccctttgatgcttgctgcgtcgcagggaggctatactaacttcattcagtttcttctgaaggctggagcaaaccccaatattcctgatgatttgggttggttgccaatagagcatgctgcattacgtgattgcagggaagaagttgaaatgctatttccattgacttctccaattccaaatgtcccaaactggagtgttaatggaataatcgctcatgcaaaagtcaaaaatacaaagccaatggatcaacatcagaaggagagtagaaaagtcgttttgaaggcacaggcagatttggtattcaagcagaagaattacgccgctgcagcaaaaatatatgatctggcaatagctcatggaccgactgcagttttgtacgcaaacaggagcatctgtagattgctcatgggtgatggtgaaggtgctctttctgatgcttacagatgccgaatgatgcggcctaactgggcaaaagcttgctaccgtcagggtgcagctcacatgctactcaaggagtacaaacatgcgtgtgatgctctcatggatgcacaaaaattagattctgggaatgtcgagattgagagggaactaaggaaagctagggaattaatggcgaaacctccagatgagcagtga

SEQ ID NO: 10916 - DNA, 2566 bp, Oryza sativa
  Clone ID: TFbOSC400177j.C1.o39.np
gcgggagcgggcggatgggacccgctcgtcggctccgagatccacggtttcctcacttacccagacttgaactatgagaagctggtggcggaggcggcggcgcggtggttccggcctaatgagatctacgcgatattggcgaaccacgcgaggttcaagatccacgcacaaccggtcgacaagcccgtgagtggaactgttgttctatatgatcgtaaagtagtcaggaacttccgtaaggatggccataattggaaaaaaaagaaggatggcaggacggtccaagaagctcatgaaaaattaaagattggtaacgaagaaagggttcatgtctattatgctcgaggtgaagatgatccaaatttctttcgaagatgctactggctacttgacaaagatttggagcgcatagttcttgtgcattatcggcaaacagctgaggtacttctttttctctcttgttttatgttttacaataaattattcatttcggatgctgaagtgaggatgcattctaaattagtaacactcatgatcagtctcttaatctggtttatcttgatcaggaaaatgcaatggctcctccgaacccagaacctgaagttgcagatgttcctacagtgaatttgatccattacacctctcctctgacctctgcagattcaacctctgcaaatcatggcctcaatcaagtaaatgcaaatcattttggagctctgaagcatcaaggagatcagactcaatctcttttggcgtctgatgtagattctcaatcagatcaatttataagttcttcggtgaaatctccaatggatggtaacacatctattcctaatgaggtgcctgctaggcagaacagtcttttccacagagcttctgtccagtgaccaatgaaagactattagaaatcaatgagatctccccagaatgggcttactctacagagactaccaaggtcgtggtgattgggaatttctatgagcaatacaagcatttggctgggtctgctatgtttggtgtctttggtgagcaatgtgttgccggagatattgttcaaactggtgtttaccgtttcatggttggaccacatacacctggaaaagtggatttttatttgactttggatgggaaaacgccaatcagtgagatttgcagtttcacgtatcatgttatgcatggtagttccttggaggctaggctgccgccatctgaggatgattacaaaaggacaaatcttaagatgcagatgagactagctcgcttgttgtttgccacaaacaagaaaaagatagcaccaaagttgcttgtagaaggcaccaaagttgccaatctcatgtcagcattaccagagaaggaatggatggatttgtggaatattcttagtgacccagaaggcacatatgttcctgttactgaaagcttgcttgaactagtgttgcgaaataggttgcaagagtggcttgttgaaatggtaatggaaggtcataagtctactggtcgcgatgatctaggacaaggagctatccatctgtgttctttcctaggttatacttgggctattcgattgttttctttgtcggggttctccttggatttccgtgattcttctggttggactgctttacactgggctgcataccacgggagggaaaggatggttgccactcttttatctgctggagcaaatccaagtttagttacagaccctactcccgaatcccctgctggactcactgctgctgatcttgcagcaagacaaggttacgatggcttggcagcatatcttgctgagaaaggattgactgcacattttgaggccatgtcactgtccaaggatactgagcaatcaccatcaaagactaggctaacaaaactacaaagcgagaagtttgagcaccttagtgaacaagaactttgcttaaaagaatctctagcagcctatcgcaatgctgctgatgctgccagtaatatccaagctgcactcagggagagaactcttaagcttcaaacaaaagcaattcaattggctaatcctgagattgaagcatctgagatagttgctgctatgaagattcaacatgcatttcggaactacaacagaaagaaagcaatgagagctgctgcacgaatacagagtcatttccgtacatggaagatgaggaggaacttcattaacatgcgaagacaagttatcaggatacaagctgcgtaccgaggtcatcaagtgagaaggcagtaccgcaaggtaatatggtctgttggaattgttgagaaagcaattttgcgatggagaaagaagagaaaaggccttcgtgggatcgcatctggaatgccagtagttatgactgtggatgccgaagcagaaccagcaagtactgcagaagaagacttcttccaggccggccggcaacaagccgaggacaggttcaatagatctgtggttcgcgttcaagccctgttccgttcttacaaggcacaacaggagtaccggaggatgaagattgctcatgaggaggccaaggtaattttttttaaaactttctccaataattgctggcatgtgccg

SEQ ID NO: 10917 - DNA, 1176 bp, Oryza sativa
  Clone ID: TFbOSC33142j.C1.o5.fg
atggacggacggctctttgaagccgcaaagtcaggcgattgcaggttgatgaaggagctggtggctgccatggatccaagcatattgctccgcacaactcctcaggggaacacctgcctccacatatccactatcaatggtcatgaggaattctgccaggaggtgttgatgttagacaattctcttctcaccgttgcaaactcacacggcgagacgccgctgctcaccgcggtaaccaacggccgcaccgccttggcctccgttttgctcagacggtgctgcgaagcggggctcagagaagctatcttgaaacaagatgagaatggatgtaatgccctgcaccatgccattcgcaacggccacagggaccttgcgttggaactgatagcagcagaagcaggcctgtcacaaggtgtaaacaagtacagggaatcacccatgtacatcgctgtgatgagagatttcactgatatcttccggaaactgttggggattcctggttctgctcacgtgggttgtcatggccgcaatgctctccatgccgccgtgagaaacgggaatccagttattgctaaagagttagtggagaagcgtccagggctggctagagaattcgacgatgaaatggatactccaatgcatcatgccgcaatgtggggtaaaacccatgttctcggagcattgctgcagtatgattggtccttggggtatgtcctaagtaataataaggacagtgtcccgctccttaattccgccgcataccgtggctatgttagtgttgctagagagcttgtgcatcattgtccagatgctccgtattacgacgctaatggttgcacatgtctccatcaagccgcattcaaaggtcatctggagttcgtggaatttatcctagagtcgccgtatcttcggaaactcgtcaacatgcgagataacggcgggaacactgctctgcattacgcggtgcaggattgcaacccaagaattgttgccgctcttttgtcccatggagacacggacgtcacggtacttaactacacgggaaacgaagcagtttggcaattagggggagccgccgattatgccaagacattaaattgggaactaaacacagccatattgcgctcttacacaacttaccatgcattacatggactgttactattgttactataa

SEQ ID NO: 10918 - DNA, 6837 bp, Oryza sativa
  Clone ID: TFbOSC401247j.C1.o10.fg
atggccgacccgagcttcaacttccgcgtcggcctcgccctccgccgcgcgctcccgtactacaatgacgccggcccgcagagcgagttcttcgaggcggccacccgcggcaacgtccgccgcctcagggagctagcgagcggcaaggacgcggaggggaaggcgtggctcgccgacatgggcttctcgggcatcgggccgctccaggctgcagcgcgcttgggggaagtggagtcttgcaggtgcatggtggaggagctcggcttcgacatcaatgccggcagccagcttggtcatgatgaagtagcacgactgttgctatctagaggagctagcattgatatagcttattttcatgggacaccactacatattgctgctgcatatgggaaggctgatgtcatgaaagttttattggagcaccatgcagatccaaacaaggtttcagaagagttgggtacaccgttggttgcaactcttcatgctacttctcaaggactagctgagtctatttcactgaagtgtgtaaagctacttgttgaggcaggcgctgatgttaacttcagtgatcgtgacactccgttggtggacaaacaggatgatcagaatgaaaaggctcagctcaaactatgtggtgagaaagctgttaagagaaaggactaccgtggtgcctcaaatttctacagtcagtttcaaaacatagaattggcaattgagatggatcctactgatgcaacactctattcgaataggagcctttgccatcttcaaatgaccgaagcggaggcagctttgtttgatgctgagttttgcatacaattgcggcctgaatggataaaaggttattacaggaaaggagctgctctcatgttgctgaagaagcacgaaaaggcatgcgatgctttcatggctggactgaagctggaacctggaaatgctgagatggagaaagcattacgctacgatcgcttggtgaacacctcctacaccgtcgtcctaccgctgctcagcagctcgttgtgtgaaaccctggcaagtcagcaaacacctccacttaggggtggaaaaggcgacccgagggagaacgagttgctgaacgccgtgacggagggaaatgcccgccgcctcaagaaaatggtgaatacaatgggcgagaaggacagggcaaagtttactgatatgaatatagatggcaatgggttactgcaagtggcagcacacctgggaaaaattgaggtcatcaggtacttcgtggaggagcttggctttgacgtcaacgctggttgcctctctgatggtgtgacagctttggcttctgccgcaatgtttggagaagcctatgttgtgagatatcttcttgagcatggggctgatcctaataagacagatgagacgggctctgttgctcttcattttgctgcgaaaaatgggtatgaagaagtagtccgtctcttgttatccagtggagctaggactggtatagttgttgctcatgggacaccactacatattgctgttttctataggaggattggtgtcgtcaagattttattggatcaccatgtagattcaaacaacacttcaggagtttggggtacccctattcttacggctctccgttctgctaaacatggattggatgaatctgattctttggaatgtgtaaagctgcttgttaaggctggtgctgatgtgaactatgcttgtccaaacactcccttggtggtggccacgacagctggcttaactgactgtatcaagtacttgcttgaggttcatgcagatcctaacattccagataaacagagcggacgtacacctgtagaaatctctgcaagcgttggaagaagagatcatgtggagattctatttcctttcacttcctctatcagtgcagtaacaaattggacagttgaaggaattattgctcatgggaaatcgagacgcttgactcccaagattgtagacttggattcgaagtttgaaatagtaccaaacatgggcatgtccagatacatagtcaagatcccttattttgggatggagttggctgccttaggatacgctgaagcagcacgcaccgcggaggcggccaggcaggctgcagctgctgctgctactttgcgagctgaggaggagcggcgtgacttggagctggcaaacgcggcctgcgtgcgacgcgacgcagaccgggatcgacacgtaggccgacgtgatcgcgacttcagcccccattgcggaggatcagatctccaccgcgatgaggagtggcatgatctatggcgcgatccttggatcgaccgcgctctggaggcccagcgactctgggagcaggcagcggcgattgaggcacaactggacttcgaccgggagcagggtggacgggacattggcgcacgaagccctcgcaggcagcgcgcctccccttcctcggaccggcaccgtggtcgccgtggacgctccggctctcctcccgttgtgcagaccatcgtcaaggatgttggcggcgcatggcccatgctcaccaagactaactacgccgaatgggcgatggtgatgaaggtgaagttgcaggcgcgccacatgtgggacacggtctggtacggcgatgtcgactacggggaagatcggcgggcgttggaggcgctccttgctgctgttccgacggagatgcagtcctccatcgtgaacaagcggactaccaaggacgcctgggacgccattgcttcggcacgcatcggcagcgaccgcgcccgcaggtccacgcttcagaagctgcgtcaggattgggagaacctggccttcaagccgggtgaggacatcgatgacttcgttctccgcctcaactccttgcagcagcggttggcgcagctcggcgacaccaccattgacgaggagagagccgtggagaagctccttcgcgtcgtccccgagaagtacacgcagctggctctgtcgatcgagacgctgctggacttcaccgagctcacaatcgaagaggtgatgggtcgcctcaaggccgtcgacaaccgcaagcagctacctccctcagagccgatcaccattggtggcaagcttttcttcaccaaggagcagtggctcgcccgccagcaggagtggaagaagggggaggccacaggctcttcggcttcgggatcgtcgagcagccgcaagcgtcgaccacgcaagtgggagaaggcgcgtagtggcgctcttggcgacgccaatggcgagcacaagggcagccgcgacgacacctgccacaactgcgggaagaccggctactgggccaaggactgccggcaggcgaagcacggcggtcaagcacacgtcgctcaagcacaggaggccgcggcccacgtcttcctcagcaacggatcatgcggcgacaagatcgacggatggtgcctcgacaccggtgccactcaccacatgaccgggcggcgggaattcttctccgagcttgactccagcgttcaaggctccgtcaagtttggggacgcctccaccgtggtgatcaagggcgtcggctccatcctcttcactgccaagaccggcgagcaccggctgctcaccggtgtctactacatccccgcgctaaggaactccatcatcagtttgggacaactggatgagaacggctcgcgcgtggagatagaggacggggtcttgcgggtttgggatcgccatcgtcgccttctcgtcaaggtagcgcagcctgtgtgccttgcagcccgccgcgacgatgatgcatggcggtggcacgagcgctttgggcacctcaacttcggagccttgaagcagctcggcaacaaggagatggtgcagggcatgccgcgagtcgagcacgtggagcagttttgcgacacctgcgtcctcaccaagcagcggcgactcccctttccccgccaagcaagtttccgcgccgaggagaagctggagctcgtgcacggtgacctctgcggccctgtgactccggccacacctggaggccggcgcttcttcctgctgctcgtcgacgacgtgtcccgctacatgtgggtggtcctgcacgactccaaggcagctgctgcagacgccatcaagcaccatcaagttgctgcggagaaggagtgcggccgcaagcttcgggtgctacgcaccaacaacggtggcgagttcacggcggctgagttcgcggcgtactgcgccgacgaggggatccagcgccacttctccgcgccatacaccccgcagcagaacggcgttgtggagcgccgcaaccagacagtggtggccactgcccgcgccctcctcaagcaaagagggatgccggcaatctactgggaggaggcggtgatgactgccgtccatctcctcaaccgcttgcccaccaaggcccttgacggcaagacgccgtacgaggcctggcacgggcgcaagccggtggtgagccacctccgcgtctttggctgtctcgccttcgccaaggagctcaaccacgtcggcaagctcgacgaccggagctcgccgggagtcttcatcggctatgcggagggcgtcaaggcctaccgcatcctcgaccctgcgacgcagcgtgtccgcatttctcgggacgtcgtgttcgacgaagggcgaggttgggcttgggacaaggcggtggacgacggctcgacttcgactctccgagacttcgtcgtcgactacgtccactttgggggagccgggggagctagcagctcatcttcaccgagctcgtccacctcggcacccggctcgccatcagctccggcgagtcctccaccacctacaccaccagcgactcctccatcaccggctacgccctgctctcctacaccagcgcccacaccaccggtggagttcgccactccgttgtccaacgacgaggatcgtgttgatgcgtaccacgacgacgagcctctgcgctaccacaccgtggacaacatcttcggtgatcagcccgtccttggactggcgacgcacgacttcgaggccgagctgcacctggcgcatgaggacggcgagccctgctccttcgcagaggcgaatggagatgtggcatggcgcactgcgatgcagcacgagatggacgcggtcgagcgaaaccggacgtgggtgctggcagatcttcctgtcggccaccgcgccatcacccttaagtgggtctacaagctcaagaaggatgaggccggggcggtgatcaagcacaaggcgcgtctggtggcgcgcggcttcgttcagcaggagggagtcgactttgacgacgccttcgcgcccgttgcgcgaatggagtctgttcgtctcctcctcgcgctggcggcccaggaaggatggcgtgtgcaccacatggatgtcaagtccgccttcctcaacggagacctgaagaaggaggtctacgcccaccagccgccaggattcgtcatccccagcaaggagaacaaggttcttcgcctgcgcaaggccctctacggcttgtggcaggcgccccgagcttggaacgccaagctggactccactctcaagcaaatggggttccagcagagctctcacgaagctgctgtctaccggcggggcaaggacggcaatgccctgttggtaggcgtctacgtcgacgacttggtgatcaccggcaccaaggaggctgaggtggaggcgttcaaggaggagatgaaggcgactttccagatgagcgatttgggccttctctctttctacctggggatcgaggtccaccaggacagctctggcatctctcttcgccagaccgcctacgccaagcgcatcgtcgagttgggcgggctcaccggctgcaacctagcctacactcccatggaggaaaggttgaagctgagccgcgacagcacggctgaggagatttggcattcgctgttggctgttagccggttcatgcagcgaccaacgacagagcaccagcaggctgtcaagaggatcctccgttacgtcgagggcaccaccaactacggcttgcactacccgaggtgtcccggtgcgcagcacttcattgggtacagcgacagtgacctcgccggcgacagcgacacgagcaagagcaccagtggcatgctgttcttcctcagcaagtgcctgatcagctggcagtcggtcaagcaacaagtggtggccctgtccagttgcgaggcggagtacatcgctaccacaaccgcctcaactcaagctctctggttggttcggctgctgggagatctcttgggaagagacgctgaagcagtggagctcagggtggacagcaagtctgctttggccttggcaaagaatcccgtcttccatgagcgcagcaagcacatccgcatcaagtatcatttcattcggagctgcttggaggagaggagcatcaaggccagctacattaacacccaggatcagctcgtcgatcttctcaccaagtccctcgggcgggtcaagttccaggagtttcgcgccaggattggaatggacgagtcatgtggcaaggtcaatgacagaaaggctgagctaaaatcacatggagaaaaagcagttaagagaaatgactaccttgctgcgtcaaagatctactccgaggcacttgagctagattattttgatgcaaccttgtattcaaacagaagcctttgcaacctacaaattggagaagcacaaaaggctttgcttgacgcagatagatgtgtagaactgcggcctaagtgggtgaaaggtcactaccgggaaggagctgctttgatggtgctaaaggagcacaagaaagcatttgaggcattcttgaacgcgctgaaactggatcctgctaatgccgagattgagaaagtgatgtggtaa

SEQ ID NO: 10919 - DNA, 1848 bp, Oryza sativa
  Clone ID: TFbOSC400431j.C1.o45.fg
atggagccgccgaccagccacgtcaccaacgcgttctccgactcggacagcgcgtccgtggaggaggggggcgccgacgcggacgccgacgtggaggcgctccgccgcctctccgacaacctcgccgcggcgttccgctcgcccgaggacttcgcgttcctcgccgacgcgcgcatcgccgtcccgggcggcggcggcggcggcggcgacctgctggtgcaccgctgcgtgctctccgcgcggagccccttcctgcgcggcgtcttcgcgcgccgcgccgccgccgccgcaggcggcggcggcgaggatggcggcgagaggctggagctccgggaactcctcggcggcggcggcgaggaggtggaggtcgggtacgaggcgctgcggctggtgctcgactacctctacagcggccgcgtcggcgacctgcccaaggcggcgtgcctctgcgtcgacgaggactgcgcccacgtcgggtgccaccccgccgtcgcgttcatggcgcaggtcctcttcgccgcctccaccttccaggtcgccgagctcaccaacctcttccagcggcgtctccttgatgtccttgataaggttgaggtagataaccttctattgatcttatctgttgccaacttatgcaacaaatcttgcatgaaactgcttgaaagatgccttgatatggtagtccggtcaaaccttgacatgattactcttgagaagtcattgcctccagatgttatcaagcagattattgatgcacgcctaagcctcggattaatttcaccagaaaacaagggatttcctaacaaacatgtgaggaggatacacagagcccttgactctgacgatgtagagctagtcaggatgctgctcactgaaggacagacaaatcttgatgatgcgtttgcactgcactacgccgtcgaacattgtgactccaaaattacaaccgagcttttggatctcgcacttgcagatgttaatcatagaaacccaagaggttatactgttcttcacattgctgcgaggcgaagagagcctaaaatcattgtctcccttttaaccaagggggctcggccagcagatgttacattcgatgggagaaaagcggttcaaatctcaaaaagactaacaaaacaaggggattactttggggttaccgaagaaggaaaaccttctccaaaagataggttatgtattgaaatactggagcaagctgaaagaagggacccacaactcggagaagcatcagtttctcttgcaatggcaggtgagagtctacgaggaaggttgctgtatcttgaaaaccgaggtaaccttcacatatatcataatgggttcataatgctggtttctttggaattaactgtttttggtcttggcaacaaaaggaagtttttgtacgatgtagttgctttggcgaggattatgtttccgatggaggcaagagtagcaatggatattgctcaagtggatggaactttggaatttaacctgggttctggtgcaaatccacctcctgaaagacaacggacaactgttgatctaaatgaaagtcctttcataatgaaagaagaacacttagctcggatgacggcactctccaaaacagtggagctcgggaaacgctttttcccgcgatgttcgaacgtgctcgacaagatcatggatgatgaaactgatccggtttccctcggaagagacacgtccgcggagaagaggaagaggtttcatgacctgcaggatgttcttcagaaggcattccacgaggacaaggaggagaatgacaggtcggggctctcgtcgtcgtcgtcatcgacatcgatcggggccattcgaccaaggagatga

SEQ ID NO: 10920 - DNA, 462 bp, Oryza sativa
  Clone ID: TFbOSC31727j.C1.o1.fg
atgacagaaaggctgttgagatggaagaacgatctttctgaagaaagggataaatacgggagtacacctcttcactttgctgcatcagtggaatcgtcactacacaatcgattcagttccaaagcaattgtctccaaagttcttgaagcttgtccttcttcagcatttcaaccagacaatgaagagtccctaccaatccatgtcgctgcatctgcaggtgtccggagcgccatagcaatcttgatagaaaaatggccaggttgtgcctcatttcgtgactctgatggaagaacattccttcacattgctgtcgagaagcagaggaatgatattgttaggtttgcttgcaaaaaagacaaagaaggcaacactgcactgcacctagctgtccagcttgggaacctgagtttagtctgctctttgctaggtaacaagcgggtactcttaaatctgacaaataag

SEQ ID NO: 10921 - DNA, 1794 bp, Oryza sativa
  Clone ID: TFbOSC401824j.C1.o47.fg
atggacaccgggatgagggtggcgctgcaccggcaggtgtcgtcggggtcgctgaaggagagcggggagctccggcggcagtcgtcgctggagtctccccggacggggagggcggcgacgaggttcctgttcgggaggcagtcgtcgatggacccgaaccggcggcgcgggcggagccagagccccgtcggcctcgccgaggacctgaccgtgccggacaacctcgacgccaccatgcagctgctcttcctggcctgccacggcgacgccgccggcgtcgaggccctgctccgcggcggcgtcgacgtcaacagcatcaacctcgacggccgcaccgcgctgcacatcgcctcctgcgagggccaccccgacgtcgtccgcgtgctgctcacctggaaggccaacatcgacgcccgcgaccggtggggcagcacggctgtagctgatgccaagtgttatggccacacggaggtgtacaatcttctcaaggctcgtggtgcaaagatcccgagaaacaggaggacaccgatgatggtgtcgaatcctggggacgtaccagagtacgaattgaaccctagtgagctccaattcaagaaaggggatgaggtggtcaagggcgtgtaccaagttgccaaatggaatggaaccaaggttcatgttaagatacttgatagagaatgctactgcgatcaggaagtcataaactctttcaggcatgagctgaccgtattggagaaggtccggcacccgaatgttgttcagttcgtcggagccgtcactcagaacatacctatgatgattatttctgaatacctcccaaatggtgatttatcaagctgtattccgaggaaaggaaagctacatggtcagaaggttctaaaatatggccttgagatcgccaggggcatgacttatcttcaccagtgcaagccagaccccatcatccactgcgacctaaagccaaaaaatatcttcctggatagtggaggccaactgaaaatcgcaggattcggtctgacgaggctgtcgaaaatctctcctggcagagtgaaactggccgatcatgagtccatggttgacagcttcagtcactacactgcacctgagctgtacagaaacgaaatattcgacgcaagcgtcgacgccttctcatttggtttcatcctctatgagatggttgaaggaacacacactgtacatgggaagtcatcagaggaatctggccacacaattcgatatgatgggatgcgtccatcgctgaagaacaagctcaggggatatcctccagatttcaaagcgctgatcgaagaatgctgggatactcagggaaatgacacgtgtgggctaagctgcatgaacgccttcttgtgtacatatcactgcgaagcaaatgcgtcactctctgtgaagaagaagcctgagctagcactcactcgtctggaggaggatgacacgacgtaccgacaaatttgtgcgggcgccgccgcggtccgcgcgatggaagaaggccgcggcggcgatccgccgtcgtcgtcgtcgtcggcggcggcggcggccggggtggcgattgggtacccattcctcgagcctcagcagggcgcccgcttacgccgacgcaggacgattagcccgttcaagaagtacttttcaaggggttttgcaatcggtatggaaatcgcgtttatagttttcggcaccatagtacatttccccgtctgggccaggatatttcttataatttccttatccatcttgccgttttctgccttttcgatcacgttccaggagtattga

SEQ ID NO: 10922 - DNA, 699 bp, Oryza sativa
  Clone ID: TFbOSC900390j.C1.o25.fg
atggacctcacacctgctggcggtgagcgtgacattcctgacgacttgttcatgtgctctgagctctacattgcagcgttcgaggggcacaccgatcaggtcatcggacttttagaaggaagccgcgcctccgcggcagtcgccgggaacggctggtcgtcgccggcggcacaaccaacagctaaacaccatggaaactgtaacattcacgaggtgaccgccgagcgctggacgctgctccacatcgcggcggcgcaggggcacgacgacctgatcgacgagctatgccgccgggacagcggcctcctctccgcggcgagctcgtcgggggacacgccgctgcactgcgcggcgagggcggggcacgccggcgcggtccgggccatcgaccggctggcacgcgcgaacgtggaggaggacaggctgcgggaggcccttcgcgggaggaacgaggccggcgacacggcgctgcacctcgccgcgaggcacggccacggcgaggccgcggaggcggtggtggagscggcgccggagacggcggccgatctgaacggcgccggcgtgtcgccgctctacctggcggtgatgagcgggtcggtgcgcgccgtcacggcgatcctctggtgcagggacgcgtcagccactggaccgaaatcacagaacgcgttgcacgctgcggttctccagtgttcaggttaa

SEQ ID NO: 10923 - DNA, 4779 bp, Oryza sativa
  Clone ID: TFbOSC423276j.C1.o2.fg
atggcttcgccgcttcccttttgctctctctctctcgcccttccctccttttggattttgagtgaatataatgtaaaatcggagaggaggagaggaggagcatttgagattggagagggggagggggaggaggaggaggacgcgagtgaagagacgaccgggagcatggatcgcgccaaggcagcagcgcgcaaggacaaggcggcggcggcggggaaggagaccgccgtgtcccgcgccgtcgcgttggacgacaccgcgctgctgctcgcggcggtgggaagcttcaggaaggagggctccgacgcgtcgcggatgctggaccaggagatgtccacgaggctgctccacctcgcctgcaagcacgacgccgtgcagtgcgccaggctcctcctcgagggcggtcacggtatcaccgcgtcacccgtggatgccagggaccagctcacgcggacgccgctccaggtggccgccgaggcgcactcggccaggtgcatcgagctgctgctctccaagaacgcgcgcaccgacctcaagctggtcgatggccggcctcttctcgcgctcgagatcgctctcttgagcagaagagctcaagttaaatggtcactggacaactccattgaggatcttctgtcttctctgcaggaaaagaaatgccaccttgttccatgtgtaggatctgaatgtagtgaggctctggcagagaaaaccagagaggttggggaggtggcctacagatatgccatggagggtcgtgttactgtgttggcaatgctgcttctggtggctgaagagaagatatcggcaccagtcagtgtagtaatagagggcgtcaggacaaagaaatcaatctactactctattgtggatgaggctctgtccattggggatgctccagcccgggacagcaatgagaggagaaaggccctgctcagtgagattcagctacttaaccaatttggggcagcgttatggagagatcgcaacattgacaagagaagcctgccccctctgcttaaagctgccaagctcccgaagtgggccattaaagatattgaacgctgctgcaggggttttctatggaaagggcaagaagaagttagtgggggtcactgcctcgttgcttggcgagtggtctgcaggccggttgagtgtggcggcctgggcatcagggacatcgatcgcttcggaaaggctttaaggttgaaatgggaattcaacagactagagcaagaagacagaccttggacaatggtgcggtggaaatctgataaggatgttcgcgacatcttcaattcagtggcacagcacattgttggagatggcaatcgcactgatttttggagaggtaagtggctgccccgtggaggaagcattgcaaacaactggcctattcttttctcctttgtgggtcgcacgaagatcaccgttgcacaaggcctgctaaacaacagatgggtgagggatttgcaggggtctctctctaatagagctcttgttgattacctggcgctttgggatgagctgcagctcgtctcgcttcagagtggtgaggcagattcagttttatggcggttctcagctaacggggtcttttcggcttcttcggcttatgagtttctcttctccacctcaatcaaatgcccccacggggagctgatttggaagaccaaagcgccagcaagagtgaggttcttcctctggttggcggtgaaggggcgttgcctcacggccgacaacctcagcaaaagaggttggccacatgatcccacttgtctgctatgtcaatcggcgccggaggactgcaatcacttgctcgtcaaatgccctttcactaacagagtgtggcagcaattgaaggcttgggtgaatgtcacttttcctctccctgctcagcttggcatggaactggcagattggtggcattgtgcccgccgctgttttcagatgaggttcaggactgcttttgattcacttttcatgctggttggagatgtaaatgtcacaaagatgctcctgatgggggatgttgatgtcaatgaagccgatcctgaaggaaacacagcacttcactggtgccttagtggtagttcaagcacacaggagccaaggattgtgtggctcctgctgaagaatggtgccagagttttccaggggaacaaacttggtcttacaccagtacacagtgctgcagctaagggaaattataaagctcttcagtcacttctgcttcacgctcaagattgcgttgatacaccttccaagaccaaagaaaccccattgttcttagcagtgaagaatggttctttggactgtgtaaagcttctcctgcgttctggggctagcaccaaaaaagcaaagaccaatagatgtggcaacgtcccaagatatgcgtttcattcttacctctgcaaatgtggctccatggggggcaagagtaagagccattgtgctcccaagcaaggttccaagtttgtgcctcggcctaatcattggctgaagcacgactacactcggaaaatttttgttgggggcctcccaccttctgtgggcgctgagtacctcactgagttcttcactgctgaatttggacctatggaggaagcagtagtcattgggataaggatgggtgatcgggtgcaatccagaggattcggttttgtaaagttcaaaagagaagaggatgtgataagtgcaaaggaaactcatcatgtgtacatgcttgggaagagagtggaggtaaaggatgctgttgctagaggatccttgccttcagaaatccagaaaacttcttcattcaggcaccacaaccaggaggttccaaaggtaactcatcatctgttgggtggtgagctaaaggaggaacattacattaggaagcggaggcccttgccagagaagtgtcttccatcttggttctttatattcaggaagtggctgccaggatttcttgcagatgctactgaacgacttggagataggtacccattgagctccctgaagggtgatttcagagcaatttgcagaatggagcttgatcatagcacacttggttatcctaagctcagtgatttcatgcgctcccttcctggtatctgcagaatgtgtgtagtccctgtaggaagcggtcctgcaacacacaaggtcctccttccaccggtctcgcgaccgaagtatgtacccttgctagtaccattctcctttgatcatgatgagctcccagaatcagtgtcagatcatcagttcccgatgtctccacttaccactaatatcaccgaggactcccctcgtaacacagacagtcagcacggtgatacttgcagcgagagcaatgcggagagccagcaggatagtgcttccactgacaatggtagccaattgtacacttcaattgagcctgtatctacaagaaagcttgatgtagttgagcctctacctgcaagaacacctgatcgagttgaacctcagaagattggttctgatcctgcgagaaagactatttcccttgaatctggacttggtgtgcagattttcataggcaatggtagtgcaaatttgtcactacaggtcgacgtcaagaaagacgttgaatacatgctgatgttatatcaaaagagaactggaatcagcagtagaaatatctattttgtatacagagggaagaggctcaggttaaaccgcagcttactatcatatggtgtacagaaagacagtactgtgaatgttcgcagtagaattctggggggtgctggtacatcactggaggaatatttacacaagcacaagaatagtcttgtgaaaaaaaccgccttgtatgatggaagattcttcccagagttgacacccagaagcagtattcttttgagaacatgggtcttatgttttacaaaggcattcaaggagcgacattgctgggagcccaaatgtgaactctctcatttcaaggttatcaatggtcatgtcaaggttagcacaccagcaaaagggaacctcacaacgcattttctgcaagaaaatttatcttttctggcaaagacattaaaggatttcttcagaacaattggaacaaatcttgtctcagaatacccaccgtactttgaatattttatgaagtttatattgaaaatagatctaccatgcgtaccacatttgcagaaagttataattgaattgaacctatgctttatggattcatacatgagaggggtgctgacagtgagattgaagcaaaaatttgatagcctacctccaaaacaaagagccactttgatagataagatcaatcatatcacatgggatacatctcgaatgccaaatctttctacaattcctgtctttgataaaatcatcaaaaaagcaaaggatgatggagagccttacttcattgagaattcagtgaacttcgagtttaaggcgttcaatggatttaggttgagccgtgatgctcctatacatgctcctcaacacagatttgacaaaacatcggtaccttggaaggaaaattttccagataatacaatagaattgatgacacctgcttatctgggtgatttgcttcccgaaattatctggtgctttattctaaataaggtggacatcacagaggaattatcacaaagtcagactccatgctgtactatgtgccatcctataaaaacagatgtgggtgaatatcccacgacacagcaaactactgtgcaggataaacagcctacaatggaagatgttggatcctcctcatcaatgcagcaaaatgtatggaagaaaatctggtaa

SEQ ID NO: 10924 - DNA, 6094 bp, Oryza sativa
  Clone ID: TFbOSC28359j.C1.o1.np
atggccgagccagcaaaggcgcgcgacctctccccgagtatgagcggtgacgacggggagccaaacccacgccgttgagctcgtactccaccgccccctccacgccaaagtcctaggcgggaaaaggcgctcgagagggctgaaggatccgcgacttcgacatccacaggaggtggagaagggcggcgagatggggagcgtcgtctcctcgtctacggcgacggcagcacgccccagggcgcgctccaagctgcaggcgcgctcctacgtcacccgcccgtcgcccatgaaccggagtctccagcccaacgttggctggacgatgtggccaaattggtcatgactgcacggcagcgcctagatgctggtgggcggtcctccgccaccaaggcctctggagctgctaccaccggctccgcgtcgtcaagacggagggcacgacgagcggcagccgctgttcgccattcggccgccactcctttgtcgactccttcgacccgggaagatctgcgtggggggccggacgcccgcaccagcatcgagcgccggcgtaatgaccgacgtgctgcccacgcaacggagggcgcttcctcgtccagagtgtcacctcaacacggacgcggggaccagccctccgtgcccccggttggtggtgtcggctgtagagcctttgtggcgagccttcggaatgtccgttgccccccaaggttccggcccaccatcgccgaaaaatatgacgggagcgtcaaccccgccgagtttctctaggtctacacgaccgggatcgaggccgccgggggtgacgacagggtcatggcgaatttctttcccatggccctgaaaggacatgcacggggttggctaatgaacttgccacccgcgtctgtccactcttgggaggatttgtgccaacagttcaccatgaacttccaaggcacatatccgcgccccggtgaggaagcggacttgcacgcagtacagcgaagggacgatgagtcacttcgatcgtacattcagcggttctgtcaagtccgcaacaccataccatgcatccctgcacacgcggtgatttacgcgttcagggggggtgtgcggcacaaccgtatgctcgaaaagatcgcctccaaagagccccagactaccgcggagctttttcagctcgcggaccgagtggctcgtaaggaggaggcatggacctggaacccctccggttccggtgtggcagcttcggccgcccccggatccgctgctcagacagggcggcgtgacaggaggaggaagaagaggtcagcccataccgacgatgagggtcatgtcctcgccgtcgagggcgctccgcgggccacccgaaaggggaggcctggggagacaaaaagaaggaggccggcgctcccagcagggagcgcccgaccggcaagtggtgcaccgtccacaacacttcccttcacgacctcgcggactgccgtgcagtcaaaagtttggctgagcggacgaggaagtgggaggaggagaggaggcaggagcgccgagagggcaagtccccggcggttccttccggcaatcggcgaagtgaggccaagcagaaggcccccgccgaggacatcgatgacagcgatgatgacctaggtttccaagagcctggggccatcgttgccactgtcgatgggggagcgtgtgctcacgtttctcgccggaacctcaaggccatgaagcgagagcttctggccgcggcccctactcatgaggcgacgcgccgggcgcggtggtcggaggttgccctcaccttcgaccagaccgaccacccaccgtgcgttgcccggggaggacagatcgcaatggtggtttcccccactgtttgcaacgtgaagctggggcgtgtcctcattgatggaggagcagccctcaacatcctttcccccgcagcctttgacgccatcaaggccccggggatgatgctccggccgtcccagccgatcatcggtgtgacgccggggcacacttggccgctaggtcatatcgacctcccggtcaccttcggtggacccgccaacttccgcacggagcgggtgaactttgatgtgacggacctcagtctgccctacaacgcggtcttggggaggcccgcgttggtaaagttcatggcggcggtccactacgcctacctccagatgaagatgccgggccccgatggccccatctctgtccatggcgacctcaaagtcgcgctcgcttgtatggagcagcgcgcggaccgcctcgccgtcgtgtccaagcccgagggtggcgacgagaggcttggcacatccgcccccgccgccccgaggcagcggatagtcacgtgcgatgaggtcccggtcaaggaggttgccctgggcgacggccccgtctctttcctgcgggcaaacgctgacgtcttcgcatggagaccggcggatatgcccggggtccccagggaggtgattgagcaccgtctcgccgtacggccgggcgcaaggccggtccggcagaaagtgcggcgccaggccccggaacgtcaagccttcatccgcgaggaggtggcgcgacttctggaggccggattcatccgcgaggtcatccatccggagtggctggcgaacccggtggtcgttcccaaggcgaacggcaagcttcggatgtgcatcgactacaccgaccttaacaaggcatgtcctaaggatccttaccccctgcctcgcatagatcagattgtcgactccacagcggggtgcgaccttttgtgttttctagatgcatactctggttaccatcagattcgcatggctagggaggatgaggaaaaaactgcgttcattacccccataggaacttattgttatacaacaatgcccttcgggttaaaaaatgcaggtcctacttttcaacgtactactcgaatttctttgggtagccaaataggacgtaatgttgaggcttatgtcgatgacttggttgtaaagacgcgcaaccaagagaccttactctcggatctagcggaaacttttgagagtctccgctccgcccgcataaaactgaaccccgataagtgcgtgttcgttatacctgcgggcaagcttctcgggtacttggtctctgcccgaggcatcgaggccaaccccgagaatatacgagctatagagcggatgcgccccccagcaagcttagggatgtgcaatgcgtcaccggttgcatggccgccctaagtcggttcatatcgaggctgggagggaaggcgctacccttatttaagctcctcaaacgctccgggccgtttacttggacggaggaagctgaacgtgccctcactcagttgaaggcgtatctcagctctcccccagttctggtcgccccggagccaaatgaacccttgctactctacttagcggcgaccccgcaagtggttagtgcggcgttggttgtggagcgcgatgaggacaatcctcattccgcgcacccccaccctgtgctggcttggcccgggagagagcagggaggagaggcccccgagccggacggtggcccaaggcccccgacgaccggagcaggccctctccccgcttgtcagacggtgccaggtgcccccgacccccaggacggccccgaggccactgcgggaaggccgcacctatcgccctctgaccccgaggctaaccctgtaccgattcgacccgggagagagcagggagaagaggcccccgagccgaacggtggcctaaggcccctgacgaccggagttggccctttgcccgcttgtccgacgacgccaggagcccccgacccccaggacggccccgaggccactgtgggaaggccgcccctgtcgtcctccgaccccgaggtcgtcggcacagaagacgagtgcgccccgcgaggccgcttgggtgaagagcgccccagggatgcagcccctagcgaagaggatcggccccaccgaaaggtgcagcggcccgtctactttgttagtgaggccctccgggatgccaagacccgataccctcaggcccagaaaatgctttacgctattctgatggcctcgaggaaactgcgccattatttccaggcgcatcgggttacggtggttacgtcttaccccctcggccaaatcttgcataatcgagagggtactggacgggtggtgaaatgggcaatcgaactttctgagtttgatttgcactttgaaccacgcaacgctatcaagagccaagccctcgccgactttgtggcagaatggaccccggctcccgagctcgtctcggtccccgaagcaaactcgggcccctcgcagctgcctcacaccgcccactgggtgatgcagttcgacggctccctgtctcttcagggcgtcggtgcgggggtcacgttgacctctccgagtggagacgtcctcagatacttggtccgcctcgactttcgagtgaccaataatatggcagagtacgagggactccttgccggactcagagtggcagctggactggggatccgccgcctcctggtgttaggcgactcccagctggtcgttaaccaagtctgtaaggagtaccggtgctctgacccgcagatggacgcctacgtgcgccaagtacggcgtatggagcaccattttgacgggattgagcttcggcacgtgcccagacgggataacatgatggccgacgaactctcacggctcgcgtcctcacgagcccagaccccaccgggcgcctttgaagaaaggcttgcccagccgtcggcgcgacccgaccccttaggggagacggatgcgcctgaccggcccccgaggcccgtcggagtccaggcctcgggacccgaggggagtgctcccagctcccttagattgattgcttggatcgccgagatccaagcatacctcacagataagactctacccgaggaccgcgaagggagtgaacgcgtccatcgcatctccaaacgctacgtgctggtagaagggaccctctatcggcgcgcggctaatggaatcctcctgaagtgcattcctcgggaaggcattgtgcttcttgccaatatccatgaaggcgaatgcggagcccactccgcctcgcgcaccttggttggtaaagcttttcgccaaggtttctattggtcgacagctctcaatgatgcggtcgacctggtccggcgatgtagagcgtgtcaattccacgccaagcaaatccatcagccggcctaggccctgcagaccataccactttcgtggccatttgctgtctggggactcgatatcctgggaccgtttaggcgggccccgggcgggtttgagtatctgtatgtcgcgatcgacaagttcactaagtggcccgaggcttatctggtcgtcaagatcgataagcactccgcacttaaattcattaagggcatcacggcccggtttggagtgcctaaccgtattattacggataatggcacccaattcactagtgaactcttcggcgactactgcgaagacatgggcatcaagctctgcttcgcctcacctgcccaccccagaagcaatggccaagtggagcgcgctaatgcggaaatcctcaaaggccttaaaaccaagaccttcaacatactcaagaagcatggcgattcatggatcgaggagttgccagcagtgctctgggcaaaccgaactacaccaagccaagcaaccggggaaacgcctttcttcctcgtctacggcgcggaagcagttctcccatccgagctcaccctgaggtctcctcgggccaccatgtactgcgaggctgatcaagatcagcttcgcagagatgacctcgactacttggaagagcgaaggcggcgcgcggccctccgagccgcgcgctaccagcagagcctgcggcgctaccatcagcgtcacgtccgggcccgatcactctgcgtcgacgacctcgtcctacgccgcgtccaaacgcgtgctggattgagcaagctttcaccaatgtaggagggtccgtatcgagtggtcggcgtcccccggccgggctccatacggctggccacgggcgacggcactgagctgcctaacccgtggaacattgaacaccttcgtcgcttctacccc

SEQ ID NO: 10925 - DNA, 1458 bp, Oryza sativa
  Clone ID: TFbOSC401247j.C1.o16.fg
atggagaagaaggataagggaaggcaccgcggccgcgacggcggaggcggaggcggcggcggcggtggtggtggtggtggtggtgtggatcccgccggtggagggagcggaggaggagggccgggaatggggcggcgcgggagcgatgcgcgtggccagcaggcggaggcggcggccgcggcaatcagcggcatcgccacccgccttggcttcgggtgcaccatcaatgtcggcggcgggatgccaccgcagatggagttcctgatggcgtgtacggacggcgacgtcgcgcgcctcaaggaggtggttgatagcatggatgaggatgatcggcaatcgctcacctctgtgaggatggaggggtatgagccactgtttgaggcagcaagctcgggaaaaattgatctctgcaagtacttggtggaggagcttgggttcgatgtcaatgccgaagctaatcatgattccggtatgacacctttgttttgcgctgtgttggatggacaagagattactgtgaagtattttcttgacaaaggtgctgatccgaataagaaagatgcagcaggctttgctcctcttcatgaagctgcaaaaaaagggcacgttggaatagcacgactgttgttatctaaaggagctagtgttgatgtatcttcttctgaagggacacctcttcatgttgctgcctctaatggaaaatctagcactgtgcagattttattagagcaccgcgcaaatattcaacgatcacaagttgatgcaaaaagctttcgaaacagggtccaagtgttctatgtacctgctttgccaaacgtgatattaccagattgttatacaccattgaccgcagttctttctgccactcctgaaatagtgaatgaatctgagtgtttgaagtgcatgaaactccttgtgaaggctggtgctatttataatcttgcaactcctgatactccattgaagatagcaactagaaatggcttaactgagtgtgttgcatacttgctggagatcaccacagttaaactaagtgaacatgacaaaggaagtgatggagacagaaaatctaagctgaaattacatggtggaaaagcatttgaggagggggactatgctggtgcaatcatattttacaccgaggcaatgaaacttgatcctgcagatgccacactgtattcaaacaggagcctttgccatctgagaagtggtgcagcgcaggaggctttgctggatgctaatgattgcataaaactcaagccagagtggactaaaggtcactatcgcaaaggatgtgcccacatggcactcaaggaatacgaagaagcttgtactgcattcatggctggaacaaagctcaatcctttaaacgatgaaatgcaggatgcattttgggaggcagctaaaggaatgatgtatgaacatatggctggaaagcgcgtcagctcggttgattag

SEQ ID NO: 10926 - DNA, 903 bp, Oryza sativa
  Clone ID: TFbOSC423046j.C1.o5.fg
atgccccggcgcgcgcgctctccgcgcctcccaccgcccccgcaccacccttcccctcctccgccgccgcttctctcggttggccccggggcggcgccgcgcgccgcgcgcccttcccacggcgacgtgttctgggaggagccggacgacggcggctccgggagcgacgacgaggatggggatggggcagaggccgaggccgagcggcaggaggccaccgggcggaggagcagcttctcctcgttcccttccccctcgctgttctccaggctcggcgccgcgcggcggcaagagcagcgagaagaagaggagcttcgaggagaaatcgagcttctcttgacgcctgaagaaatggctatcctggatcagaacgagaccccggatatcaccaaaatatcatcaccgaaatggcatccacttcatagttacgcattggcgctgcagatacctctcatggacagcctgctcgatagtggtgtcgatatcaatttacttgacaaagatggtttcaccccacttcacaaggctgtcataggcaaaaaggaggccgtcattagccatctcctgcgaagaggggcaaatcctcatgtcagagatagggatggagccacaccattacattatgcagttcaagttggtgccctgcaaactgtgaagttactgattaagaatagggttgatgtcaatgttgctgataatgatggctggacaccgttgcatttagctatacagagtagaaatagagatatagcaaagatattgcttgtcaatggtgcagataagacgagaagaaccaaggatggaaggactgccttggatataagcttgtgttttggaagagatttcaagtcttatgatttggcaaagcttgtcaaacttgttccggcaaatagaaaaatgtga

SEQ ID NO: 10927 - DNA, 3090 bp, Oryza sativa
  Clone ID: TFbOSC421183j.C1.o15.fg
atgggcagtctctgtctcgagcgccggaagcaaccggacgatcccctctccatttcgcagcagctccacctgtgcctccttcctctcctcttctgcgcggcttcaaagttttcggcttttgagggagttcttgctcaatatcccgatttttctttcttttttttctctgcctctgcgagaaatcgaggttttgatatcaacgtgcttcacaaagaagcaaggagcaggtggctaaagccttctgaagtctactatatcttgcaaaatcatgagaggttcccaatcacccctgaaccgccaaagaagccacccagtggttctctattcctttataatcgccgtgtgaatcggtattttcggagggatggccatgcatggcggaggaagaaggatggaagaactgttggggaggctcatgaacgattgaaggttggaaatgttgatgctctcagttgttattatgctcatggtgagcaaaatccatgttttcagaggcgatgtttctggatgctggaaccagcatatgaacatattgtgctggtacaatatcgagaagtaggagcagctgagggtagatataattcagcatcactgttgaatgggccaacagattctctttcagtcttgagttatccaaatgctacatatggaaaccaatatcttggctccacttctggcgttagtgatggtagtgaatcactccattctaatttgagctctgtaacggaggtaagttcctattctgcaaacaaagacaatggtattctgcaaagcatacaggagctcagccagtcaactataatgggtgcaccggcgcttggccagagtagtctggagcaaagtattgaagttcgctgggtagataacagtaattcaacaaataaatctgggctcaaccgagctttgaagcaaattgttgagcagttaagcttgggggatgatgaggatgatgactacatacaccaagcacagccttttgacttcattacaaatattgaagctccagataggcagcgtgatgcaagcagaaatgtttcagaatatcaaccaccaggaagtctatacaacagtgatatgcagcagatttctgctgctaaaagatttcttttggagacagaagactctattgattcaccatcttataactatgtgcccagagaagaaggaaacaatggcactaatactctttcagttcatgactatagtcttcagagcagtctgaacccagattggaaaaaaacagcacctctaacacttcaaagcaatttgtatggctctgaaataccaagcttattgttggaccatggtcagtttgaatcattgtcctctggtgaaaatacaagattgatcttgggtcaaaacccccggtttagcatccgtgaggtctctccagaatggacatactgctatgagatcaccaaggtcatcattactggagatttcttatgtgatccatcaagctcatgttgggcagtaatgtttggtgatagtgaggtgccagctgaaattgttcaggcaggtgttcttcgctgccacacaccattacatagtagtgggaagctaacaatctgtgttacttctgggaatagagaaatttgcagtgaagtcaaagactttgagttccgtgcaaagtcaacagcttctagtttcctagacatttcaccatcatctagatctctgaaatctagcgaagagttgttacttcttgcgaaatttgtaagaatgctattgtgtgagaatggaagtcatgcaaattcaaacggtgatcctcagtctgtgcagtgtccaaaacttaagatgaatgacgagcactggcagcggttgatagatgaactcaaaggaggatgtgagaatccattaaacgtgtctgattggattatggaggagcttcttaaaagtaaattgcagcagtggttatcagttaagctacaaggatatgatggcatagcctgttctctgtccaagcatgagcagggtattatacacttgatctctgcactaggctatgagtgggctctgtcttcaattcttagtgctgatgttggtataaatttccgtgatacgaatggatggacagcacttcattgggctgcttattttggaagggaaaagatggttgctgcacttcttgctgctggggcgtctgctccagcagtcacagaccccactgcacaagatccagtgggaaaaacagcggctttcctggcttctgaacggggacacttgggccttgcagcctatctttcagaagtgtcactaactagttatcttgcgtcgctcactatacaagagagtgatacttcaaaaggatcagctgcagctgaagcagaaagagcagtagagagcatatcccagaggaatgcccagctgcatggtggtacagaagatgagctctcgttaaaggactctttggcagccgtgagaaatgcagctcaagcagcggctcgaattcagaacgctttccgtgccttctctttcaggaagagacaacaaaagactgctcgacttaaggatgagtatgggatgacccaagaagatatagatgaacttgcagctgcatcaaggtcatattaccaatctcttcttccaaatggtcagttttatgataaagcagctgtctcaattcagaagaaattcaaaggttggaaaggacgaagacattttctcaacatgcgcaggaatgcagttaaaatacagctgtattttacacaagcacaaggaccttaccttagcggcccattctttgtacaggctcatgtaagaggccatcaagtgagaaagaaatacaagactttcgtcagcactgtcagtgtgctagagaaagtgatactgaggtggcgtcggaaaggacatggtctacgtggcttccgagctgagcaaacagcaatggctgaagcagaagaggatgacgaggatgatgatgatgacgacttcaatgatgatgaagcagtcaaagtgttccgccgacagaaggttgatgaatctgtcaaggaggctatgtcaagagtactgtccatggtggactctcctgaagcaaggatgcaatatcgtcgaatgcttgaggaatttcgacaagccactgctgaatag

SEQ ID NO: 10928 - DNA, 498 bp, Oryza sativa
  Clone ID: TFbOSC413065j.C1.o5.fg
atggcgccgcctcgcttccctccctcctcctccgccgcgcgcctcccgccgcgatccacaccgccggagcccaggcccagccccccagccgcagccgccggcgccgccgccctcgcccccggctcgctggaggaggtcctcctccaggcggccttcgacggcaacctccgcctcgtcaggaagatggcgagggcgctggacgagggggacggccgccgcctcggcgacaaggtgggggccgtgagggacggcaacggcgtcggcgcgctgcacctcgccgccggccgggggagcctgcccgtttgcgggtacctgctcgaggagcttcgtgtggatattgacgccgtcgaggacagaggtgaaacggccttgacatttgcgatcaattccgggaatgcggacatggtgcggtatcttcttgatcatggagctgatactgaaaagctcaacaacgatggacttactgttctccattttgcttctggcgaaggtgtataa

SEQ ID NO: 10929 - DNA, 1335 bp, Oryza sativa
  Clone ID: TFbOSC400555j.C1.o7.np
atggcagtccccggccgccgcgacgacctcgtcggcgacgacctcgtcgacgacgacgggatcggcgaggagtacatggccccctccgacgacgaggaggcgcaactgcctgacgaactcttccgcctcgccgacgccgcccagtccggcaacgtcgctgccctccgcgccgcgctcgataattattctggcaacattgatgatccaatagaagatggtgatactctgcttcacatagcatgcttatatggccatctaccttgtgttcagctactgttggaacgtcaagctagcttggaatgcaaagatgaagaaggagcaattcctcttcatgatgcttgtgctggaggctttagtgatatagtccagtacattttgaattttgctgcgaacattgatggctgcgtaacaagaatgctcaacactgttgattctgaaggcgacactccactccatcatgctgccagaggggaacatctgggtattgtggatctcttgcttaaagctggggcatgtgccaagaaggagaatacttatggccaggtccctgctgagatggctgatgaaggcactgaagtccggaaactgaaggtagtcactgtaccatcctcaaatcctcatccatgccatcaattgccgatccgccactctcccaaccacgacgatggcggcggtgcagcgccttccccttcctcccgccgcccctcctcagccgtgccgcggacgatggaagacgaacgagacgaacgggtcgtttccatggacggaacgtacgacgccgacgagaagcccgtgcttcttttctctcgcggcgacggcgttgtccgtgtccacgatctcccgtcgctgaagaagagaggggatattctctgctacgacgaggtcaagacgatatccatcaggtcgcgcggcgtcgtcttcaccggagatgcgtccggcgaggtacctagtactggagttatgtttgcaaagctcaatgctgatacttctgagattaagcttactgagaaacaggatgatgatactgaagacgacaagaagaaagtcaatgggtcgatgaaaatcccgcgagtatggctgtctttgtctgattgctgggagaaaatgaaggtctctatctttgagtttatgattgatacaagtggaaagaaagaggcaatctatactgtgtacagctatatcgctattgggattatcctgagccttaactgtttctggaaagtatggcgtgaagctagtaattcggatgaaaaaccatctgggtttaaagctttctttattaccatcgtttgcatggttggcaaaaaactctatgactctctgaagaccaccaag

SEQ ID NO: 10930 - DNA, 1674 bp, Oryza sativa
  Clone ID: TFbOSC401007j.C1.o11.fg
atggagaggcagacgagcttccgattgggcgcgctggagaagctcaagagcttcagggggatggagaagcagaagagcttcaagatgatgtccacggacaacttccggaggcacagggacagccccgggaagcgcggcgacacgccgctccacctcgccgcgaggtccgggaacgccgccggcgcgcagcggatcatcgccgagttcgacccggaggtggcggcggagcgcgccgcgcaggccaaccacgacggcgagacgccgctgtacgtcgccgccgagagggggcacaccgacgtggtgcgcgagatcctcaaggtctccgacgtgcagacggccggcgtcaaggcgaacaacagcttcgacgcgttccatattgcggcgaagcaaggccatctagaagttctgaaggagctgttgcaggcttttcctgctcttgcaatgactacaaattctgtaaatgctacagctttggatactgctgcaattctgggtcacactgaaattgttaacctcctactggaatctgatgcaaaccttgcgagaattgcaagaaataatgggaagacagttctgcattcagctgcaagactgggccatgtggaaattgtaagatcattattaagtagggatccaggaattggtttaagaactgacaagaaggggcaaacagcactacatatggcttcaaaaggacaaaatgctgaaattgttatcgagctgttgaagcctgatatctcagtaattcatctggaagacaacaagggaaacagaccattgcatgttgcaacacggaaggccaatatcgttatagtgcagactctactatcagttgagggaattgaagtaaatgcagttaacagatcagggcacaccgctcttgccattgctgagcaactcaacaatgaagaacttgttaacatcttgagagaggctggtggagtaactgcaaaagagcaagtacatccacccaatccggcaaagcaacttaagcaaacagttagtgatatcagacatgatgtccagtcccagatcaagcaaactaaacagaccaagatgcaagtccagaaaatcaagaagagactcgaaaaactccacattggtggtctaaacaatgccatcaactccaatactgtggttgcagtgcttattgccaccgtcgcctttgctgccattttcaccgttcctggcaattttgtggaagatatcactcaggcacctccaggcatgtccttggggcaggcatatgtagcaagcaacccggccttcctagtatttttggtctttgatgccttggctctcttcatctcacttgctgtcgtcgtcgtccagacctcgctaattgttgttgagcagaaagccaagagaaggatggtctttgtgatgaacaagctgatgtggctggcatgcctctttatctcggtggccttcatagcactaacctatgttgttgtcgggcgcgacgactggtggctagcttggtgcacaatggcaatcggtgcagtgatcatgcttacaactcttggttccatgtgctactgtatcattgctcataggatggatgagaggaagatcaggaaggcgtctacaagccaatctcgctcatggtctcaaacagttgactcagatccagatctactcaacagtgaatataagaaaatgtatgcactatag

SEQ ID NO: 10931 - DNA, 1887 bp, Oryza sativa
  Clone ID: TFbOSC400632j.C1.o12.fg
atggccgcctccgccgcccccgtggcgcccgcgtccccatccccatcccccgccgccgctgccgacggcgaggagggggaggggccggcccctgcggcggaggacgactcgctgaagaacgacgtgtacacggcggcggcgtacggcgatctggagaagctgcagcggctagtggagggggagggccacccggtcacggagcccgacggcctcggctaccacgcgctccagtgggccgccctcaacaaccgcgtcgccgccgcgcagtacatcctcgaggttttcccccctcctgcttcccgcccgagcgtctcgcgatttggctggccttcgtgtagtcgttgtttgctagctagcgagggatttgggtgggggtttggtgtattcacttttagctcattggctggtgttttggataccaaattaccagtgcctgtggttgaattactccagcatggagcagatgtaaatgctgtggaccacactgggcaaacagcacttcactggagtgctgtacgtggacacatccaagttgctgagcttcttctgaaagaaggagctaaggtggatgttgctgatttatacggttatcaggcaacacatgttgcagcgcagtatggccagacagcatttatttatcatattgttgcgaagtggaatgctgatccagatgtccctgataatgatggaagaagcccactgcactgggggaacctggaggcatgcactgtgctagttcaggctggcaaaaaggatgacttgatggtgaaggataagactggtctaactccagcacagcttgctgctgataagagtcatcggcaagttgcattttttcttgacaatgctaaaagggtatatgatagaggatgtgatgggaataccaattttggaaagctatcgaaactggggctagctcctgtactttggtgtattattgttggcttgcttgctacatatatacactctgttatatcaggtcaatatatcatggatatgacagcaccatttgggctgtttgcatggtcaggagttttccttgcaactgctggcctagtcatgttctataaatgtagcaggaaagatcctggctacatcaaagcaaatatacgagattcacaaaatcaaagggatgatgaacctttgttgaagttggagttagacaatcccgcacttctgtctggtaactggtcacagctttgtataacatgcaaaattgtgagacctgttcgttcgaagcattgttctacatgtgatcgctgtgttgagcagtttgaccatcactgtccttgggtatctaattgcattggcaagaagaacaaatgggaattcttcatgttcatcactctagaagtttttgcaatgatcattactggttctgctgccattataaggatggtaagagatccggcttctccagcatcctttattccttggctcagctattctgcttttaaccatactggggcactttcctttttcataatggacctcttccttttcttcggtgttgcagttctagcagtagtccaggcatctcagatagcgaagaacattacaacaaacgagatggcaaattccatgagatacagttatctaagaggtccaggtggaagattcagaaacccatttgaccatggagcgcgcaagaactgctcagaattcttgttaaatggatacaatgaggacattgaacgtcttgatcatacgtcacacactgatgaggaaatgggaatgatacagatgacaaacgcagtctctcagaatggcgagggcccttcccaccatggtaacggcactggccattcttgtgctgaatcacatgctcactcaaaatctcacagtcaaattgtatgtgttcatgctgaggctccattatttatttag

SEQ ID NO: 10932 - DNA, 1395 bp, Oryza sativa
  Clone ID: TFbOSC413065j.C1.o4.gm
atggctctcaatgctggctcgctgaaatgtgttgtgcttctgcttaaggctggtgctgatgtgaagggtgttggtacggtaactcccttaataactgctgcaaacaacgggcaaactgacttctataagtgcttactggaggctggtgcagatcctaatgttccagatgaagatgaccctatgtacaaaatgagtccagctgatatgaagttagcagcaagtgaggcatacaggagacaagattacattactgcaatgaagctctatactagggatgctcaaatttgcaggttgatgcattctgactggtcgaaggcatgctatctggaaggtgctgctcaaatgttactgaaggactttgaaaaggcatgtgatgcgttttttgatggactcaaattggatccagcaagtgatgagattgcagaagcattaagtcatttcgtcgaacacttggttggcatcaccccgccgtcagcctgggcaccgccaccgccaacactcgacgccgacaccgccaccggccccggcgtaccgcagcagctgctcatccagtcggcggccgccggcgacctccccgccttcaagaagtttgctcgtatgctggacggcgggaaggggcggctcaaggaggcggtggaggccgtgaagaaccgcggcgctggggctctgcaccaagccgcccgctacgggaggaccgcgatgtgcgcgtacatggtcgaggagctccaggtggacatcgacgccgccgatgagttaggcataacgcaactcgatgaggctggtgctgatgttaagggtgttggtacttttacccccttaatagttgctgcaactgaaggcttaactgatttctataagtgcttactggagggtggtgctgatcctgatgtgcctgataaagttgaccctttcttcaaaataagaccagctgatctgaagttggaaggaaatagggcatacatgagaaaagactatcttactgccgcaaaactctacaatatggccgatgggcggcggcagcaggcagcggcagcgacagcagcagcactaagcggcgtcggcggcagcagcagcaacaacagcagcaccagcaccattaccaggaggcggcaccggctacaccatcggcagcatgtgacggcggtagcatgtagcagcaacactacatcaacagcagcagcaacaaccagcaaggaagactgtggaactaggatattgcgccctgattggcccaagggctgctacagggaagggaccgctcacatgttcatgaaggactatgaaaaggcctgcaatgcatttcttgatggtttcaaactggacccagcgaatattgagattgaaaatgcgctacgggaggctttgaaatcattgaaggcgtctcgtgctgcttga

SEQ ID NO: 10933 - DNA, 1269 bp, Oryza sativa
  Clone ID: TFbOSC900166j.C1.o9.fg
atggagaagaaggataagggaaggcaccgcggccgcgacggcggaggcggaggcggcggcggcggtggtggtggtggtggtggtgtggatcgcggcggtggagggagcggaggaggagggccgggaatggggcggcgcgggagcgatgcgcgtggccagcaggcggaggcggcggccgcggcaatcagcggcatcgccacccgccttggcttcgggtgcaccatcagtatgacgcctttgttttgcgctgtgttggatggacaagagattactgtgaagtattttcttgacaaaggtgctgatccgaataagaaagatgcagaaggctttgctcctcttcatgaagccgcaaaaatagggaacgttggaatagcacgactgttgttatctaaaggagctagtgttgatgtatcttcttctgaagggacaccacttcatgttgctgcctctaatggaaaatctagcattgtgctgattttattagagcaccatgcaaatccaaacgtgatgacgccagattgttatacaccactgactgcagttctttctgccactcctgaaatagtgaatgaatctgagtgtttgaagtgcatgaaactccttatcaaggctggtgctcattataaacttgcaactcctgatactccattggagatagcaactagaaatggcttaactgagtgtgttgcatacttgttggagatcagcactgttgttagactaagtgaacatgacaaaggaagtgatggagacagaaaatctaagctgaaattacatggtggaaaagcatttgaggagggtgactatgcgggtgcaatcatattctacactgagtttttatgcaaatataatttcttcaataatccaagcccgaactataamcamcagagattagcacaaaagaacccaactccacacataccacatcgcagaagcatggcagtctctgcatcccagttgacatctaggatactattatcacttctattgtctaggaactattgctgtgttaacaaaggaagactcagtttgaatttccaatggcattgccatcatgtgggggatacacttgcaatgaaacttgatcctgcagatgccacactgtattcaaacaggagcctttgccatctgagaagtggtgcagcgcaagaggctttgctggatgctaatgattgcataaaactcaagcctgagtggactaaagatcatgaggaggatgcttgtgaagatcctgttgacccgttagagtgggacagctatggtttctag

SEQ ID NO: 10934 - DNA, 2322 bp, Oryza sativa
  Clone ID: TFbOSC900128j.C1.o2.fg
atgtttttcaccaggctggatgactcgcccatgttcaggaagcagatacaatcccttgaagaaggttctgaattgctgagagagagatgtttgaggtttcataaaggttgccgcaaatacactgaaggactaggggaagcatatgatggagatattgcatttgcaagttcactggaagcatttggaggggggcataatgatccaatcagtgttgcttttggaggacccgtcatgaccaaatttacaattgccctgagagaaattggaacttacaaggaagtattgcgctcacaggttgagaatatgctaaatgacaagttgctgcaatttgtggacattgatttgcatgatgtgaaggatgccaggaagcgttttgacaaggctagccttctctatgaccaggctcgtgagaggtatttatccttgaagaaaggcacacggacagatgtagcaactgcggtggaggatgtgactgcactttcaaatatcgaggccaagaaaagatttgaatttttagaggctgtcagtgggacaatggatgcacatctgcgctatttcaaacaagttcttgcttatgcacagcaatcaagggaacggtctaactatgagcaagctgctcttgtagagaggatgcaagagtttaaaaggcaaattgatcgggaaagtcgttggtcaccaaatggcataaacgattcccctaatggtgatggaatacaagcaattggtagaagttcacacaaaatgattgaggcggtgatgcaatcagcttcaaagggcaaggctcacatttcagcatggaaattcatgtcatattttaaaagtggttatactaaccaaagaagtagcgctccgtcagagcatggttctgggttgcttagcagatggttctcttctcattatcatggtggagtacacgatgagaaatctgtagcaaggcataccgtgaacttgctaacatcaaccattaaagctgatgctgaccaatcggatctgcggttctgcttcagaataatttctcccacaaaaaactacactttgcagcgtcttctgtcgagcccaaagggtagcggccataatcgaactgccagcgaaagtagttcctttagtagctcgacagaacttgaccattccattagtgaagactgcatgctggaaaggaactctggaagtgggtattttgaccactctggcagagccatccagcatcaccgaaccagcatgaaacctgacaagccaattgacttgcttaggaaagtggtcggcaataatatttgtgctgattgtggtgcagcagagcctgactgggcatccctaaaccttggaattcttctatgcatcgaatgctctggggtacacagaaatctcggtgtgcatatatctaaggtaagatcactgacacttgatgtcagggtctgggagccatctgtaatcaatctcttccagtcattaggaaacacatttgccaacactatctgggaagatatgttaccttcatcaagcagtgttgatcatggtgataattcaagggctgatggactagaaaacacatcacataacttaattttcagcaagcctaaacactcggatcatattgctgtgaaggagaaatttattcatgcaaagtatgccgagcgagattatgtgcgaaagcttaatatggatgatagcctggtagctcaacagatgtgggaaaatgttagttcaaacaacaagaagggggtttacagtctgattgtggggtcaaatgccgatgtaaatttaacttatgggcagacatcatttaattcggccctaacccttggaaaagctctacttttacaagagcagccaacttcaccatcagatggaagttccagatgttttgatcgtagttcacttgaaaggatttctcccagggactctctttctcttgccagcacaagtgcacgtatagatgaattggatgattgtgtcgagggattgtcattgcttcatctagcatgccgtgttgcagatgtgggtatggtcgaacttctcttgcaatatggtgccaacgtaaattctgcagactctagaggtcgaacgcctcttcatcacagcatcttgaaaggacgacatatgtttgcaaagttgttgctatccagggaatgtgtcaatattatcaaattaggaattgtacctggagagatgatcagtggtagttggttcctacaatgtggttcttggggcgctgattcacaagccacggaccgagatggtagaacagcattacagtatgctattgacagtggaactattgacgacgaagagattcttgttttgttagaagacccaagtagataa

SEQ ID NO: 10935 - DNA, 1221 bp, Oryza sativa
  Clone ID: TFbOSC900390j.C1.o14.fg
atggtttctttgccactgcagtggaaaccagcacttgccacccacgtggacaggaacaagagcagccccctacatttcgcttcatctgatggggattgttccatcgtccaagcaatcttagcatgctctccgccgagcgctccatacatgcaggataacgagggattctcacctatacatgctgcagcgttgatgggacacacagctacagttcgcctcttgttgcagttctcccctgcctctgcagatatttgtgacaatcgtggccaaagctttgtacatacagcagccacaaaaggccactcttccattatctcgtatgctataggtagcagcatgctcgagcatcttctgaacgcacaagacagggaaggtaacacgccactccatttagctgtggatgcagggaaatgcaagattgtttctaagctattatcaagtgaaatagtgcaagcacacatcatgaacaatgaaggccacacaccatcggacctcgtacaaaattgtaaaggtttctactcaatggtaagcttagtggtgaagatgtatgcctcaggagcacagttccagccacagaggcaagatcatatagagaagtggaatgctcaggacatcatgaaatggcgagatactacatcaaaatatcttgctattgtttcgacacttgtggcaacggtcgccttttctgcagctttcaacattcctgggtcatatggagatgatggaaaagcgaatctagcagggaattgcatgtatgacacttttctgatccttgacaccatctcattagtcacttcagtcgtggcgataatgctactggtatttggtagagccttcagttctcatcactcatggttgagcttcatgatctcaacgcactttctatggctgtcaataaacaccatggtattaggcttcttggcagctatatctgcagtgatgagcaagaagaagggcttaaacattacaatggccatcctgatttatttcgggatgtggatattaacgatgctgcttacaagcttaacgacagtagggtcatttacaggcattctgaagttcctattcggaggtcgcatggaaagacagcggcgagcgaagaggcgcatcagccggcagtatccctacgcgatcttttacactttcaacatggttttgttctttgtcatagctaatatagcattggctggatttgacacttttaaatctctcagttattga

SEQ ID NO: 10936 - DNA, 1167 bp, Oryza sativa
  Clone ID: TFbOSC416911j.C1.o18.fg
atggaggctgtcctacgacacccatccctttcccgcctcaaaccccccaaccccaatgctcagagaactccagccctctccatcaccgtccctttccggcttcgtctccccaaccggcggctcaccgccgcggcggtgttccaggaccagaccaacccaagaaacccagcgagcaagggaggcgacgacgatgaggcgtacggcgaggtggaccgtattgtgtccagccgcaccatcaagaatccggtgttcgcggaggacggctcggccaccacggtcaccgccacggagtacctcgtcgagtggaaggacgggcacgagccttcgtggatcccggcggaggccatagcggcggacgtggtggcggagtacgagacgccgtggtggacggccgccaagaaggcggacgcggcggagatcactgcgctactcgcggacgagacgctgcggcgtgaccccgacgcggaggatgcgcaggggcgcacggcgatgcacttcgccgcggggcttggatccgaggagtgcgtgcgcgcgctcgccgaggccggggccgacgtggggcgacccgagcgcgccggcggcgggctcacgccgctgcacatcgcggtcgggtacgggcgcccggcggccgtgcgcgcgctgctggagctgggcgccgagccggaggcccccgacgggcagggccggacgccgctggagctggtccaggacgtgctcgcgaagacgcccaagggcaacccggcgacgttcgagcggcggctggcgctggaggcggcggcgaaggagctggagaaggccgtgtacgagtggggcgaagtggagaaggtggtggacggccgcggcgagggcaagtggcgggagtacttggtggagtggcgcgacggcggcgacagggagtgggtgagggcggcgtgggtggcggaggacctggtgaaggacttcgacgccgggctggagtacgccgtcgcggaggccgtcgtcaacaagagggaggcggcggaaggggaggggaaatgggagtaccttgtcaagtgggtggacatcgaggaggcgacgtgggagcccgcggagaacgtcgacgccgaactcctccaggagttcgagcagcggcaatctggggtggctgctggcggtgatgctccgccgccgccgccggtcgccgggtga

SEQ ID NO: 10937 - DNA, 1581 bp, Oryza sativa
  Clone ID: TFbOSC422826j.C1.o2.fg
atggatctcccgccgctctcccaccaggcgctcttcgccgccgtccgatccgcggacgccgccgccgtcgccggcctcctggccgacgccggggcgtccgggcccaccacccaggcgctcgccgccgcgcagacggacgccggggagacggcgctgtacgtcgcggcggaggccggctccgaggagatcgtccgcctcctcatcccgctctacgacctcgaggccgccaccgtccgctcccgcctcgacctcgacgccttccacgtcgccgccaagcaaggccacaccggggctgtgaaggagttcttggggcggtggccggagctatgttcaatctgtgactcttccaatactagccctctttactctgcagcagtaaaagatcacttggatgtagttaacgccatactggacactgatgacagctgcataaggattgtgcggaaaaatgggaagacatcactacacactgctgcaagaatcggttaccatcgtattgtcaaagcacttatagaaagggatccggggattgttccaatcagagataggaagggacagactgcacttcacatggctgtaaaaggtaaaaatacagatgtagttgaagagttactgatggctgatgtttccatactcgatgtgcgtgacaagaaggcaaatacagctttgcacatagctacacgaaaatggaggccccagatggtacaacttctgcttagctacgaggcgcttgaagtcaatgctatcaataatcagaatgaaacagctatggatttggctgagaaagttccttatggtgagtctaaaatggaaataattgagtggctgacagaagctggcgcaaagaatgcacggaatgtggggaaaattgatgaggcatcagagcttaggagaaccgtgagtgatatcaagcacaatgttcaagcacagctcaatgagaatgccaagacaaataaaagagtgacaggaatagccaaagagctccggaaactacacagagaagctgttcagaacaccatcaattcagttactatggtagcaaccctgattgcctccatcgcattcgtagccatattcaatttgccaggccagtactatgttgatagggatagtgggggagacattggtgaagcccacatagccaaccttactggtttccgagttttttgtctgctgaatgctaccgcccttttcatttcccttgcagtggtcgtagttcagatcaccttggttgcctgggaaaccggtgctcaaaagcgggttatcaagattgtaaataagctgatgtggtcagcatgccttagtacatgtgcggcttttatctcattggcctatgtggtagttggcccccagaatgcctggatggctttcaccatatcagccatcggagggccaatcatgattggtactctcttgttcctggcctatctgttgttgcgccctcgcttcaagtttggtgaagatagacagcggcgcatcaaaagggcaagtggcagcaagtccttctcctggtctatccatgaggggatatcagacctggaagcattctctgatcatgagaagagaatttatgccctgtag

SEQ ID NO: 10938 - DNA, 1671 bp, Oryza sativa
  Clone ID: TFbOSC403477j.C1.o12.fg
atgtcgctcgaaatccatgaagaggagggaggaggtacggcggcggcggcggcggtgaaggtgatgacggtgtcggggagcgggaagcgggggcggtacgtgcggcaggtgacggggcggcacaacgacaccgacctgcacgtggcggcccgcggaggggacgccggggcgctgcgccgcgcgctggacgaggcggcggcggccgtggccaccggggaggggagggaggcgctggaggaggtgcggcgggccgtggcggcggagcccaacgaggccggggagacgccgctcgtcgccgcggcggagagggggcacctggaggtggtaagggagctgctcaggcacctcgacgccgagggggtcgccgcgaagaacaggtcggggtacgacgcgctgcacgtcgcggcgagagaaggccgtcatgctgttgtgcaggaaatgttacttcacaataggttgcttgccaagacctttgggcctgcgaatactagtccacttatttcagcagctacgaggggtcacaccgaagttgtcaaattgttactagaactagatgattttggattggtggaaatggctaaagataatgggaaaaattccttgcattttgctgctcgacaagggcacgttgaaattgttaaagcattactcgagaaagatcctcagctagcaagaagaaatgacaagaaaggtcaaacagccttgcatatggctgtaaaaggaacaaactgtgatgtgcttagagcacttgtcgacgctgatccagcaattgtaatgctgccagacaaaaatggaaacaccgccttgcatgtagcaacaaggaaaaagcgagcagagatagttgctgttctcttgcgattaccagatacccatgtcaatgcactaaccagagaccacaagactgcgtatgatatagctgaagccttgccactctgtgaggagtcttctgaaataaaggatattttatctcagcatggcgcactcagatctagggagctgaatcagcctcgagatgagctccgaaaaacagtgacagagatcaagaaagatgtccacacacagctggaacagacaagaaaaacgaacaaaaatgtgcatgggattgctaaggaactcagaaagttgcacagagaaggcatcaataatgcaacgaactctgtaactgttgttgcagtactttttgccacggtagcctttgcagccatattcactgtgcctggtggaaatgccaacaatggagttgcggttgttgttcaggcagcctcctttagaattttcttcatcttcaatgctatagctctgtttacatcattggcggtggtcgtagttcagataacggttgtcaggggagaaactaagtctgagaggaaggttgttgaggtgatcaacaagcttatgtggctggcatcagtttgcactaccatttctttcattgcctcttgctatattgtgctaggccgccatttccaatgggcagcactactagttagtttgataggtggcatcacaatggctggtgttctgggtacaatgacatactatgtggtgaaatcaaagcgcatgaggaagataagaaaaaaagagaagatgtcaagaagaagtggatctagctcctggtatgataatactgagctctcagagactgagcttaaccaagtgtatgccttgtaa

SEQ ID NO: 10939 - DNA, 1860 bp, Oryza sativa
  Clone ID: TFbOSC401044j.C1.o4.fg
atgggggagcctgggggcgccgaggcggccgtctccgcgaggctgctcgagctggcggccgacgacaacgcggcggggctcggggagctcctcgcggcgtggccctccctcgccgacgagcccgcgccgtggtacaccccggcgcggggcgcggagccgctgaccccgctcatggtcgccgccgtgtacggctcggtgggctgcctcgacgcgctcctctcgccgccctacctcgtggaccccaaccgcgcctcggcgtcgtcgctctccaccccgctccacctcgccgccgcgggcgggtccgcctccgcccccgcggcggtctcccgcctcctcgccgccggcgccgacccggccctcctcgaccacctccagcgccgggcgtccgacctcgtcgcgctcccgcccaactcgctcccgctcaagaaccacctcctctccctcctcggcgcccgcaaggagtggcctcccgacccctccctccccgacatcaagaacggcgcctacgcctccgacgacttcaggatgtactcgttcaaggtgcgcgcgtgctcgcgggcctactcccatgactggacggagtgccccttcgtccaccccggcgagaacgcgcggcggcgcgacccgaggaagtaccactacagctgcgtgccgtgcccggagttcaagaagggggccgggtgcaggagaggggacatgtgcgagtacgcgcacggggtgttcgagagctggctccacccggcgcagtaccggacgcgcctctgcaaggacggcgtcggctgcgcccgccgcgtctgcttcttcgcccacacgcccgacgagctccgcccgctctacgtctccacgggctccgccgtgccgtcgccgcgcggggcgttggagatggcggcggcggcggcggcgatggggatggggctgtcgtcgccggggtcgtcgtcgttcacgccgccgctatcgccgtcggccggcgggggcgggggcgggggcgggggcagcggcggcggcggcgcgtggccgcagcagccgagcgtgccggcgctctgcctgcccgggagcgccgggaacctccacctgagccggctgcgcacgtcgctgagcgcgcgcgacatggccgtcgacgagctgctcgccgcggcggcggcggcggcggactacgacggcctcgtcgcctcccccgcctccatccggtccgcgagggggaaggcgcttgtgccgtcaaatctcgacgagctcttctccgctgagctcgccgccgccgcggcgtcgcgctcgccgcgctacgccgaccaaggcggcgccgcgttctccccgacccgcaaggccaccgtgctcaaccaattccagctgcagcagcagcatagcttgctctcgccgcgggcggccgcggtgacaccagagccggtctccccaatgagctcccgcctcctcgccgcgctggcgcagcgggagaagatgcagcagcagacgctgcggagcatgagctcacgggacctcggcaacgccgcgtcgctgctggtcggctcgccggtgagctcgagcatgtccaaatgggggttcccctccggcaacccggactggggcgccgacgacgaggagctcggccgcctcaagcgttgctcctcgttcgagctccggtccggagccgccaatggcaaccatgagcctgacctctcatgggtcaacaccctagtgaaggagccgacaccggagaagatgatgacgacgacatcggcaatggattccattggcatcttgggacagaacacaagccgtgatcacatcgtcggaggcgaggatgacactgccggagtcatcagcagctggcttgaacagctccagctcgatgagatggttgtctag

SEQ ID NO: 10940 - DNA, 1449 bp, Oryza sativa
  Clone ID: TFbOSC404797j.C1.o18.fg
atgagcggggcggaggaggaggcggcggcggcgaggggagggggaagcgggagcgagagcggggggagcggaggaggtggacggggagggggagggggaggggcggggtcgtcggggagcagcggggcgcggcggcggttcgacgacaaggggcttgtggcgaggacgtcgctgatcctgtggcacacgcaccagaacgacgccggcgccgtgcggaagctgctggaggaggacgccgcgctcgtcaacgcccgcgactacgacagccgcacgccgctccacgtcgctgcgctccacgggtggcacgacgtcgccgagtgcctcatcgccaacggcgccgacgtcaacgcccaggatcgctggcagaacacgccacttgctgatgcggagggtgcaaagaggcatgctatgatcgagctactcaaggaacatggtggattgacatatgggaaaactggaagtcattttgaaccaaagacaattccaccacccctaacaaacaaggctgactgggagattaaccctcttgagttggatttctcaaaagctgttatcatcggaaaggatgatctttttagatgttatatgcaaatagagatagttgggtgttcaaaacttgccattatattagctggctcttttggtgaaattctgaaagccaactggcgaggaacacctattgctgtcaagcgcattcttccatctctatctgatgacaggctggtgattttttttggggtatgcagacaagatttcaagcatgaagtcaacttgctaataaagctgagacatccaaatattgtgcagttccttggagcagtcacagaaaccaagcctttaatgctcgttactgagtttttacgaggaggcgaccttcatcaatacctgaaggagaaaggtgcacttgccccagcaactgctgttaatttcgcactagacattgccaggggcatggcctatcttcataatgaacctaatgttgtaattcaccgggacttaaaaccaagaaacattcttctagtaaattctgctgccaatcacttgaaagttggagattttggtcttagcaagattatcaaagcccagcatgccaatgatgtgtacaagatgactggggagactggaagctaccggtacatggctcctgaagtattcaaacaccggaaatatgacaagaaagttgatgtcttctcgtttgctatgatactttacgagatgcttgaaggggatccacctttctctaactatgaaccttatgaagccgcaaagttaattgagctatgctggtccggggatatccatctgaggccatctttcctagagatcctcaagaggctcgagaagatcaaggagtacttagctgcgcacgatcaccattggcatttgttctcccagttccctgctctttttatgtttcttgagaatcagtacagtggatacaggaagtaa

SEQ ID NO: 10941 - DNA, 1155 bp, Oryza sativa
  Clone ID: TFbOSC900309j.C1.o12.fg
atggcggcgcggcgatctcgcctcgccgctccgacgtcctcctccgccgcggccgcttcgatgcagcacgagctcctcgaggcggcggccagcggcgacctccgccacctcaagaggctggtgcgggcgctggataaggtcaggggccgcctccaggaggtggtggaggcggcgaggacggacggcggcatctgggcgctgcagctcgccgcgggcaacgagcagctggaggtgtgccgctacctcgtcgaagggctgcgcgtggatgtgaacgccgccgatgatgagggtagaacacctctagtttttgcggtgatcggtgaaaatgctgctattgtcaagtaccttcttgatcatggtgctgatccagacaaagctgatgatgacgggctaacccctctacattccgctgctggaataggagattgtgaaatgatagaaacgttgctggcaaagggggctgatattgatccggctgtaaatgtttcatcagtggaatgtgtgaagctcctggttgaggctggtgctgatgtcaactcagattgtatctcaactgctgcacttgattctgcaatgggcaatgatggttcaactgagtgcttaaatttcttaatggaggctggtgccaactatggtggccctaatgattttagggtctattcagtttgtggctgcagtttgccacatttctggcagccaaagtttggcaacatcctagtggaggacatgatccaccaaccttggcaccaggatcaacatgtgaataaaaagaaaatagaagagttgaagacatctgggaataaagcagtcgatagagaagattacatttctgcttcagcgttctacactaaggcaatggatcttgaccctaatgatgcaaccttgttctcaaacaggagcctttgctggctctgcatgggtgatggaaagaaggcttttctggatgctcttgaatgcagagaaatgcggcccgattggccaaaggcctgctaccggcttggtgctgctctgatgaccctgaaggacttcgagagcgcgtgcgatgcactttttgatggattcaagttggacccggacaatgcagagattgagcgtgcattacgggaagctatggaatctctgaagatatcatctaaaggcaccaaggcaacatga

SEQ ID NO: 10942 - DNA, 1728 bp, Oryza sativa
  Clone ID: TFbOSC32693j.C1.o1.fg
atgggcgggccatacaggagtatagtgccggagccggtggcgcatgaacaatgcaacctactcgaggtgacggcggagaggaacaccgttcttcatgtcgcagcggagaaagggcacatcgagctgatcaaggagctctaccacaggttcatcaaggacaacaacttcctctctcgtcgaaactcggcactgaacacgcctctgcactgcgcagcaagggaagggcacaccggcaccgtgacaaccctagtacatctagcccaggaccgtgtggagaatatcatggggtgccagaacacggccggggacacggccctacatctggcagcgaggcatggtcatggcgccactgtggaggctcttgtcgcggcacacgcaaaggcgacagagctgaacaaagtcggcgtgtctccgttgtacttggcggtgatgagcaggtcggtgcctgctgtaagagcaatagttactacctgcagtgacgcatcagccgttgggccgagctcgcagaatgctctgcatgctgctgtctttcggagcttagagatggttcacctcttattgcaatggaagccagaactggctagccaagtcgactgcaatggtagcaccccgctccatttcgcggcatccgatggcaacagcaaaatcatacgtgcaatcatggccactgcgccacctggcacagtgtacatgaaggactcggatggcctctctgctcttcatgtcgcagctaagttggggcatgccgatgttgtcaagcagttgattgggatccgccctgatgctgtcgagcttcgtgacagccatggtgagaccttcgtgcactccgcagtcagggagaagcgctcctcgatcgtgtcccttgccatcaagaaacacaagcaggtcggtggtcttctggatgcgcaggacggggatgggaacacgccgctccacatcgccgtggttgccggcgcgcctggcatcgtgaatgctctactccagaaggggaaagtgcaaaccgatgtcttgaacgacgatggacacacaccgctagatctcgcttccacatcgcccagtttgttcaatatggtaagggaaggggatagagaggacttcggacagcctcgcggtggtggccgtgctcatcgccaccgttgccttgcagctggattcaacatgccgggcgggtacacgaacgacggctcggcaagcctcgagggcatgtccttgttcagatggttcgtggtcctcgaccccatcgcggtagcatcatcggtgatcgccgtgatcctgctcgtctacgggaaggcgtcgcgctccaccgggtcgtggaagagcttcgtggcggcgttgcactgcatctgggtctcgctcgtcagcctaatcctggccttcttcgcggcctcccgtgccgtgatgagaacctcgacggcagaatccatcgtgtacattgttatctacgtgggcatcatcgttttgtctctctttgtcgcacagtggattggacctgtgacgacggcgcgtgcattctggaggtttttgtggctcagtcaccgggctcacaccgtcaggaggcagtatccgttcgccgtcgcttccatctacaactggcttctcttcttacatataacttatataatgtttgctggtttgggagtggtacataatcactccaattcggatcggggaggattatcaagcagctggaacccgaaccatatctcacctgcccctgcacctatgtaa

SEQ ID NO: 10943 - DNA, 4158 bp, Oryza sativa
  Clone ID: TFbOSC401914j.C1.o21.fg
atggagatgaggaggcggatcttccgcccgccgcacgctgctccactccagccgcctgccgactgccgcccgtcgcccgctggtcctctcccgttgtcttccgcccaccgcacgccgcacgccggtccacttcggctgcctgccgctcctctcctgccgcccgccgcacgccgcttctctcacgccggcgtcattgaaggagaaataagtagagaggaagttgagttggttttcgtgttccgagaaaaatttgtttccgtattcgtgcccgatcatattcgattcttattcgtattcgagataatccgtattcgtttccgtattcgagctatccatattcgttttcgtatccgtttcgcccgccgcgcctcgcctcgccgcctgcgccgcttcccatccatctcccgcgaggtgggtgccgtcgtccttctgcttccgcctccggaaagtaaacccgaaaggatggagttgagatttaaggcacccgattatgctacgtggaaaaaggaggcagctgcatgcgacaaaaataatggcaatgataaagatggatcaattccagtaagaaataagtatccacggcaccctccccctcgttttgaacttgctgagggattagattataaaaagattgacaagtttatggatgaaagggctatttcgattgccaagaccatagcaaatgacataatcatcccagaccctgctcctgagtggatgtgtcataccttcttggacaaacatgatgaattggagcccatctttgtaaaggatagcccccgttgcttcctccgatatttcaagaactgtgggtgctatggcatgtcatggaatctcaccatcaccgcacaaaccttaacctgcatggttagtttcaatgccctgagatgtgcaaaagttgtattggagggcagggcacctgagctctttgggatgcatgccaatcccaactgcgtaaccaaatacggatacttcccgcttcacgaagctgctgaaaggttctctgttgagatgatcaagctactcttacgctttggtgcatcagccaatgtacgcacagttggcgacgatgtcattgaggacctactcccgctccatattgcgattgagaatacttgcctgcataagtatcttgaggacaatctttcgcccagccagaatcatttggattatatctacaagcttatccacctgctatgtttacctgaaatgaagatcttcttggatacaattagactgcttgcaggaaaaacaaataatctacttgaagagctctggtattacattgaggatggaaaactcatccagtctgcaattctactactggctgctcaggagcagatccgagggggctgttcctccaagataaatggcagtagtaagaaagatgggtttggcattatctctaagcgtatactgaggctttcatttgccctgagatgggagaaaggttcaaatggaatggcacagaagcttcgggaggaaaagagggcacttattgattgcacaggcctgcttgttgatgtaatttcccaagctggtgaacctctttctgcatacgttcaggcgcattcagaggcgccccatgtggaggttttggaacatgtttcaactatcctcaaggagtatgggttttaccccactgcagaagtcattgacactatgaaccttcagccttatgactgcgaaatggagagagagtcatgtagcaaaggctgggagaaaggaagtaggcggaggatgggatcccacgtatacaaggagaaattttttcccatattggagatcagttttacgaaccctgtgtcctgtgaagtgggaagaatcccaccatttgcaaacaatcatcaatccaaaaggagcttcagcacttgtgctactggtgcattcaggctcttgaagctgctgaaatctagtgtgacagatctagcatgggggctccggtacccttgcccgctggatcttgaggctcagcaattaggaaaatacattgtcaagtacagtttgttattctgccaatttcaaaacgtgatggtcaccatttactggtgcagcaggcaaaaagttgcatggagcgctacaggctgtacacttttgatttccctgctgttctttttctctggttcaccgcataggatcctcttgaacaagaaacctctcaatttcaaaacagcaccatctaggttattgcgtgagattagcatcagttcaagtcgtgttcagagggttaacaattcatccgcggagtttgttgcaaacctgaatgaccgtaatgtagaaattgtacaacatatggaagacaacgatcataacatcatcaatgcaactgcaaatgtgacttctgactggagcattgtcaaggaggaattcacatttccagctggaagtgcccctttcaatagctgccatgcttctactattgtagagactgagaaggatagttttttggtggcttatttcggtggatccaaggaaggtgctcctgatgtgaagatctggctgcagagatacagtcctttcttggttgaagatgggcgcttgctatgtgggtcatctgttgaaagctggaactcttggggtgcatggcttgaggtcacaaaagatgccggacgaacatggcggaagtatggccctatatatattgaaggcgaaacactaggggtgatccagccagttccctacatgactgccaatgggactattcgagtgttgctgcgatcttttgagacaattggtcgtgtctgcatggctgattctgctgatgggggtgtaacatggagttatgtgcacgagactgaccttcctaacccaaactctgggattgatggagttaagatgaaggatgggagagtactccttgcttacaacaccttctccagaggaacactaaaagttgcagtctccatggatgatggtgattcatggaacgatgtaatgacattggaagatactgaaggcatggagttttcatatcctgcagtgatccagaccatggatgatctcatacatatcacgtacacatacaaccggacacaaattaagtttgacctgcctactctcagctctcaggggagtaaagaccacggattaatccttcatatccaagaaaagtgtgacaaaatgaccaataagtggagcgtattgagggaagaatttacattttcagaaggcaacgtacctttcaaaacctgccatgcttccacaattgttgaggttcagaagaatatgtttctggtggcctactttgggggaacacaggaaggtgctgacgatgttaaaatttggctacagagatattacaatggctcgtggcactctcctgaagtagttgatgaagtgcccaatgttcctctgtggaaccctgttctcttccagcttccttctggtgagatcctccttttctacaaggttggcaagactgtcgaaagttggagtggatgcatgaaatgctcatcggatggtggtgttatctggtcaaagagagagcaactcccacctggtatccttggccctatcaagaacaaggtcaccaaggaccatggtaaaacatggaagaagtatggcccgatttacgtaagaggaaaaaccatgggagtgattcagccagtcctctaccagaccagcagtggcacaatccgcatgctgctgcgcccgtccgatgaagtaggtcgcatctgcgttgcggagtccaaggattctggtgtcaactggagctatgcgcaaccaaccgagctcccaaaccccaattctggtatcgatggcgttaagctcaaggatgggagggtggtgctggtatacaacagcacctcaagaggggtgctcaaggttgctgtttctcaggatgacggcgacaaatgggaggatgtgctgacactggaggagacccatggtgtggagttctcataccctgctgtaattcagacttctgatgggctggttcatgtgacatacacatacaaaaggactcaaatcaaggtagttttacccatgttgtttggtcttcttatggtaattaccagtttcatcatcttccatgttaagaatgaatttcttttggtcactgctctttgcagcatgtcgttctacaaccaagcgaggtttgatgcagtcagtaatcagacatgtggatttgtctcaggagtgaagtttgaactgtag

SEQ ID NO: 10944 - DNA, 329 bp, Oryza sativa
  Clone ID: TFbOSC3475j.C1.o1.fg
agctcgctgcggcgctcgacgaggagggcaagggcgtcgccgccgtcgctgctgccgtcaaggacgccaacaagcgcaccgccctgcacttcgccgcccgcgagggccgcacccacgtctgtcacttcctcatctccgacctcgccctccccgtcgaccccaaggacgacgatgggaacctggaccttatgaaactatttctctccaagggggttgatgttgaatcagaaagcgatgccggcacacccctcatatgggctgctggtcatggacagcaagaggcagtcaaacttttgcttcaacacgatgctaaggttgctcctcaataa

SEQ ID NO: 10945 - DNA, 699 bp, Oryza sativa
  Clone ID: TFbOSC900390j.C1.o19.fg
atggagatcacacctgctggctgcgaccatgagattcctgaacacctattcatgtgctctagactttacatcgcagcatttcgcggttacacagatgaggtcttcagtctcttagccggaagcagtggcgccgccgtggagccggcgaacagccggccgtcgccggcagcgcaagaacatgcgaatcaccatggaggctgcagcattcgcgaggtgaccgcagagcgcagcaaacttctccacatcgccgcgggggaaggacacggcgaactgatcgccgagctgtgcagtcacgacagcagcctcctctcctcgtcgagctcgtcggggaacacgccgctgcactgcgcggcgagggcggggcacgccagcgcggtccgtggcatcgtgcggctagcccgggccaacgtggaggaggacaggctgaaggcgatgctgcgtggcatgaacgccactggggacaccgcgctgcacctcgccgcgaggcacggccatggcgaggcggtggaggagctgatggaggtggcaccggagactgcgttggagctgaacggcggcggcgtgtcgccgctgtacctggcggtgatgagcaggtcggtgcgcgccgtaagggcgatactctcttgtagggatgcatcggctgctggccctagttctcagaatgcgctgcatgctgccgttctccaatcttcaggttag

SEQ ID NO: 10946 - DNA, 783 bp, Oryza sativa
  Clone ID: TFbOSC400831j.C1.o4.fg
atggggaggcgtcacggcggcggcggcggcggcggcggcggtcgtggccgtggaggccgaggccgcggaggaggcgaggaggatgacttgcatctgcacaaggccgcgcggtcgggagatttggcggcggcggagtctctgtgcgaggccaaccctctcgccctcaattccagagatcgcctctctcgcacccccatgggctggcatgttgagcttgtgaagtgcctttgcaagcacaaagctgatgttggagctgcagctatggatgacaccgctgcgatccattttgcctctcagaaaggccatgtagaggttgtccgtgagctgctggcatctggtgcctctgtgaaagcaaagaacaggaaaggcttcactgcgttgcactttgcttcgcagaactcccacctggagcttgtgaagtatttagtcaagaaaggtgcagacatcgccgcaaagacaaaagggggtcagacggctctacatgttgcagagaaggatgatgttcgtgatttcctgaaagaatgtgagcagtcattgaagaagggaggtgagcttccatcggagaagaaggatgattctgtgtcaacgattgctgagaagcctgacgatgacaagtcctcgggtgaggctacaaaagacgaagatgaagcggggtttggcgagaagaggaaaagcgatggcattgctgctgcactgaggtcaccggaactgaaaaaagccaaagtttcacttgggcatctaataagtgcaaatgacatggaggaagaggaagaagctgactag

SEQ ID NO: 10947 - DNA, 1212 bp, Oryza sativa
  Clone ID: TFbOSC415629j.C1.o25.fg
atgggtcacggtgtcagctgcgcccgcaccggcgacgagcacgacttcttccgggcggcgcagctcggcgacctcgacgccctggccgccctcctcgccgccgacccttccctcgctcgccgcgccaccctctacgaccgcctctccgtcctccacatcgccgccgccaatggccgcatcgaggtgctctccatgttcttggatcgcggggcgccgccggacgcggtgaatcggcacaagcagacgccgctgatgctcgcggccatgcacggcaagatcgactgcgtgctcaagctcctccaggccgacgcaaatatcttgatgttcgactcggtgcacgcgaggacctgcctccaccacgcggcgtactacggccacgtcgactgcctgcaggccatcctcgccgccgcgcagaccacgccggtggccgactcatgcttccctggaagcacgtcgcttcatttggctgctcgtagcgggaacttggattgcatcaggaagctgcttgcctggggagctgatcggctccaaagggattcggctgggagaattccctattctgttgcgctgaaacggaaccatggagcatgtgcagctttgctgaaccctacatcagcagagcccatggtgtggccatccccacttaagttcatcagtgagcttgaaccagaagctaaggctctcctggaagcagctctgatggaagccaacagggagagggagaagaaaatcctgaatggcacaaagtactccctgccatccccttcgcccggtgatgacagtgccgatgacgatgcatgctcagaggtgagcgacacggagctttgctgcatctgcttcgaccaggcttgcaccattgaggtgcaagactgtggacatcaaatgtgtgcaccgtgcacgctggcactgtgctgtcacaacaaacccaatccgacgaccctgacaccgccctcaccggcctgcccattctgccggggcagcatctcacggctggtggtggcccaaacaaggtctgcttgtgatcctgacaagccgtcatccctgcagctcacccggaagcggtcgcgtcgatctcacaacctcagtgagggcagcagcagcttcaaagggctaccttcggccatgggctccttctcaaagcttggccgtggctcgagccgcatggcggacagtgacagcagcaacctggacaagcctgagcacgatctatga

SEQ ID NO: 10948 - DNA, 1236 bp, Oryza sativa
  Clone ID: TFbOSC413065j.C1.o12.fg
atggcgccgcctcacgcgtgcagcccaggcgcgacgcagcggctgctcctccatgcggccgccgacggtgacctccgcctcttcaagaggattgctagtaggctggacggcggggaaggacgcctcaaggaggcggtggaggccgtgaaggaccgcggcgctggggctctgcaccaagccgcccgcaacgggaggaccgcgatgtgcgtgtacctggtcgaggaactccaggtggacatcaacgccgccaacgagtcagaggttgagaaatttgagatctatggcatttgtggtattgtgggatgcggtaactttgcaacactggagccgcacccgcacgttctgggtgggattgtgtatactgtgagttatcttcttgatcatggtgcaaatcctgataagcccaatgaacaagggcgtgctcctctccatttagcagttgaacaaggaaattgcgagatattaaaggtcttactagtgaaaggagctgatgttgattcatcttctgactgtgggacgccactgcatattgcagccgtgaaaagtcatgatggctgtatgaagattttattggaccaccatgcagattgtaataaggtattttccacattttatacacccctcatcgcagcgcttatggttcgctcattgaaatgtgtgaagcttctgattaaggctggtgctgatattaagggtgttggtacttttacccccttaattgctgctgcaactgaaggcttaactgatttctataagtgcttactcgaggctggtgctgatcctaatgtgcctgatgaaaacagacggaaagatgtggagatcctacttccagtaacttctcgtattccatctgtgtatgattggagtgttgatgggataattacttatgtaaacaaaaatgtgcaggcgacgaatcttgaacctgaagatggaacttgtactcgaataggagcatttgcttggcttaagatgggtgaaggaatgaaagctttgacagatgctcacctctgcaggatgttgtgtcccgattggccaaaggcctgctacagggaaggggctgctcacatgttcttaaaggcaaaatcgttttttatatgcaacaattattttgttttcaggactgataaggcttgcgatgcatttcttgatggtcttaaattggacccagcgaatatggagattgaaaatggtctacgggaggctttcaaatcattgaagaaatctcgtgctgcctga

SEQ ID NO: 10949 - DNA, 2250 bp, Oryza sativa
  Clone ID: TFbOSC401482j.C1.o8.fg
atgaacggcacgccgatctccgcgtccgccgcggccggcgtcgacggagtcggcgcggcggtggcgctggcggccgcgaccaagaagagtgccgccgcggcggccgccgtcgccgagatggcgaaaaccctcaccgtcgacacggacgacgccttcgcggggctcctcgagctcgccgcggacgacgacgcggagggcctgcgccgcgcgctggagcgcgccccgcccgccgccgcggacgaggcgggcctctggtacggccgccgcaaggtcctcgagcaccgcacgccgctgatggtcgcggccacctatggcagcctcgcggtgcttcgcctgctgctgtccctcccgtccgtcgatgtcaatcgccgctgtggctccgacggcaccaccgccctccactgtgcggcgtctggtggctcgccgtcttgtgtggaggccgtcaagctgctgcttgctgctggggctgatgctgatgccacggatgcttccggatatcgtccagctgatgtgatctctgttcctccaaagatgtttgacgccaagattgccctccaagatcttcttggatgcccaaaggctgggcatggcgttctccgggtggtgacaagggccgcaaactctatgttgtcacctgtatcatcccctacagcagaagatgcacgatctccatcagctgctgtgatgatgacgacaaagtttgcagatcttccaagggttgtgacatcggaaaagaaagaatatccagtggatccgtcccttcccgatatcaagaacagcatctatgcttccgatgagttccgcatgtactcatttaagatcaggccatgctcgcgggcgtactcacatgattggactgagtgcccgtttgttcacccaggggagaacgcacggcgtcgggaccctcgcaagtatcactacagctgtgtgccatgccccgactttagaaagggagtttgccggcgtggtgacatgtgtgaatatgctcatggcgtgttcgagtgttggctccatccagcacagtaccgtactcgcctttgcaaggatggcacaagctgtaatcgccgtgtctgtttctttgcgcatacaactgatgagctccgaccactatatgtttccactggatctgcagtaccatccccaagagcctcggcaacagctacaatggagatggctgcagcaatgggcttgatgcctggttctccatcatcagtttcagcagtcatgtccccatttacaccaccaatgtccccttcaggcaatgggatgcccccttcattgggctggcagcagccaaatgttccgacactacaccttccaggcagcagccttcagtcgagccggctccgtacctcacttagtgcaagggatatgcctgctgatgattactccctgatgcaggatattgattcacagcttataaatgatttgtgctattcacgtattggttcatcaacaggaaaccacacgtctcggaccaagtccctaaatccgtcaaacttggatgatctcttctctgctgagatggtctcttccccgaggtatagtaatgctgatcagggtggtatgttttcaccatctcacaaggctgctttccttaatcagttccagcaacagcagcaggcacttctttcaccaatcaacacagtcttctccccgaagtctgtggacaaccagcagttgccttcacactcatctctgttgcaagcatcacttggtatatcctcccctggccgcatgtctcctcgatgtgttgaatctgggtcccctatgaactctcatcttgctgctgctcttgctcagcgtgagaagcaacagcagacaatgagaagtctcagttctcgtgatcttgggccgagtgctgcaagagcatcaggtgttgttggctcccctctaagctcatcatggtcaaagtggggatcaccttcagggacacctgactggggtgttaatggtgaagaattgggcaagcttcgccggtcatcatcgtttgagctgagatctggtggtgatgatccagatctctcttgggtacacacactggttaaggaatctccaccagagaagcaagtcactactgctgaatccataaactctgttggaccttcaccactgatgcctcccagtgtaagcaacggtgaaggtcctagtctgaatgccccgctggatgggcatgaccaagctgctgttattggagcattgcttgaacagatgcagcttgatcagcatattggtagtctagcaacataa

SEQ ID NO: 10950 - DNA, 1023 bp, Oryza sativa
  Clone ID: TFbOSC900351j.C1.o1.fg
atggggaagcaggagcaggagaagatgctcctccaggccgcctacgatgacaacctccgcctcctcaggaagatggcgcgagggctggacaccgggcagggcgaggctgccgtcgtggcggcggtggcgggcagggccgacgggaaccgcgctctccacctggcggccgcccgaggaagcatggatgtcctcaggtacctcgtggaggacctccacctcagcgtcaaccagttcaatgccaaagtttgtattgttgaaggctcgatccatatgaccatacgggttccctatggtccttatgccatatttttcttggcaggacactgcgaaatagtagagttgtttctttcaagaggagttgatgtggatttagattctatcactgggaccccattgctgacagctgcgatgaatggccaatatagcacgatgaagattttattggagcatcacgctgatgttggtgctgatgtgaattttagagatcccaatggtgttacttgtgtgatggtcgcagcaaatcatggctctcctgtcatcatgaagtgcttactagatgctggtgctaattcaaatattccagatgaatttaataggactccaattgaagttgccgctaatcgaggcagaagggacattgttaaaatgttgtttcctttaacttcaccaatttcaacactgcctgattggagtatcgatggagttatttctcatgtgcaaacttttggtttgaagccaagggataatgatctgtctaaaaggaaaagtgctgaactgaaattacaagctagagaggctttcgagagagaggaatatatgcttgcaggacaacactacactaatgcaatagaacttaccactaatgctcatgataaggcaaccctgctagcaaacaggagcctgtgctggttgcgtttgtcaaccggcaatggggctcttgctgatgctaacatgtgcagaatgttgcggcccagttggcccaaagcatgctatcgacaaggggcagctttcatgtttctaaag

SEQ ID NO: 10951 - DNA, 437 bp, Oryza sativa
  Clone ID: TFbOSC401693j.C1.o5.gp
aagtcgcgcatgcggcgcatggcggcgacgacgcgggggaggcggcggcaccacttggcccaggcgagcggctggtagtggcggacgatgacgcgggcgagcgcctcctcgcgggcgcagatggcctcctggagcgcgctccacccttgctcgttttgcaggctccagtccgcgcccgccgccatcagcatctccgccgccgccgcgtcgcccaggcggacggcgaggtggagcggcgtctcccgcccggggacgtcgcgccggtcgatgaccgccgacgccgcctccgcgcgcgcctcctccgccacggagtcggcctccgtccggatctcctccggcctccgcgccctcggcagcgcgtccagcacccgccgcagcgccgcgtggtccctcgtcgccaccgcgtggtgcgcctcgctgtgcgcgtacctcgccgc

SEQ ID NO: 10952 - DNA, 1971 bp, Oryza sativa
  Clone ID: TFbOSC401693j.C1.o8.gm
atggccggtgtggacgcggcgaggtacgcgcacagcgaggcgcaccacgcggtggcgacgagggaccacgcggcgctgcggcgggtgctggacgcgctgccgagggcgcggaggccggaggagatccggacggaggccgactccgtggcggaggaggcgcgcgcggaggcggcgtcggcggtcatcgaccggcgcgacgtccccgggcgggagacgccgctccacctcgccgtccgcctgggcgacgcggcggcggcggagatgctgatggcggcgggcgcggactggagcctgcaaaacgagcaagggtggagcgcgctccaggaggccatctgcgcccgcgaggaggcgctcgcccgcgtcatcgtccgccactaccagccgctcgcctgggccaagtggtgccgccgcctcccccgcgtcgtcgccgccatgcgccgcatgcgcgacttctacatggagatcaccttccacttcgagagctccgtcatccccttcatctcccgcatcgccccctccgacacctaccgggtctggaagcgcggcgccaacctccgcgccgacatgaccctcgccggcttcgacggcttcaagatccagcgctccgaccagaccatactcttcctcggcgagggctccgacgacggcaaggtgcccccgggctccctctgcatgatcaaccacaaggacaaggaggtgatgaacgccctggaaggctctggcgcgcccgcctccgaggccgaggtgcagcaggaggtcaccgccatgtcgcagaccaacatcttccgccccggaatagacgtcacgcaggccgtgctgctcccgcagctcacatggcggcgccaggagaggaccgagtcggttgggccatggaaggccaaggtgtatgacatgcaccatgtgatggtcagtgtcaaatcaaggagggtccccggcgcgatgacggacgaggaattcttctcggcttgcaacgagaacgataccgagagcgagggcttcgacgatgttttgactgaagaggagaagaagcagttggaagccgcgcttaagatggactctcctgatggtgctggtggtgaaggccagtccgacacgtttgttggtcctcgacatagctgtgttgagccgagggagagagagataccaattgaggatttgagcatctccggaaatggggatagtaaacatgataagaaaggttggtttggtcattggggaaagagggttcagagtagcaagctagaggggacgaagaagatggcacctccaaggagttcgctctgtgtagatgagaaggtgagcgatatccttattgaatctccatcgaatgtacaaactaggccaggaaggcattcggtagatgtagtaagaggggatgagagcagaaggggcaaggaaagggattatcggagacctgctgcttcgtcggagtgtggacataggcgcaaagaaggtagcaaagaaagcgagtacaagaaaggtctaaggcctgttctctggctttctcctaacttccctcttcggactgaggagctcttgccactgcttgatattcttgcgaacaaggtgaaggcgatccgtcgcttgagagatctccttacaacaaaactgccaccaggaacttttccagtcaaggttgccatcccagttgtacccacaatcagggtacttgtgacattcacaaagtttgaagagctacagccattagaggagttcaccacaccgccatccagccctgacaatagcaagagcccagtggcgcagtcttcctcaagttcttggattcaatggatcaaggctccttaccatcagaacttctcaacagctccaggccccagcagccgtgtagaggacatccaggacccatttgtcatccctgctgattatgtgtggacgacaccagaagagaagaaaaagaagacacaagaaaacaagagtaagtcgaagaaaggccgaaatgcggcggcatag

SEQ ID NO: 10953 - DNA, 2034 bp, Oryza sativa
  Clone ID: TFbOSC900416j.C1.o6.gm
atggccggtgtggacgcggcgaggtacgcgcacagcgaggcgcaccacgcggtggcgacgagggaccacgcggcgctgcggcgggtgctggacgcgctgccgagggcgcggaggccggaggagatccggacggaggccgactccgtggcggaggaggcgcgcgcggaggcggcgtcggcggtcatcgaccggcgcgacgtccccgggcgggagacgccgctccacctcgccgtccgcctgggcgacgcggcggcggcggagatgctgatggcggcgggcgcggactggagcctgcaaaacgagcaagggtggagcgcgctccaggaggccatctgcgcccgcgaggaggcgctcgcccgcgtcatcgtccgccactaccagccgctcgcctgggccaagtggtgccgccgcctcccccgcgtcgtcgccgccatgcgccgcatgcgcgacttctacatggagatcaccttccacttcgagagctccgtcatccccttcatctcccgcatcgccccctccgacacctaccgggtctggaagcgcggcgccaacctccgcgccgacatgaccctcgccggcttcgacggcttcaagatccagcgctccgaccagaccatactcttcctcggcgagggctccgacgacggcaaggtgcccccgggctccctctgcatgatcaaccacaaggacaaggaggtgatgaacgccctggaaggctctggcgcgcccgcctccgaggccgaggtgcagcaggaggtcaccgccatgtcgcagaccaacatcttccgccccggaatagacgtcacgcaggccgtgctgctcccgcagctcacatggcggcgccaggagaggaccgagtcggttgggccatggaaggccaaggtgtatgacatgcaccatgtgatggtcagtgtcaaatcaaggagggtccccggcgcgatgacggacgaggaattcttctcggcttgcaacgagaacgataccgagagcgagggcttcgacgatgttttgactgaagaggagaagaagcagttggaagccgcgcttaagatggactctcctgatggtgctggtggtgaaggccagtccgacacgtttgttggtcctcgacatagctgtgttgagccgagggagagagagataccaattgaggatttgagcatctccggaaatggggatagtaaacatgataagaaaggttggtttggtcattggggaaagagggttcagagtagcaagctagaggggacgaagaagatggcacctccaaggagttcgctctgtgtagatgagaaggtgagcgatatccttattgaatctccatcgaatgtacaaactaggccaggaaggcattcggtagatgtagtaagaggggatgagagcagaaggggcaaggaaagggattatcggagacctgctgcttcgtcggagtgtggacataggcgcaaagaaggtagcaaagaaagcgagtacaagaaaggtctaaggcctgttctctggctttctcctaacttccctcttcggactgaggagctcttgccactgcttgatattcttgcgaacaaggtgaaggcgatccgtcgcttgagagatctccttacaacaaaactgccaccaggaacttttccagtcaaggttgccatcccagttgtacccacaatcagggtacttgtgacattcacaaagtttgaagagctacagccattagaggagttcaccacaccgccatccagccctgacaatagcaagagcccagtggcgcagtcttcctcaagttcttggattcaatggatcaaggctccttaccatcagaacttctcaacagctccaggccccagcagccgtgtagaggacatccaggacccatttgtcatccctgctgattatgtgtggacgacaccagaagagaagaaaaagaagacacaagaaaacaagagaaggatgagtgggagatttgaagatttcgacgagctgcagggatcaatattcatggttgaatttgtctttagtgtcttatctggtctgctattctga

SEQ ID NO: 10954 - DNA, 3012 bp, Oryza sativa
  Clone ID: TFbOSC410211j.C1.o17.fg
atggcggaggggcggcgctacgcgatcgcgccgcagctagatattgagcagatactgaaggaggctcaacgccgatggttacgtccgactgaaatttgtgaaatacttaagaattacaggagtttccgtattgctcctgaacctccaaataggcctccaagtggttcacttttcttgtttgatcggaaggtcctgagatatttcaggaaggacggtcataattggaggaagaaaagagatggaaagacagtcaaagaagcccatgaaaggttaaagtctggaagcattgatgtgcttcattgctactatgctcatggggaggagaatataaatttccaaaggaggagttattggatgttggaggaggattacatgcacattgtacttgtacattatctggaagtcaagctgaagtttcatttcctgcacatatatgggtatgaccatcaggctggaaaattaagctctcgtagtacgggacatgatgatgtactgcaagcatctcatgcggatagccctttaagtcaattgccttcacaaactaccgaaggagaaagctcagttagcggacaggcctctgaatatgatgaaacagaatcaggcagttatcaaggattacaggctacagcacctaatacaggcttctattctcatggtcaagataacttacccgtggttcttaacgagtcagaccttgggactgcatttaatggccctaatagtcagtttgatctatcattatggattgaagcaatgaaacctgacaaagggacccatcaaattcctctttaccaagctcctgttccctccgaacagtctccttttacaggaggcccaggaattgaatctttcacatttgatgaagtatacaacaatggactgagtatcaaggatgtagatggtgatgatacagatggagaaactccatggcagattccaaatgcaagtggtacatttgctacagcggacagctttcaacaaaatgataaaactttggaggaagccattaattaccctctcttgaaaactcaatcatctagtctttctgatatcataaaggacagttttaagaaaaatgacagtttcactagatggatgagcaaagagcttgctgaagtagatgattctcaaatcacatctagttctggagtgtactggaacagtgaagaagctgacaatatcattgaagcatcaagcagtgatcagtatactctgggaccagtgcttgcacaagatcagctgtttactatagttgatttttctccaacctggacatatgcaggttcaaagactagggtatttattaaaggtaatttcttaagttctgatgaagttaagagattaaaatggtcatgcatgtttggagaatttgaagtcccagctgagattatagcagatgatactcttgtatgtcattctccctcacacaagcctggcagggtccctttctatgtgacttgctccaatagattggcctgcagtgaagtacgggagtttgatttccgacctcagtacatggatgctccaagtccacttggttctacaaacaaaatatatctccagaagcgtcttgataaactattgtctgtggagcaggatgagatccagacaactctgtctaaccccacgaaggagattattgatttgagcaagaagataagttcattgatgatgaacaatgatgattggtctgagttgctaaagttggctgatgataatgagcctgccacagatgataagcaagatcagttccttcaaaaccgcattaaggaaaaattgcatatctggcttctccataaagtaggggatggaggcaaaggtcccagtatgttagatgaggaggggcagggtgtgcttcatttggcagctgccctagggtacgattgggcaataagaccaacaatagctgctggtgtgaatataaacttcagagatgctcatggatggactgcactccactgggctgcattttgtggaagagagcggacagtcgttgcacttatagcactaggtgcagctcctggagctgtaacagacccaacaccaagtttcccttcaggaagcacaccagctgatcttgcatcagccaacggacacaagggaatctctggtttcctagcagagtcttctttaacaagtcatctgcagactctcaatctaaaggaagccatgcgtagcagtgcaggagaaatatctggtctacctggcattgtaaatgttgctgatagaagcgcctcgcctttggcagttgaaggccatcagactggatctatgggagattcactaggtgctgttcgtaatgccgcccaagctgctgcccggatataccaagtttttaggatgcaatccttccagagaaaacaagcagttcagtatgaggatgaaaatggtgcgatatcagatgagcgtgccatgtcactcttgtctgctaaaccatccaaacctgcacagcttgatcctctgcatgctgctgcgactcgaatacaaaacaagttccgtggatggaagggaagaaaagaatttctgcttattagacagcgaatcgtcaagatccaggcgcatgtgcgaggtcaccaagtgagaaagcattatcgcaaaataatttggtctgttgggatagtggagaaggttatattgcgctggaggcgacgaggtgctgggttgcgtgggtttcgacccacagaaaatgcagtcacagagagtactagcagcagcagtggcaacgtgacccaaaacagacctgccgagaatgactatgatttcttacaagaaggacggaagcagactgaagaaaggctacagaaagctcttgccagagtgaaatccatggttcaatacccagatgccagggatcagtaccagaggattttgacggtggtaactaaaatgcaggaatcccaggctatgcaagaaaagatgctcgaggagtcgacagagatggatgaaggccttttgatgagcgaattcaaagaactgtgggatgacgacatgccaacgcctggatatttctag

SEQ ID NO: 10955 - DNA, 1371 bp, Oryza sativa
  Clone ID: TFbOSC1309j.C1.o3.gm
atgaccatggaagatggaagctgtcctccagcagtcgcccccagtggcagccaagccgaagattacggatcatggacactgaagcagaagcttgaggatctcatcaactgtgatcctatccatggtatcatgccaaaaaatcctaaatataaagcatatttcgaggaaaagttcgaggagaagttaagtttcatgggactgggagagtttctttaccctgatatcctcaccaacatggcctcccagaacgctctgcgttgtgccagggtcgcactccagggcacctctcctctcttgcgttgccgccgccgcgctgaccccaacacccgccaccgctacggcttcgcccccctgcacatggccgccgagaacttcagcgtcgacatggtcaagctcctcttccgctgcggcgcgtccgccaacatccgcaccaagggcgacaacgtcattgagggcctcctccctctccatgttgctgtggagaatgccagcatgcacaagtacattgaggatcattgggctcatggggaccatatcatcaacctcatcttcctcctttgtcttcctgagatgacggacaacattgtcgacgaggtatggaattacattcagcatgaagagaagcatgtccaggcagcaattttgctgctcgctgctgaaaagcagctccgtggtcgccttaacaagagcagtggcaaagcctctctgaacgggtttgatattgttaaaagccgcattggtgatgctcttagcaccatacatcttgagggcttaaatatggttcaagagggaaagaatggcagggcactaaagagattgaaagacaaaaaggaagcccttcttacagcacttgtactagtgtgcattgttcacaaagctggtgaagctcttgacggatacattcaaactcattcacagccgccgccgccgccgcggaggtggttctccctcgccggcgaattgagcctccccaacgatggagcggcaagctcagcaacacgggggctcgtgagcggcggcgctgagcaaggcggtggggttgtcgaggatcgcgaggagcgaggtggggtcgtcgaggagggcgaggagcaggcgaatcaagcaacgactccaacagcgcagatttccttcgccgcgtgccctcgttgcggcgagaaaacgtgcatcccagataggggccaagcggctgagctagggtgcgggcctcgtcgccacgtcgacctgaatccgagctggagcaacgagatcacgcgccaggtcggtgcacttcgttcacggcacctcctcctggcgcaccagctccggatccagctcctgtcggcggcggcgcaccagctcctgtcggcggcggcgcaccacctccgccggtag

SEQ ID NO: 10956 - DNA, 319 bp, Oryza sativa
  Clone ID: TFbOSC16667j.C1.o1.np
actcaagcttgcatgcctgcaggtcgaggggacacgccgccgtcgtcagcgtcttgctgaaccatggcgctgatgtaggcggacgcacccaacaggattgccaatttcgtcttcacaccgttggtttcgtcacttttggggggatcattggaatgcatgaagttgctctttcagcatgtagtcataccggctccatcagatttgtcaattgcttggtggaatctggggcagatccaaacattcccgacgaatttcatggggatcctctagagtcgacctgcaggcatgcaagcttgagtattctatagtgtcacctaaa

SEQ ID NO: 10957 - DNA, 3102 bp, Oryza sativa
  Clone ID: TFbOSC401695j.C1.o21.fg
atggcggcggcggcggacgcgcggcgcttcgcggtcgtgccgcagctagatattgcgcagatactgaaggaggctcaacaacgatggttgcgtcctgctgaaatttgcgaaatacttaaaaactacaaaagtttccgtattgcaccagaaccaccaaacaggcctcaaagtggctcgcttttcctatttgatcggaaagtattgagatactttaggaaggacggccataattggaggaagaaaaaggatggaaagactgtcaaagaagcacatgaaaggctgaaatctggaagtattgatgtgcttcactgctactatgcacatggagaagagaatgagaacttccaaaggaggacttactggatgttggaagaggattttatgcacattgttcttgtacattatcttgagaccaagggtgggaaatctcgtactaggggcaacaatgacatgcatcaagcagctgttatggatagtccattaagtcaattaccttcacaaactatagatggtgaaagctcacttagtggacagttctctgaatatgaagaggcagaatcaggaggaaccggataccactctttcactcagatgcagcagcagcaaaatggaattggacctgtgactgatgcttctatgttcagttctcgtgtttctgcttcatccataggtaattatcagggacaacatgctatgggacatacaacaaacttctattctagtagtcaacatgattcacctcttgttctcagtgatccaaaccttgaacttgcaaataatggacatgagtcattgtggaatggggttatgaaacctgatgaagggactgttcaaatgactcatctacaacctcctgttcatcctgagcaaggcatgttcaccacagaaggccaaggggttgaatatttgacattcgatgaagtatattctgatggactcagtctgaaggatataggtgctgcaggtgctgatgtagaaccattctggcagttttcttcaaacagctatctaacagaagccattgcatttcagctctctagtgctactgctgatatatctgcaacagagaacagcgtccaacaaaatgatggatctctaggggcagctattggcttcccatttttgaaaactcagtcatccaatctatctgacatcctgaaagacagctttaagaaatctgacagttttacaagatggatgagcaaagagcttcttgatgttgaggattcgcaaattcagtctagctcaggggcatactggaacactgaagaggcagatagtatcatcgaagcatcaagccgtgagccactggatcagttcaccgtggcccctatggttttgcaagaccagctattcagtatagttgatttttcgccaagctggacatatgcaggctcgaagaccaaggttttagttactggtagattcttacatgctaatgaagtcacggagagatgcaagtggtcatgcatgtttggagaagttgaaattcaagcggagatttcagcagatgggactcttcgatgttattctcccccgcataaaccaggcagagtccctttctatgtcacctgttccaacaggttagcctgtagtgaagtacgtgagtttgaatttcgaccaagtgactctcaatacatggatgctcctagcccgcttggtgcaaccaacaaagtttatttccagatacgtcttgacaacctattgtccctggggccagatgtgtaccaagctactataactaaccccagtaaggagatgatcgacttgagcaagaagattagttcactgttggcaaacaatgatgagtggtccaagttacttaaattggctgatgataatgagcctcttagccatgatcagcaggatcagtatgctgaaaacttaattaaggaaaaattgcatgtctggcttctccataaagtaggcgatggtggcaaaggacccagtgtgttagatgatgaggggctgggtgttcttcatcttgcagctgcccttggttatgattgggccataaggccaactgttactgctggtgtgaacataaatttcagagattttcatggatggactgcattacattgggctgcattttgtggcagagaacggactgtagtagcacttattgcactgggagcagctcctggagctttgacagatccacatcctaattaccctgctgaaagcacaccagcagaccttgcatctgctaacggacataagggcatctctggtttcctggcagagtcctctctgacaagtcatcttcaagccctcaatctgaaggaagccaatatgtctgaaatatctggtctacctggtattggagatgtaactgagagaaatgcatctcagcctgcaattggagattccttaggtgctgttcgaaatgccgctcaagctgctgctcgaatatatcaagttttcagggtgcaatccttccagaggaaacaagcggtccaatatgagggtgacaaaggtggcatatcggacgaacacgcactttcactcctgtctatgaagccatccaagtcaggccagcttgatcccctgcatgctgcagcatctcgtatacaaaataaatataggggatggaaggggagaaaggaatttcttctcttcagacaacgaattgtgaagatccaggctcatgtgcgaggccaccaggtgaggaagcattatcggaaaatagtttggtctgttgggatagtggagaaagttatattgcgctggaggcgaagaagggctgggttacgtggttttaggcctacagaaggtgcaatagagagcagcagtggtggcacaagtagcaatttggtcaaagataaacctgctggagatgattatgatttcttgcaagaaggacggaagcaaactgaagaaaggctgcagaaagctcttgccagagtgaagtccatggttcaatacccagaagcaagggatcagtaccaaaggattttgaatgttgtttcgaaaatgcaagagtctcagaccgtgcaagaaaagattttagacgaatcaaccgagatggatgaaggtgatttcatgagtgaattcaaggagctgtgggatgatgatacaccactccctggttatttctag

SEQ ID NO: 10958 - DNA, 603 bp, Oryza sativa
  Clone ID: TFbOSC400782j.C1.o8.gp
ttagcatggtcggcggcatcatttggtacccagattggggggttaccgttgctgtcgagcactgtgacatcctgggctttacattgcagtaaaagagcgacgatcttcggatggcacttccggattgcataatgaagggcagtttcaccgtttctgtctcgcatgttaatgagtttccgcagctcctttgactgcaaaacaaattccacaaactttatgtgacctttttgtacagctatgtggagacatgtggtgccatcgttttcaactagaaatggagcatctggacaatgtttaagaatctccatagcaacaccaacatggccctggtatgcggcactaccaagaagagggataccacttgtgctgattatatatcctaaagagaaatcatgttccaacaatacttttagcacgtcaatcttgttctcaagcacaccaaattgcattggattaacccgtgcgctgttctcttctcttgccaatttaggacgagtctcaataatctttttggcgatatctgagaaaaaaatgtgaaggcatggataatattaatggttaacaagcacatatagctagatcgatacatatagctagatcgat

SEQ ID NO: 10959 - DNA, 3222 bp, Oryza sativa
  Clone ID: TFbOSC400432j.C1.o22.fg
atggaggcatcgatatctccaccaggctcatcaaagcaagcaggtcttcgtagaccttctcctggaaactctcttaaggatctgtgtcttgtttccaagcaaggatcaatagctgaagtagaatctgctttagctttgttgaaaaagagtggtggaagcattgatggcagaaatgtgtttggtctttgtgctctccaccttgcaacgtggagaaatcatctaccaattgtgaggaggctcctcgatgctggtgctgatccagatgcaagggatggagaatctggctggagcagcctgcacagagcacttcattttggccacctgtgtgttgctagtgttcttctacagtttggagcatcccttgctttggaagacaccaagggacgtacacctgttgatcttctctcaggccctgtatcacaggccaatggagattctcctgattcagttgcaatggaagtcttcagttggggaagtgggacaaattatcagctgggaacaggcaatgcccacatacaaaaactaccatgcaaagtagatgccttgcatgggtcatacatcaaaacagttgctgcatcaaagttccacagtgtagcagttagttctgatggtgaattatacacatggggatttggtcgaggtggtcgtcttggtcatccagatatccatagtggccagacaactgctgtgattactcctcgccaagtaacagtaggattaggccgtaaacgagtgaatgttgtggcagcagcgaaacatcatactgtgattgctacagaggctggggagttgtttacgtggggatcaaatagagagggccagcttggttacccttctgtggatacccaaccaacaccacggcgcgttagttccctgaaagcaaggattatttctgtcgctgctgccaacaagcactcagctgctgttgctgatactggtgaagtgttcacctggggtagcaataaggagggccagctaggttatggcacttctaattcagcatccaactgcattccaagaatggtcgagtacttgaaaggaaaagcatttaaatgtgtgtctgcagcaaagtatcatactgtagcattaggaactgatggcgaggtgtttacttggggtcatcggcttgtgactccacgtcgtgctgtaatatctagatgtcttaagaagggtggaaatacaaacctgaagttccatcgtatggagcggcttcaggtgatctcagtggctgctggagtgatgcacaccactgttttaaccgcagatggtgctattttctactgggtttcatcggaccctgatttaagatgccgacagatattctctatgtgtggaaggaatgttgtgaacatctcagctggaaaatactggactgcattggctaccgcaggtggtgatgtttttatgtgggatgcaaagaaacataaggatgatctcccaatgtttactcgagtgcatggtgttaagcgagcaacgtcagtttgtgttggtgaaacacatatgcttgtgctttctagcatataccatcctgagtacccacccaaacctaaaatccaatgcaagaaagccatgttagaatggaatggtgggatggaagaattggatgaagacatcatgtttaatgatgtacagcctgacagcggtatatctggaagcgatggtgtaataaaaaagggagcacctagcctgaagagcttatgtgagaaagttgcgattgagcatattctggagccaaagaattctatacaacttcttgaagttgccgagtccttggaagctaaggagctcaagaagcactgcgaggatatagctattcgcaatcttgattacattttcacagtggcagctccatcagttatgaatgcttctcctgaaactcttgcaaacttagagagattgctggatgaaaaatcgtcagagccatggagtcatcgtcgccttcccacagtgacagctacttatcctgctgtcattgatagtgatgaagagggagatgaagcaggaggatttcttaggctcagggacagtcagaagtctgcatcgaagtcatatggaatatcaagttatgggaacttccttgagaaagatagcaatgctggacaagctgcctctaaacagatcagggcacttcgcaagaaactgcagcagattgagatgctcgaggctaaacaactggatggtcatcagcttgataatcagcagctagcaaagcttgagtcaagggctgcccttgagggtgaacttgcagaactcggcattcccacagatttaagaactccagtctgtgttacagaagaaaagacaaacaagaaatcgagtgtttctaagaaacagaagcggaaaaacaagcaggcagcacattctgatactcccttggtgaaaagggaggacagggaccaaatctatgtcaaggatcttcaggaagtcttaccagtccatatttctgcagaaaaggaagcaagcgttgctgattcaatcaaaccctcagagcatgtcactttcattaacacaaaggctatctcttgtccattggaaaacaaagcttcccagccaacttcgtcaaagaagaagaataggaaaggtggcttatcgttgtttctgagtggtgctcttgatgacaccccaaaaccaagcccgcctacccctgttgtgactgtcacaccaaagcatgaaggtcctgcctggggtggtgctaaggtaacaaagggatctgcttcccttcgagatattcaaagcgagcagaggaaaacaaacgagccgatcacggccaaggcaaaagaccgctttgaggactcacctgacagtgctgggcgcatgcgactttcttcgtttatacctgatgcacgctctacaccgataactgtcacacctgctcgtgtcgtgcctgcttctgaaggggataagagcacactatcctggtcgtcttctgctacctcacctaatgtattgcggccttctctcagggacatacagatgcaacaggagaaacggcaaactggcatctcccacagtccaaaaaccaggacatcgggcttcgctataccttcccagggcacatcacctgaggttggtggcatcaaggacaatgttcccaaccgctggttcaagccagaggccgacgctccgtcctcgattcgctcgatccagattgaagagcaggcgatgaaggacttcaagcgcttctatagcaacgtgaggattgtcaagccacaggtccagtga

SEQ ID NO: 10960 - DNA, 711 bp, Oryza sativa
  Clone ID: TFbOSC900400j.C1.o3.gm
atggcgtcgagcaacggagagcaacctccagaatcgccgaaggaagcaaatgctgcgcctgtagcagccaagcttgccatggcgtcagggcgcgatggatgtgagaggctcaaggatctggctgaaggaatctctgcgactgatcagcaagcctctggtgctgtatattcgctctcgctcctggagggactgactcttgactcggaccagaactccgcgctgcatgtggtggcagcctccggtgacagccaggcctgggaaccactcctcgcgctggctgctgctgcgcctgcgcgtgacagcagcggtgcagcgagggtggatgaccaggagctcctagcaaggaggaagaacaaggtcggtgagacggctttgcacggggcggtccgtgctggccacagcaaagtggtggaggtcctcatgaaggaggatccgggactggccggcgttgatcggcacgacggcacgtcaccgctgtaccttgccgtttcgttgggacgcttcgagattgcgtgggatctgcttgatatgagctctaggaaattatcttactccggaccagatggtcagaatgtcttgcacgtcgcagtacaacacccccaagggaaggagggatgtgtcacggagagggagggagaagaggagcaggtagcaggtggcttgccgctcctaccagccaacaacggcatgcacccccgccccaagccttaa

SEQ ID NO: 10961 - DNA, 513 bp, Oryza sativa
  Clone ID: TFbOSC900156j.C1.o11.hg
atggatctggacggggtcaccactgaagggaacactgcactccatgttgtggccacctgcggtgatggcccgggctacttgaggagtgcaggcgtcatctacagcaggtcccaacatctcatgttagtgcagaacaacaacggtgacacacctctgcactgcgctgtccgggctggccattccaaaatggttgatcatctaattgatctggttgaaactaaggacaactcccctagcagcgcgagactggaggaactcctgagaaaggaaaactgccgtaaggagacggcctttcatgatgccgtctgcattggaaataaggatataatcaccaaccttcttaaatattattcagaattggccggcttccttatggatgcaacagacaaaatgcattgcacgcagccgttctacaagaccaaggtcaatatgtcatacacaaatgcaaaactcatgcttttgcaagttggggcccacaatgcaaataggaaatgggtgctaaggagtgcctag

SEQ ID NO: 10962 - DNA, 2064 bp, Oryza sativa
  Clone ID: TFbOSC900348j.C1.o23.fg
atggatcatgttgctggtgttcaatttgccgagcaaatcgagcaagctttgagaaaggccgacgagctcggcgacgatgacctgagagccgcgttacgtcgtgcgaggaactcaccggctgacacggcgttccaactccctctgctgcaacttcccgtagaagaccccgtccatgccggagcagcagccacccagccggagcagcagaatgcgggacgcaggttgatgtgcccagagctgtatcgcgccgccttctctggatctgtagacaagctccaggaacttcttgtttcacccagtggaacggcagcagaggaacaaggaagaaggcatgacggccagtgcgtcctggacgagaccaccgcagggctgaacaccgttcttcacttggcggccagtcaagggaagattgggcttgtgaggaagctctgcgatggcgacgacacggccgcggcggcggtggcggcgctgctgccgaaagagaccaccaagtcggagacggcgttgcaccacgccgcgagggcggggaggcgcgacatggtgtcccttctcatcaggctagctcagatgcatggatccggcgctcccgggctactggtgacgaagaacagcgcgggcgacacggcattgcacgtggcggcacggcacgggcgcgtggcggtggtgaaggtcctgatggtggccgctccggccttgtcttgcggtgtgaacaacttcggaatgtcgccgctgtacctcgccgtcgtcgggcggtcgattggcgccgtgaaagccatcgtccagtggaagcacgcgtctgcgtctggccccaagaggcagaacgctttgcacgcagctgttcttcagagcgtagaaatcacacgcgagttattgtcatggaactcgaatctggccaaggaacccgatgaatcggaaagcactccgctgcactacgcggcgtctgatggcgtccgagagatcatcagcatgttgattcagtcgatgccatcggctatgtacatcccagacaaagaaggattgacacctcttcatgtcgcagcgaagatgggtcatcttgatgtcatccaagacatgctgaaagaatgcccagactctgccgagcttgtcgacaacgagggcagaaacattctccatctggccatcgagagaggccatgaacctgtagtgtcatacatccttggcgatccatctcttgctgagcttttcaatgagcaagacaagaaagggaacacacccatgcactacgcggtgaaggccgggaacccgcgtctcgcaattttggagagcagaaacatcaaactgaacattgttaacaacgaagggcaaacaccattcgacctcgcatcaaacacaaccggtttcttgcacatgattggttttttgctcagactgtcagccaatggagctcggttcggggcgcaacgacaagattgcatatcccaatggagcagcaaaaatgttaaggaatggaacgagaaaacgaccaagaaccttggcatcgtcgccgtgctgatcgccaccatcgccctgaccgccatgttcaacgtgccaggagggtacaactccgacggcgtggcgaacctccgcgcgacgacgccttacaacgccttcctggtgctcgacaccgtggccatggcgtcctccgtgatcgccaccatgctcctcacctacggcaggggggcggcacgctcaagcacggcgtggatatgcatgtccctcatcttcctctggatggcgctgatgagcatgatcctggcgttcatggccgccgtcgtctccgggctggacagcacgaccaccaagtacatcctgtggagcatcttcgtgctgccgttcgccttcttggtcgcgctcagcttcgtctgggccgtgccagcgccgaccttcaccacactgcttctgttgcctcgtgccctcgccggagaagacagtgggtggacgcgtcggcgcatcgggcggcgtttccggtcggtgggggtttacctgttagttctgtacttgttctggttcttgaatgctgtggcgtttttccttaccgtctatgtcgtcgtaaacgcgatctga

SEQ ID NO: 10963 - DNA, 1137 bp, Oryza sativa
  Clone ID: TFbOSC900390j.C1.o21.fg
atggtttctttgttactgcagtggaaacccgcacttcttagcgattatgacagcagcaagagtagcccactgcattttgcttcatctgacggggattgctccatcatccaagaaatgttaactcatgcgccacctagcactgccttcatgctggacaatgaaggcctttcacctttgcatgttgcagcattgatgggccatgcagctatagtccatttattgctacagttttgtccttcttcggcagacattcgcgacaactatggccgaacctttctgcatgcagcagctatgaaaggccattcttccatcatctcatatgctataaagaagaagattcttgagcatcttttgaatgcgcaagacaaggaggggaacacaacacttcatttagctgttattgcaggggaatgcaaggttgtttctaaactattatcaagtggaaagatgcaagccaacatcatgaacaatgttggccacgcaccaactgaccttatcaaaaattgtaaaggtttctactcaatggacatcatgaaatggagagagactacatcaaaaaatctggctgttgtttcaacacttgtggcaacaattgccttctctgctgcattcaacattcctggatcatatggaaatgatgggagagcgaatctagcagggaatagcttgtatagtgctttccttattctggacaccttctctgtggtcacttcagtcatggcaacaatactactagtctatgggagagcttcaaggtctcaacgctcgtggctaggcttcatggtcacaatgcactttctttggttgtcactaaacagcatggtgttaggcttctttgcagctctagcggcggtgatgagtaaggagaagggcataaagattgcaatgtcccaggtgatctactatgggatgtacatcctgacgacgctgctttcaatcttagcaatgccaggatcatttacaagcattgtgaagttcctcatcagtgctcccaaggagcgacaacgacacactaagagacagattagccggcagtatccctttgccatcttttacattgtcaacgctgttttgttcgttatcataaatagtctagcaatggcatcattcgaagtggctagaaatcttagttactga

SEQ ID NO: 10964 - DNA, 453 bp, Oryza sativa
  Clone ID: TFbOSC401078j.C1.o13.fg
atgggcgcggaatcggagcaaccaacggcggcggcggcgaccgccgagcaggcgcaggatctcatcgacgccgctaggtacgatgacctggaggacgtcgtcgcgctgttcaccgccggtgtttccctagactccgcggattcgcaaggacgaacggcacttcatatggcctctgccaatggacatctcgctgtggtgcagtacttgatccaaaatggagcgaatgttaatgctacaaactcagagaagaacacacccctccattgggcatgcctcaatggacatatcgaggtaattaaagcgttgatatgcgctggggctagtgtcagtgcactgaacagccatgagaaaacccctatggatgaagcagtgacgaagggcaagatggaggtgatcgatgcaatcggtgcagcagtagctcaagcagaactcgatggtgtcactgtctcctaa

SEQ ID NO: 10965 - DNA, 2472 bp, Oryza sativa
  Clone ID: TFbOSC401583j.C1.o5.fg
atgtctctcccccgccgctttggatcaatcgtcagcgactcaccattcggcgactcggccattgacagcgatagtcgcacgggttcttgcttatttggatccgttcttccggggagcgagctaaccgggcgagcgagatgcagcaccagcaagctaagtttggttctgagtaaccgggctggtgggttagggtttgggggaaatcaagaaggcgcaagtggtccatattttcttggtggtgcttggtttcttttcaaccgtagagttcttcggtacttcagaaatgatgggtatgaatggcgaaaaaagaagaatgggaagactattgctgaagcccatgagcgccttaaggttgataatgttgatgcactgaattgctactatgcacacgcagacaaaaactctacatttcagaggcgtatatattggatgcttgatccggcttatgatcacatagtttttgtccactacagagatgttcaagagggcagcatttcagtatcagcactgaatgattcatcaacatccaatcagaatggcagtggtagcagagctgaggctcaaagttcacccggattgactagcgagctatttgccccatgtcttaattcatgcagtccaggatctgcggaagaagttagttcccagattatggccataaacaacgaaacaaatagcgttagtcaacctgattgggttcaacattgtaatcaggcagcgctgcgaaaacttaaggtgcagctgagtctggaagatagggaagatcatgatgtcgatgccaaagatattccatcaaacagtgaacctatcactgtgtatgggattcagaatgaagaaccaggcacttgtagaaatcttgcagatgtttttagtggactggagttcagcaaagaaaatcatcctgaagaaaccggactccctttttccagcactattgatgtgctgaaaaattcagacacttggttggaggaggatcagattgaagcaattctgcattcagcatctatgatagtgactgaaaaccaatggttcaatattcgtgaggtttccccagaatggtcctattgttctgaaagtacaaaggttatcattgcaggagacttccttcgtgatccctctcatggttcatgggcaatagtatttggcgatgttaagttgcttttcgatggtcatgtttctgagcaatttttaaagtttggcttgccattcccaaatcttgaatgcggactccaagttagcccatctgaaattatgaagggggcatctgagcggctgaaccgtgacaccgcagtaaattgtgtcatggaagtactgcttaacaacaagtttgaagagtggctgttttctaaatatgaacaaaatagtgaagggaatcattttctccctaggcaataccatggtgttatacatacaattgctgccttggggtacaactgggctttgaaacttctgcttaattcaggtgtacttgtaaactaccgtgatgcaaatggatggactgctttacattgggctgcacgatttggcagggaagagacggtagtgctccttcttgatgcaggtgccgcagctggtgcactgtcagacccaacagcacaagatcctgctgccaaaacacctgcttcagtagcttctgcatatggtttcaagggcctttctgcgtatctttcagaagcagaactaatagctcatcttcattctctcgaatcaaaagaaaacgggtcttctggagatcaaatatcaagagttgtgggcagaatatcagacacatctgcccatgcacaaagtggtagcgatgatcagcttgcactgaaggaatccctaggagctatgcgatatgctgttcaagctgccgggcgcatacaaactgccttccgtattttttccttcaggaagaaacaacaagcaggtcttcagaatagaggtaaccacattatatccattcgtgaggtaggtgctgcttcacacggtatgcttgagaaagccgcgttatctatccagaagaacttcaggtgctggaagaaacgcaaagaatttctgaaaatacgcaaaaatgtcatcaagatacaggcgcgtgtcagagctcatcaacaacataacaagtacaaggagttacttcgaagtgtgggcatccttgagaaggtcatgcttagatggtaccgaaagggtgttggtttacgaggattccaccctggggcaatagcaatgccaatcgatgaagaggacgaagatgacgtagccaaggttttccggaagcaaagagtggaaacagctctcaacaaagctgtttcaagggtatcatcgatcatcgacagtcctgtcgcgagacagcaataccgaaggatgctcaaaatgcacaaacaaaacaaggatgatgatgaaaaagtagaagtttctccagcatctcatgtttatggcagtggcagtcatcacatgtgttggctaagccacaacaacaaagcaatgcactag

SEQ ID NO: 10966 - DNA, 1137 bp, Oryza sativa
  Clone ID: TFbOSC900390j.C1.o23.fg
atggagcctgcaggctgcagcacagacgaggtgaccggagaccgtagcacgcttctccacatcgctgcgtggaaagggcacagcgacctgattgctcagctatgccgctggggaaacggcagcctcatcacctcggtgaactcatcggggtacacgccgctgcactgcgcggcgggcgcagggcatgccggcgcggtcgaggccatcatccgggcgctggctgcaggagccaacgtggaggagggcaggctgcaggagatcctgcgcggcaggaacgaggccggggacacgccgctgcacctcgccgcgaggcacggccatggcgaggcggcggaggcgctggtgcgggtggatcctgggctggcggccgagctgaacggcgcgggggtgtcgtcgctgtacctggcagtgatgagcgggtcagtgcgcgccgtcagagcaattctctggtgtcggaatgcatcagctgtcggccccaagtcgcagaatgcgctgcatgctgctgttctccaaagttcaggtgattactttgttgacaacttggcattttatatctgcacgggccagcgacaggaggagcacaccggcctaccggagaggaggggaagagagtatccccagccgcttgaggagcctcctgcgctcggcctcctcccaagccctacccttccgcttgtcgtcatcgtgggggaccacagccaacgatgccatggggcggccatccccatcgatctgctctctccgcacaggaacacggctacatccctatttgttcacatcgccaatcttggccagtgtcagcggcttgggatgaagaggatgccgttgcccacggcctcctcggtggccaccatgccccgcgcctcgaacgagtgccgctgccacttgagtacatctgaggtgggggccatcggatttgatgaagcgacggcgacggtggcctcctcaaccatcggcacggtctcgtcgacagcgatgggagagagaagggagatcacggttgccgtcgttagctctggcctcgagccgccactctgccgtcgggccaaccccgccgccggtgtggccagcgctgccatctctctcactgctgcttgcctgccatcgccattggtgcatccagcagtggaggagtag

SEQ ID NO: 10967 - DNA, 2028 bp, Oryza sativa
  Clone ID: TFbOSC101199j.C1.o3.fg
atggaggaggaatcccaatcccaatcccatttcccgctccggtgggagagcaccggcgaccaatggtggtacgcgacgcccatcgactgggcggcggcgagcggccactacgacgtcgtccgggagctcctccgcctcgacgccaacctcctcatcaagctcacctcgctccgccgcatccgccgcctcgagtccgtctgggacgacgacatgcgcttcgccgacgccgccaggaaccgcgccgccgtcgcccgccgcctgctccacgactgcgagccccccaggggcgccgccgctggcggcggaagccggcccaaccggctcatccgcgcgggctacggcggctggctcctctacacggcggccgccgccggggacgcggccttcgtgcgggagctgctcgggaggcagccgctgctggtgttcggcgagggggagtacggcgtcaccgacgtgctctacgccgcggccaggagcgacagctccgaggtgttccggctgctgctcagcgcggtgctgtccccgcccgagtgctccgccgggggagaaggcgacggcggcaccgccgccattgctgggggtttcatgttccggtgcgagatgatgaaccgcgcgatgcacgccgcggcaaggggaggcaactggaggtcctcagggagctcctgcaggggtgctccgacgcgtcggcgttccgggacgctcagggatcgacgatcttgcacgccgcggccgcgagggggcagcttgagctgtcacgaatgtttggttgtgaaggatcttattgcctctttcgatatagtcaactccacagacgagcaagggaatacggcattgcatctagccgcctttcgaggtcatttgcccgtggtcaaagccctcatcactgcatccccatcacttatatcagctacaaatgaagttggcgacacgttccttcatatggcgctgactggctttaggaccccaggattccgaaggcttgatcgtcagatggagcttatgaagcaattgattggtggagtgatcatggatttaagcagcattatcaatatgcaaaacgacgatggaaggacagttcttcacttggctgtgattggcaatctgcactctagccttgttgagctcttgatgactgcaccgttgattgaccttaatgtccgggacaatgatggcatgactcctctggatttacttaggaaacagccaccaacagcatcgtctgagatactcatcaagcagcttattttggctggtggaattgcaaattcaatggaccatgagaccagatcagccattgcttctcagctaaagatgcactgtatcgtaggcagcccgggaacatccttcaagatcccagatgccgagatcttcctccatgcaggtatcgatgcgtcagacatcagcgaaagaacgaactcattctctagcgttggacagagtgagccagaatttccggaatccagtcgtaagaagctgaactctatgcaaaatgcagcgaaacatctcaagatcctactcagatggcccctccgcaaggagaagaaatcatcatccggtgcccgaaatgaactggacgacgacgcatcctctgtggattcagtcaagagctggagccacggggagaccccgacaccgctgaggcagaagtactccaggatgagctccctgttcaacaacaagcggaccatggcagccaggatcggctcaccgagtccatcgatgaagaagagcttcgcagatggcctcgcacatggcgtgatgcagcccgaatcgccttcaggctcgggctcctggtcgtcgtcgtccttggtcgacaggattgaagccgtccatctggacaagaatggccaagcatctcctgataccagtgtggtgatcaggcgtacacccaagaagcacgggtctttgaacagcaggctcatgaaccaatacttctgcatcggagcgcaggggatagctgtcgaggactcaaccacggggcagcgatcaagtcggatgttcagaagttcacttctgtcagctgcctga

SEQ ID NO: 10968 - DNA, 1716 bp, Oryza sativa
  Clone ID: TFbOSC900001j.C1.o24.fg
atggcggagatcgaggtggtcggcgacggcggcggcggcggcggaggtggaggggtgaagcagggggtggtggaggtgagggaggcgcgggcgaacggcggggagggggaccccgtggtggacgtgtactccgccgcggcgtacggggacctggagcgtctgcgcgggttcgtggagcgggacggcggcgcgtcgctcgcggcgcccgacggcaacggctaccacgcgctccagtgggccacgctcaacaactacccccacgtcgcgctctacatcatcgagcatggaggcgacgtcaacgccggggacaatgcgcagcagacggccctgcactgggcggcggtgcgtggagccatagctgcggcggacgtgttgctggagaacggtgcgagggtcgaggcggccgatgtgaatggctaccgggcagttcatgttgcagctcagtatggacaaacagcattcttgcaccacattatctcaaagtacggtgcagactttgagtgtttggacaatgatgggaggagtccattgcactgggctgcctacaaaggaaatgctgatacaattaggttactgctgtttatggatgctaatcaagtaaggcaagacaaaaatggttgtactccattacactgggcagcaataagaggaaattatgaggtgtgcactgttcttgtacatgctggtaccaaggaggaactcacattgaaggatagcggtgggtttactcctgtggaacttgcaaacgacaaaggtcatcggcatctttcctatatcctttccaatgctacaaaagtaacatttgaagacaagtactgctcagggagatcgcggaagattggatatgcttctatcctgttttgctttcttattgtccttatcaccctttttctgaactcaattatttttgcaccgaatttttctagaataactgccgctgttggtatttggtcatggggtgctatttctcttgcctttgcttcattggtgatgttctacagagtaagcagaaaaaatccaggctacatccaagccaataccaagcgacttgatccaaaggaaccacttatggagattgaccttaattcttctgcttggacaggcaattggtctcagttatgccccacatgcaagataattcgcccaatgcgctccaaacattgtccaacttgtaagcactgtgttgagcagtttgaccatcactgtccttggatatcaaattgtgttggaaggagaaataagtgggacttttttgtgttcctttgtatgggaacaactacagcatttctgggcgctgcgattgggttccacagactttggacagagcccattatactctcatcttctgagtcatggattaacttcatgctgtcaaaccatcctggtgctgtactgttcatgttcatggatgtctttttattgactggagcgcttattctgacaggagcacaagcaacacagcttaaagtattctatgtttctattactcccctatggcgtaagttcttggaagagcaaatgatagcacgcaatctcacaactaatgaagcagcaaaccagtcacgctatgcatatcttcgggggcctgacggacgcttcaggaatccttacagtcgaggatgccggaggaactgcgctgattttcttgtaaatggatacagtaatgacgaggaggctgcatggccaacgcttcaacaaacagtgcaacgaagctag

SEQ ID NO: 10969 - DNA, 2073 bp, Oryza sativa
  Clone ID: TFbOSC900367j.C1.o17.fg
atggcggagatcgaggtggtcggcgacggcggcggcggcggcggaggtggaggggtgaagcagggggtggtggaggtgagggaggcgcgggcgaacggcggggagggggaccccgtggtggacgtgtactccgccgcggcgtacggggacctggagcgtctgcgcgggttcgtggagcgggacggcggcgcgtcgctcgcggcgcccgacggcaacggctaccacgcgctccagtgggccacgctcaacaactacccccacgtcgcgctctacatcatcgagcatggaggcgacgtcaacgccggggacaatgcgcagcagacggccctgcactgggcggcggtgcgtggagccatagctgcggcggacgtgttgctggagaacggtgcgagggtcgaggcggccgatgtgaatggctaccgggcagttcatgttgcagctcagtatggacaaacagcattcttgcaccacattatctcaaagtacggtgcagactttgagtgtttggacaatgatgggaggagtccattgcactgggctgcctacaaaggaaatgctgatacaattaggttactgctgtttatggatgctaatcaagtaaggcaagacaaaaatggttgtactccattacactgggcagcaataagaggaaattatgaggtgtgcactgttcttgtacatgctggtaccaaggaggaactcacattgaaggatagcggtgggtttactcctgtggaacttgcaaacgacaaaggtcatcggcatctttcctatatcctttccaatgctacaaaagtaacatttgaagacaagtactgctcagggagatcgcggaagattggatatgcttctatcctgttttgctttcttattgtccttatcaccctttttctgaactcaattatttttgcaccgaatttttctagaataactgccgctgttggtatttggtcatggggtgctatttctcttgcctttgcttcattggtgatgttctacagagtaagcagaaaaaatccaggctacatccaagccaataccaagcgacttgatccaaaggaaccacttatggagattgaccttaattcttctgcttggacaggcaattggtctcagttatgccccacatgcaagataattcgcccaatgcgctccaaacattgtccaacttgtaagcactgtgttgagcagtttgaccatcactgtccttggatatcaaattgtgttggaaggagaaataagtgggacttttttgtgttcctttgtatgggaacaactacagcatttctgggcgctgcgattgggttccacagactttggacagagcccattatactctcatcttctgagtcatggattaacttcatgctgtcaaaccatcctggtgctgtactgttcatgttcatggatgtctttttattgactggagcgcttattctgacaggagcacaagcaacacagcttaaagtattctatgtttctattactcccctatggcgtaagttcttggaagagcaaatgatagcacgcaatctcacaactaatgaagcagcaaaccagtcacgctatgcatatcttcgggggcctgacggacgcttcaggaatccttacagtcgaggatgccggaggaactgcgctgattttcttgaaggcatttctcctaatttacttcctttatttgcatttccagcagtgatggccactacgacctgctccaagatcgtgtcaggtcgatgcaaaaacgaaatcgtttatagagacgatagatcttgcattcacagctactccctccggttaggacaatttgacgttttcgagtctctgatttttttatggattcgggtggcgccggcggagttcgagcgggcggccgccggggcggatgggcagcgggcgaagtccatggctctcaacagtgagggcctcgagggtcttgttccacgggcaaagttgctattgtcacttggcagtacattttttcttggatttgcccctttgattcttgttacagtttctctgtttgctgttctttatgtggacagaaagtgctttgctcctatttcacatgcatag

SEQ ID NO: 10970 - DNA, 648 bp, Oryza sativa
  unsure (1)..(648): unsure at all n locations
  Clone ID: TFbOSC4136j.C1.o1.np
ctagcggttgctacagatgcgttgagctttggttaatctatccggcgagagataatgggcgagcttgctgatctcgttgtcgtgccgtcgcagccgccgctcgccggcggccggcgggacaggctggcggcgctgctggagctcgcggcggcggatgatgttgatgggctcaggggggcgctcgcggagggaggcgaggaggcggcggagttggctgatggggtcgggctgtggtatggtcggagcaaggcgtccgaggcgcgcacgccgctgatggtggcggcgacgtacggcatcgccggagtggtctcgctgctggtgggcctcggcggttgcgtcgacgtcaaccgtcgccctggagccgacngcgccccgcgctccactgcgccgcctccggtggctcgcgcaacgccgtcgctgttgtcaagctgcttttggccgctggcgccgatccggccacccccgattccgccggccgcttccgcgccggcgtcatcctagctcctccggcttcgccagatgcccttggcgatctcgaggtgctcctcgggcgccgccgagcactcgccgtggcgacctcggtggcttcaggttcgtcatcccctccgctctctccttaccagatgagggcaacaggtcgccctcgtc

SEQ ID NO: 10971 - DNA, 1974 bp, Oryza sativa
  Clone ID: TFbOSC12505j.C1.o11.fg
atgggcgagcttgctgatctcgttgtcgtgccgtcgcagccgccgctcgccggcggccggcgggacaggctggcggcgctgctggagctcgcggcggcggatgatgttgatgggctcaggggggcgctcgcggagggaggcgaggaggcggcggagttggctgatggggtcgggctgtggtatggtcggagcaaggcgtacgaggcgcgcacgccgctgatggtggcggcgacgtacggcagcgccggggtggtctcgctgctggtgggcctcggcggttgcgtcgacgtcaaccgtcgccctggagccgacggcgccaccgcgctccactgcgccgcctccggtggctcgcgcaacgccgtcgctgttgtcaagctgcttttggccgctggcgccgatccggccacccccgattccgccggccgcttccccgccgacgtcatcctagctcctccggcttcgccagatgcccttggcgatctcgaggtgctcctcggccgccgccgagcactcgccgtggcgacctcggtggcttcaggttcgtcatcccctccgctctcgtcctcaccagatgagggcaacaggtcgccctcgtcgcgttcgtcgtcgctgtctcccatcactgtggatcgtgggaagaaggagtatccggtggatccaactctgccggacatcaagagcagcgtgtatgcttcggatgagttccgcatgtttgcgttcaaggtccggccctgctcccgtgcctactcacacgactggactgagtgcccgtttgtgcaccccggcgagaacgcccgccgccgtgatccccgcaagcacccatacactgctgtgccttgccccaactttcgccggcctggtggctgccctagcggcgatagctgtgagttctcgcatggcgtgtttgagagctggctacacccatcacagtatcgcacaaggctctgcaaggagggagcagcttgcgcccgtcgcatttgcttctttgcccatgatgaggatgagctccgccatgtgcctcacaacagtggtgccggcctgctgtctccccgcgcttcttcatccattgatatgactgctgcagctgcgctcgggcttcttccaggttctcctaccagacactttgcaccgccgcctgtgtcaccatctgctgggagcaatggaggagctgctgctgcgcattggctccaaggcagtaggctgcgttcttctttcaatgcaagggatgctgctgttgatgaccttggcatgctcctcgaatgggaatcacaataccttggggcactctgcctgccacccagcagccgcccccaaccacgcctttcagctggtctgagtatcaggccaacaattgctccatccaatcttgaagacatgtatgcttcagacatggcaatgtctccgaggttccctaatgaccaaggtcactcagtctactcaccagcccacaaatcagccctcctcaacaagcttcatcaacagaagggcctcttatcacctgttaacaccaacagaatgtactccccaagggctcttgatccgtcatctttggcacattctccatttggtggcatgtctccccggtccccccgtaccatggaacctacatcacccctaagtgctcgtgtaggagcccctgccacacagcggccttctgttggttcaccacggaattccagtgcttggggcaccgtggggtccccgatgggtaaggttgactggggtgtcgatagcgaggagctagtccgcttgagacgccctgcacaaccagggtttggagaagatgagacagatgtatcatgggtgcagtcactggtaagcaatgctgagcttaatggcaagaggggcgaagtacaaggcatgcctggtacttctgcattgatgaacaggcctgacctgaacaatcagggtgacttgttggaccagacggtgatcggtgcttggcttgagcagatgcacctggatcagaagtga

SEQ ID NO: 10972 - DNA, 1281 bp, Oryza sativa
  Clone ID: TFbOSC401716j.C1.o83.fg
atggccaccgcgaagccagcctctccctcgccgccgccgagcaccgccgtcgtcccggccgccaataccgcagcagccgcggacaagccggcggtcgagcagctcctggaggtggcggaggacgaggtcgtcatcgacttcaagcccaacgccaagtgccgcgctgacctccgcctccgctcgctgcacccgtccctccccgtcgccttcaaggtccagacctcctcccctctcaagttcctcgtcagccccccgcgcggcgccgtgcagccgctctcgtcggcctccctccgcgtcgtgctccgcccgcagcagcacgctcccgcgtccttcccgcgctcccgaggcgaccgcttcctcgtgctctcctccctctccgccgcgcacctcgactcctccgcctcctccagcgccgctaccggcggcaccaccgccatccgcctccgcgtgttcttcggcgggccgtacctgctccgcctcgcggcggaagccggggacgccgcggccgtgcgcctcatcctgcgccggcagccgcacctcctgccgctcctggagcccgaggcggcggtgcccgacggcgccgagcagtgggcgccactgcacgcggtggccgcgaggggggacaccggggaggtgaggcgcctggggccggactcgatgggagcgcgcgaccgtgaggggaggaccgccctccacgttgccgccgcggccggggaggcggaggcggcggcggcgctggtggacatgggcgccgacgccgcggcgaccgacgcgcgcgggaggactccactggacgtcgcgcgcgagaagggctatcaagaagtggtggacgtcctggaacggtgggaactggtcatgacggcggcgaggcgaggcgacctccagagcctcgagtccctcctcagcaagcgcgccggcgtccggggacgtgaccagtacggcctgacggcgctccaccttgctgccatcaaagggcactgcgacgtgatcgcgctgctcgccgggtcaggctgcatggacatcgagtgcgaggacgtggaagggcaccgcccgctgcacctcgccgtcgaaggcggcagcgccgaggccgtcgagctgctgctcgacatgggcgccgaagtgcacgccgccaccaggcggggcgcgacgccgctccagatggccgtgacgatggggtacgaggccatcgcgctgctgctgcgaggccgtggcgccgacgaggcggccgcgccggcgttgtgcatcgcgtcctcgtcttcctcctcgatatcgtgtgcgtag

SEQ ID NO: 10973 - DNA, 1335 bp, Oryza sativa
  Clone ID: TFbOSC418098j.C1.o3.fg
atgtcgctgcccgacctcttcgagaagcttctcggcgacgagatcgccgcgacgctggacgacgacggggaggggatcgcggccaccgtggcgcgcacggccttccacggcatgaacgcgctgcacgccgccagaagcctgcacgtctaccgctacttgctcgaggtggccaacatggacgtcaacaagccggacaccactccaggtaggaagactcccctcgagcgagccattgccggtggggacctgccctctgtcaggtatctcattgatcatggtgctgatatccatcatgaacgtgaaggaaacatcacttttcttcattcagctgcaaagaaaggattccctgctacatccaatctgcattctgtcatgatgagcagccttacgttgaatgtggagaaaaatgcagacaatactccactgaaacatgttcctccaagagtgaactgctctttttgtgtgttatttaggactgggaggactgaaatagtaaaattgctgctttctagaggagctcatgttgatggcaaatcagatcatgggacacctctgcattttgctgctattaaaggatatgaaagtactgtgaagattttgttggagcaccaagcagatcccaacaaggttatgccttcttctcaagcaacacctttatctgcggcgttattcactacttccttaccttgtgtgaagctattgatccaggctggagctgatgtaaatgctacaaacaaccccctggcgagagctgcagggagtggattaactgaagctataaagttgttgttgaaggctggagcaaacccaaattgtcctgacacgcatggtagaatgccaatagagctggctgctgtgtatggtacaagggaagatgttgagattctatttcctttgaccaacccaattccaactgttgctgactggagcgttgatggggtaattacttatgccaatctggaacgcaagaagctagaggatgatgattacgttaacacgaaaatgtctgacctgaaacaaaaagggaatgaagcatttgatgagcaggattatgaaaaagcatcagtgtggtacacacaggcactggaagttgatccttgtgatgccacaactcttctaaagaggtgtctttgctggcttcgcatgggtgagggaaaaaaggctgtgaaagatgcaaccacatgcgcaaaacatcacccgaagttgtcggaggcctaccatcggctaggagaagctctaatgcttgagaaggattatgagaaagcttgcgtggcgttgacccatggtatagagttggatcctgaaagtgatgagatggacaaactgttctggtaa

SEQ ID NO: 10974 - DNA, 1039 bp, Oryza sativa
  Clone ID: TFbOSC31716j.C1.o1.fg
atggaggcaaatgctcctgctgtactgcccatggacgccaaactgatggtggccacagcccatggcgactgccagcagctgaaggatgtcgtgaacaaggaggatgctgccatgatggtgctggtgatggcgtcaagcaacggcacgccggcttccgccgcggcggcaagtcctccggtggccatgcatccgctgctgcacgcctcagcttcctccggggattggaagggtgtgaattttcttctcaacagggaagaagcatatgcagattcatctgttcagcccagtaaaaagtttctgaagtccctagaagcatgcatccccggcaactgcaccaacggaaggtgccgacctcgccgcaagcttttaatgacatacaagaagtcgcttctggagggtgtcaccatcgagggagacactgcgctccatgtggtggccacacatggggatggccacaactacttgaaatgtgttgacacaatctgtgccaagggcaagcacctcctgtttaagccaaacaataaggatgatacacccttgcactgtgctgccagggctgggaatcacgaaatggtcaataagcttattggtctagctattggacctagtagaagggaggaaagtgttgacagcatagcgaataacctgatccttaaaagtgataatctttctacagagacattcttgagcgatgatgtccgtgttgcaaataatcttacagtcggagatagtattagcataagtgaagacaatgtccacaggggagtggaatatctcagaatggaaaatgacagtaatgaaacggccttgcatgcggcaattcgcattggtcatagtcctatagtaacggagctattgacatatgattctgaattggcgctatttccgcaagaaggcacatcaccattgtacctagctatcttgctgaagcaatttgacatcgcgcggacattataccagatgagtagacaaaatattctctcatattctgggccaagtggacaaaatgcattgcatgttgcagttctccgaagcagag

SEQ ID NO: 10975 - DNA, 2169 bp, Oryza sativa
  Clone ID: TFbOSC413151j.C1.o12.fg
atggctgaagagtatgagctgaacgagatagatgacaccctgcatggctctgtggggagcaggctctcgctgtttgcgagggagctcaagtcaaggagaagcagcagctggcatggcggcaccgccctgaggctgccaaaggatctgtatgaaagccttgtcatacaccccaatggcagatggtacaggatctgggcgaacatgatgttcctgtggtccatctactccaccttcttcaccccgttcgagttcagcttcttccgcggactccccgatcagctgctcgacctcgagtgcgtccagctcgtcttcctcgccgacgtcgccgtccacttcttcctcgcctaccgcgacccccacacctacaggatggtccacgacaagcgccacatcgccctccgctacatcaaaggcagctttgctctcgacgtgctcggctgcttcccctgggacgccatctacaaggtgacgggcagggtggaggcggtgaggtggctggtgtgggtgaggctgtacagggggaggaaggtgatggcgttcttcaagcgggtggagaaggacatccgggtgagctacctcctgacgaggatcgtgaagctcatcaccgtggagctctactgcacccacaccgccgcctgcggcttctactacctggccaccacgctcccgcccgcgcgcgagggcgggacgtggatcggcagcctctccctcggcgacgcccggtacatcaacttcagggaggtcgacctgctcacccgctacgtcacctccctctacctcgccatcgtcaccatggcaactgtcgggggttcaggctatggcgacatccacgcggtgaacacgagggagatggcgttcacggtggtgtacatctcgttcagcatcgtcctgagcgcgtacctgatcggcaacatgacggcgctgatcgtgaaggggtccaggacggagcggttcagggacaggatgaccgacctcatcaggtacatgaacaggaacaggctgggcagcgccatcaggtcccaggtgaaggatcacctgatgctgcagtacgagagcagctacacccgggaccgcgtaatcgtcgacgacatcccggtcgccgttcgatccaagatgtcacagacactgtacctggatatggtttcgagagttgggctgttcagaggttgctcggatgacttcctaagccagattgtgctgaaattgcatgaagagttcttcctcccaggagaagttatcttggagcaaggcaccgtggttgatcaaatttacatcgtggcacatggatgcctggaagaggtggccaatggggaagatgggtctgaagagatcatctcagaactgcggccttacggcatagttggcgatgtcgcggtgatctgcaacattccacagccatacacagttagagtctgtgagctttgcagccttctgagaattgacaagcaatccttgactagcatcttacaaatttacttcaaggataatagtcagatattgagcaaccttctaaaggggaaagaaacggagtcgaagcggaagcaattggaatcagatatcacatatctgctagcaaagcaagaatcagaactagtccttggagtaaacaatgctgcatatcatggggatatatttcgtttgaaaagcttaatcagtgcaggagcagatccgagtaaatcagattacgatggcaggactgcattgcatattgctgcactgagaggatacgaaaatattgtcaggttccttattcaacgaggagcgaatgtcaacagcatagacaggtttggaaactcaccactgctgcaggcagtaaaatcaggccatgacaggatcacgtcgctcctcgtggagcacggcgcgatcctgaacctggaggacgctggaggttacctctgcagagtagtcaggggtggcaggatcgatctgctgaagaagctgctcagattcgggatcagcccaaactgcaggaactacgatcagaggacgccgctccacatcgctgctgccgagggcctgcaccttgttgccagcacgctgatagaatctggagcagacatacaggccaaagataggtggggaaacacgccgcttgacgaagggagacggtgcagcagcaaaccactggtcaggatactggagcaggctagaactgttgcgactaattga

SEQ ID NO: 10976 - DNA, 2175 bp, Oryza sativa
  Clone ID: TFbOSC900133j.C1.o17.fg
atggaggcaaatgctcctgctgtactgcccatggacgccaaactgatggtggccacagcccatggcgactgccagcagctgaaggatgtcgtgaacaaggaggatgctgccatgatggtgctggtgatggcgtcaagcaacggcacgccggcttccgccgcggcggcaagtcctccggtggccatgcatccgctgctgcacgcctcagcttcctccggggattggaagggtgtgaattttcttctcaacagggaagaagcatatgcagattcatctgttcagcccagtaaaaagtttctgaagtccctagaagcatgcatccccggcaactgcaccaacggaaggttgccgactccgccgcaagcttctaatgacatagaagaaggtgcaaacatgccattgttgttgtctcccgagtcgcttctggagggtgtcaccatcgagggagacactgcgctccatgtggtggccacacatggggatggccacaactacttgaaatgtgttgacacaatctgtgccaagggcaagcacctcctgtttaagccaaacaataaggatgatacacccttgcactgtgctgccagggctgggaatcacgaaatggtcaataagcttattggtctagctattggacctagtagaagggaggaaagtgttgacagcatagcgaataacctgatccttagaagtgataatctttctacagagacattcttgagcgatgatgtccgtgttgcagataatcttacagtcggagatagtattagcataagtgaggacaatgtccacaggggagtggaatatctcagaatggaaaatgacagtaatgaaacggccttgcatgcggcaattcgcattggtcatagtcctatagtaacggagctattgacatatgattctgaattggcgctatttccgcaagaaggcacatcaccattgtacctagctatcttgctgaagcaatttgacatcgcgcggacattataccagatgagtagacaaaatattctctcatattctgggccaagtggacaaaatgcattgcatgttgcagttctccgaagcagagttggtgagaaacggaccatcgagatttttgttcagaagtatcccagcagtgctggcctgcgcgataaaagaggaagaacatttcttcatgttgctgttgagaacaggagagtgaatgtagtcggctatgcttgcagaaatcggtctttccttatttttcagagcaccgaagaaatggtacgctttgtattgacacaagctggtgctatgaatgacagttgccgccacgatcactttagagaaaaacacaaagacactcacaacctaaaatcagatagtgaaagcaaagaattagaaaagctaaaggacgcaacggaaacaatggccattggctcagttctaatagcaactgtgacgttcggtgcaactttcgcattgcccggaggttacagagcagatgaccactcaaacggtggcacaccaacacttgttgggaggaccggagcggcggcgggcggagacggcggcgagcggcggaggcgcgggtgtggcgtggcggcctgcgagcagcagagacatgggagtggcggcggcaggcactggagtggcgacggcggtggcgcctgggctgagctccaccgcctcctcaccgacggtgaccaggcgttggagcaggaggacggcgggcggcggcaagacaaacaagcagcagcagatcgccaggagcggaggcggcggcggccgtggtggtacatggtccagatcaatgtcaaacgatggctacacaggaggaccatgctgcttctgagagacaatggcggcatgaattcactgtgcgaggataggtacatcaagctcacatgcctgggcactcatcgcatcctcatccattacgccaggcagatgcagtgcttgtactacaacgtcctcatgaacgaggttgggatggatagctgggaggagtacaccgagcaggacagggaggatgtccgggcgctgatagacaagatcgtcgatctctgccggagttcgattcccaggccgccgcacgacggttttgtgtggttctctctcttttgcgatttgtacttgtcgccagaaattgttttgatcttggaccttcaaggatctgaagacgaagacttgagggaagtcaccctttga

SEQ ID NO: 10977 - DNA, 1200 bp, Oryza sativa
  Clone ID: TFbOSC400284j.C1.o23.fg
atggcggcggcggcggagagcaaggcggggaaatcgccggaggagctcctctgcgcggcggcggagtccggtgacgcggaggccatcaccgggctcctcgccgaaggcgccgacccgacccacttcgatgcctccgggttgaccccgctgatgcacgcggccaccggtggccacgccgccgtcgtgcagcttctcctcgacgccggcgcgccatggaacgcgctctcccccacggggatctccgcgggagacctcgcctccgattccgccaccttcgacctcctcctcgaccacgccctccgctccgagctcgtcctcggcaccgtcgctcgccgccaagcggggcccgcggactcccccgccgagagctacctcgaatccagggtttcattcagcgaggagagggtgatggacgcggatagcaaggccgtgatgatggagtgggagcggccgctgatggaggcgcacgcgcgggcggtgtgctccggcggcaaggtgctcaacgtgggattcgggatggggctcgtggacacggcgatccagaggtacgagcccgaggagcacaccatcgtcgaggcccacccggaggtgtacgcccggatgctcaagctcggctggggcgagaagaagaatgtcaaggtcgtgttcggacggtggcaggacgtgctcccgcagctcggctcttatgatgagttgtcggtctcttgttttgaagggattgcaaagcaggatttctaccttttggattcgtctcagatttctgcagccagtgataaatatgatgctatactcaataaaatcattgcattggataattcagtcctccttattcattactatccaaaaatgtttgttcatgtttatttcattacaaaacagcatggtatattcttcgacacctatggagaatactacgaggatatgagagagttccaccaacatcttcctaagctattgaagcctggagggatctactcgtatttcaatggcctctgtggcgataatgccttcttccacgttgtgtattgccagctcgtagcgttagagttggcaaatcttggctactcgacacagttcatcccgctcccagtcaaagattgtctttcagaggaaatatggaatggggtgaagcagaaatactggcaattggatacttaccacctcccagtttgccaagcagaatcagaaccggagcaataa

SEQ ID NO: 10978 - DNA, 1881 bp, Oryza sativa
  Clone ID: TFbOSC414121j.C1.o6.fg
atggcgaaccgagaggagccttattctaccactggcggcactgctgcaaaagctcctccggtggcgatggacgccaaactgctgatggcggaatgccctgaagatcgcaaacttctcaaggagcttgtgcacaaggaagacgcttcgaagatgatggtggttttggcgtcaaccaccaaccagcctgctgcagagaagcctgcggcagcccgtgcagtaatgaatccgctgctgctagcagcagcatcctttggtgcttgcgaggttttctactttcttttctgcagagaagacgcacgagagccgctgccgacaatgacggctcgtgcatttcacgccatgcttgctggggacgcctccggcgccgatgggcggtggccgtcgacccatcagcaagctctcgacgaagtagaagaaggcggcgccggtgccgccgttgccgttggtcatcagtccactcgacggctaccaccacctgacgcgccgctcctggagggcatcaccgttgaaggtgacaccgcgctgcacgtggtggccacccatggtaacgccgccaacttcttggagtgcgctgaaatcatctgcaacagagccagacgcctactgttggcgactaacgacaagggtgacacggccctgcattgcgctgccagggccaggaggttggagatggcctctcgtctcattgctctagccaaagctagggaagaccacgaagtcgaacgtggccaagcagcatcgtttggcaaggtactcctgagaactgaaaatgagcgcaatgaaacagccttgcatgatgcagttcgcgccggagatggtgacatggtccggcggctaatggacgaggacccagatttggctttgtttccagtacagggcacttcacccttgtacctggctatctctctacggaatggcactattgctgagatactacatgagaagagcaatgggaatatatcctactccggaccacatggacaaaatgcactacatgctgctgttcttcttcgacatacagcggtgttagaactactattgaaatggaacagcaaccttacaaaacaaggagacgaaaatgggagtacacctgttcattttgccgcatcttttcctctatggcatcgaaaattccattggagacatccttggattattcgtgttccccatagtctctcgatgttgttaaacactggtgaggtagatccattctatcaatccgacaagaatggaatgtttcccgtacacgtcgctgctgccgtgggggcagaacttaccgtcgcttttttgctcgacaagtttcccaacagcgcgggtttgcgtgatgccaagggaaggacattcctctatgtcgcagttgagaaacagagtttagctgttgttaggttcgcttgccggactacgtcgttacagtggattttgaacatgcaagacaaggatggcaacactgcactgcaccttgctatccaggccaatcaccatcgattgttttgtgctcttttagggaatcctcaagtcaatttagatttaacaaatcatagtgggcatactcctctcgatttgtccagaaggatgcttcccagagggatgaaatatacggcgaacactgaggagctcatatatttgacactcaaacaagttggctctgaacactatcacgatcgccgggatcacatcgaagaaatctatagccgtcgtgtggtatcaaaagaggatctggccgaagaattagacaagatgcaagaatcgacacaaacactaggcattggttcggttctaattgtgactgtgacgtttggtgcaatgtttgctcttcctggaggatatagagctgatgatcacccttatggaggcacaccaacattttctgggaggtggtag

SEQ ID NO: 10979 - DNA, 671 bp, Oryza sativa
  Clone ID: TFbOSC19440j.C1.o1.fg
gccgacggaagctgttcacagatgaggagaaggttcttctgaacaagagagtacctgatcttgaagctgctacttctagcaagtggcttccacttcacacaattgcagcatcaggagatttctatctgttggacaatcttctaaaacataatattaatgtgaatgcccttgataaggatggtttaccagctattcataaagcaattctttccaagaagcatgccattatcaactatctcctaaggaattcagcaaatccattcatccacgataaagatggtgcaaccctaatgcattatgcagtccaaacagcatgcagtcagaccataaagactctcttgctgtacaatgttgacattaatcggccagatgattatggatggacacctttgcatctagctgtgcaaacacagagaactgatatcgttaagctactcttaataaagggtgctgatagaactttgaaaactcaagatggatttacccctttggagttatgcctccggttgggtcatcatgcaaggacgtatgaacttatcaaattactcaagagctttcgtctaccaaagcaacatgacccagttcagcacttggatgatagaggttgctccttgaagggaatcaacaggttgtggtatgcccatgataattggaaggccaaagttccatga

SEQ ID NO: 10980 - DNA, 1305 bp, Oryza sativa
  Clone ID: TFbOSC416913j.C1.o38.fg
atgcctccttccctctccctccaccaccacctcctcctcttccccttcccttcccatgtccaaaccctaaacccgctctccgcctctcctcgcctccacccacatagcaaatctctcctccccaggcgccgcccgctcgttacctctccctcctccttcgccgtcgccgccgtcgatgaattcgacgaggatttcgccatcggcgactgcgtcgtgttcgaggacgacgccttcgaggagcccgatgtcgacctcccctctccggcgccatcgaccacctcgcgccccaggcggaagccggccgcggaggccggcggcggaggggggagtagcctggtgccggagaggtggagggacgcggcggaggagataaacctgacgaagaaggagaagcgccgcatcgcgcacggcttgcgcttcgggagccgcctcgagcggcgggcgccccccgccgtggccgcgcccgatgagtaccgcgcgtaccgcgaggggaggctggacgcggagctcggacgcgtcgcgcgcgactaccccgagccgatcgagaggtcacccgtaccggatagagtggaggctccgccgcctcctgagcctggtgctcgtgtggcacctaggaatccgaggttggggctgggccgacggaagctgttcacagatgaggagaaggttcttctgaacaagagagtacctgatcttgaagctgctacttctagcaagtggcttccacttcacacaattgcagcatcaggagatttctatctgttggacaatcttctaaaacataatattaatgtgaatgcccttgataaggatggtttaccagctattcataaagcaattctttccaagaagcatgccattatcaactatctcctaaggaattcagcaaatccattcatccacgataaagatggtgcaaccctaatgcattatgcagtccaaacagcatgcagtcagaccataaagactctcttgctgtacaatgttgacattaatcggccagatgattatggatggacacctttgcatctagctgtgcaaacacagagaactgatatcgttaagctactcttaataaagggtgctgatagaactttgaaaactcaagatggatttacccctttggagttatgcctccggttgggtcatcatgcaaggacgtatgaacttatcaaattactcaagagctttcgtctaccaaagcaacatgacccagttcagcacttggatgatagaggttgctccttgaagggaatcaacaggttgtggtatgcccatgataattggaaggccaaagttccatga

SEQ ID NO: 10981 - DNA, 1698 bp, Oryza sativa
  Clone ID: TFbOSC403629j.C1.o29.fg
atggacgcaaagaaccaacaatccggcgacgggcagcagcgaccggcgcagcaggctgcggggatggacccggcgaaggcggcggcgcaggcggcgacgcggcggaagaagatgacgaagcagctgacggggaagcgggacgacacggcgctgcatggggcggcgcgcgccgggcagctcgtcgccgtgcagcagacgctgtccggcgcgccgccggacgagctgcgggcgctcctgtcgaagcagaatcaggccggcgagacgccgctgttcgtcgccgccgagtacgggtacgtggccctggtggccgagatgatcaagtaccacgacgtcgccaccgcctgcatcaaggcccggagcggctacgacgccctccacattgccgccaagcaaggggatgtagaggtggtgaacgagctgctgaaagcgctgccggagctgtcgatgacggtggacgcgtcgaacacgacggcgctgaacacggcggcgacgcaggggcacatggaggtggtgcggctgctgctggaggcggacgcgagcctggcggtgatcgcccggagcaacggcaagacggcgctgcactcggcggcgaggaacgggcacgtggaggtggtgcgcgcgctgatggaggcggagcccagcatcgcggcgcgggtggacaagaaggggcagacggcgctgcacatggccgccaagggcacccgcctcgacatcgtcgacgcgctcctcgccggcgagccgacgctgctcaacctggcggacagcaagggcaacaccgcgctgcacatcgccgcccgcaaggcgcgcaccccgatcgtcaagcggctgctcgagctccccgacaccgacctgaaggcgatcaaccggtcccgcgagacggcgttcgacacggcggagaagatgggcaacaccgagtcggtggccgtgctggcggagcacggagtcccgtcggcgcgcgccatgagcccgacgggcggcggcggcggcaaccccgggcgcgagctgaagcagcaggtgagtgacatcaagcacgaagtgcactcccagctggagcagacgcggcagacgcgcgtgcggatgcagggcatcgcgaagcagatcaacaagctccacgacgagggcctcaacaacgccatcaactcaacgacggtggtggcggtgctgatcgcgacggtggcgttcgcggcgatattcacggtgccaggcgagtacgtggacgacgcgggcagcctgaccccgggtcaggcgctgggcgaggccaacatctcccaccagacggcgttcctcatcttcttcgtgttcgactcggtggcgctcttcatctcgctggcggtggtggtggtgcagacgtcggtggtggtgatcgagcggaaggcgaagaagcagatgatggcggtgatcaacaagctgatgtgggtggcgtgcgtgctggtgagcgtggcgttcctggcgctgtcgttcgtggtggtgggaaaagccgagcggtggctggccgtcggggtgaccatcatgggggcaaccatcctggtgaccaccatcggcaccatgctctactgggtgatcgcgcaccggatcgaggccaagcgcatgcggagcatcaagcgatcctcgctcagccgctcgcgatccttctcggcgtccggcatgtccgaggccgagtgggtcgaggaggagttcaagcggatgtacgccatctga

SEQ ID NO: 10982 - DNA, 1875 bp, Oryza sativa
  Clone ID: TFbOSC400525j.C1.o62.fg
atggagccctcgtcgtccatcaccatcgcgtcgtcgtcctcgtacctctcgaacgggtctagcccgtgctcggtctctcttgcgccgccgggggcaggggcggtggcggcgcaggcggcgccggttgccgccggggagggcggcggcggcggaggaggaggaggaggaggagggagtagtagcgtggaggtggtgagcctgaatcggcttagcgctaacctcgagcggctcctcctcgattccgacctcgactgcagcgacgccgacgtcgacgtggccgacggtggcccgcccgtgccagtccaccgctgcatcctcgccgcccgcagcaccttcttctacaacctcttcgcggcgcgcggccgcggcggcgatggggctgccggcggcggcggcggcggcggtggtgggggaggggagaggactggggggaggccgcggtacaagatggaggagctcgtgccgggaggccgcgtggggcgcgatgccttcctgtcgctgctgggttacctgtacacgggcaagctccggccggcgccggatgacgtggtgtcctgcgccgaccccatgtgcccgcacgactcgtgcccgccggcgatcaggttcaacgtcgagcaaatgtacgcggcgtgggcgttcaagatcaccgagctcatctcgctgttccagcgacggcttcttaacttcgtcgataagactctagtagaagatgttcttccaattctgcaagttgcttttcattcagagctgactccagtgcttgaaaaatgtattcggagaattgcaagatcaaatcttgataatgtatcgttggataaggaacttcctccagaagttgctgttcagataaaagagattcgccaaaaatctcagccaaatgagggtgacaccgtcatttcagaccctgtacatgagaaaagggtcagaagaatccacagggcactggattctgatgatgttgagcttgtgaagttgcttcttaacgaatctgagatcaccttggatgatgccaatgcattgcactatgctgctgcttactgtgattcgaaagttgtttcggagttgttagacttgagacttgccaacttgaatttgaagaattcgcgtggatacacggcactccatctggctgctatgaggagagagccagctattatcatgtgtctcctaaacaaaggagcagctgtatcacaattgactgctgatggccagagtgcaatgagtatctgccggaggttaacaaggatgaaagactacaatacaaagatggagcaaggccaagagtcaaacaaagacagattatgtattgatatattagatagggagatgataaggaaacctatggcagtggaagattctgtcacctcgcctttgttggctgacgatcttcacatgaagcttctctaccttgaaaacagagttgcatttgcaagattattttttcctgcagaagcaaaggttgcaatgcaaattgcacaagcagacaccacaccagaatttggcattgttcctgcagctagcacttctggaaaattgaaggaagtcgatctgaacgagacaccagtaacacaaaacaaaaggctccgttcaagggtggatgcactcatgaaaacagttgagctgggacgtcgctacttccctaactgctcgcaggtgctcgacaaatttctggaggatgatttgcccgatagtcctgatgcactcgacctccaaaatggcacttctgatgagcaaaatgttaaaaggatgcggttctgtgagttaaaggaggatgtgcgcaaggcattcagcaaagacagagctgataatagcatgttttctatcttgtcatcttcatcgtcatcttcgccacctcccaaggttgcaaagaaatga

SEQ ID NO: 10983 - DNA, 522 bp, Oryza sativa
  Clone ID: TFbOSC401105j.C1.o1.fg
atggcggcgcggcgatctcgcctcgccgctccgacgtcctcctccgccgcggccgcttcgatgcagcacgagctcctcgaggcggcggccagcggcgacctccgccacctcaagaggctggtgcgggcgctggataaggtcaggggccgcctccaggaggtggtggaggcggcgaggacggacggcggcatctgggcgctgcagctcgccgcgggcaacgagcagctggaggtgtgccgctacctcgtcgaagggctgcgcgtggatgtgaacgccgccgatgatgagggtagaacacctctagtttttgcggtgatcggtgaaaatgctgctattgtcaagtaccttcttgatcatggtgctgatccagacaaagctgatgatgacgggctaacccctctacattccgctgctggaataggagattgtgaaatgatagaaacgttgctggcaaagggggctgatattgatccggtagctgatgaatgtgggacgccactacatcttgctactaaggaatga

SEQ ID NO: 10984 - DNA, 1356 bp, Oryza sativa
  Clone ID: TFbOSC900134j.C1.o1.fg
atggcaaaaactctggatcgtttaaaaccaaagaagaaacaaggctctgataccacttgtaggatcaaaacacaagaactaagccaaccagaggaggggtcaatggttgctatgcccaaaaacccaaacttattgcggaataaaaagttaccctcaaattcgacgaagatcggtctgaccgagattgacctggcgctagatgattttctgaacttggtagctactcctacagtacctgccactctatcaccatctcctgatggcctcaagggtggccctgcgagcaacaacggtttgaatacaaccatggggacgcagcaggcttcttcttcttcttcttctgctgctgctgctgctggagaagagcgtgcttgtgtcatcctgtacaaccctgttcaaagcccgtcgataccagggctggcaaggttaatggtttctcgtctgattggtctggctaaaaccgaggatgacaactctggttgcggctcgagcctgaagcagctcctgagaaaggagaactaccttcatgagacggccttgcaggatgcagtgcgcagtggaaataaggaaattatcaccgagatacttgaatttgatccagaattggccagctcaccgatggatggaacaggaacttcaccgatgtacatagctgtcttgcttggccgtgtcgacatcgcaaagttattgcatgaaatgagtaaagggaataatccttcgtactctggcccagaaggacagaatgcattacacgcagcggctctacaaggcaaagatagcaagcttgcagtcgcctatttgattaaggagcgacctgagatcgctggtttccgtgattctaagggaaggactttccttcatgttgctgttgaaaggaagaagtcagatatagttgcgcatgcttccagtattccatctttggcctggattttgaatttgcaagacaatgatggcagcacagctatgcatgtagtagtgcagcttgcgcatatcaaaagtttttgttctctattgaggaacacggaagtaaagttaaacataccaaacaataaggggcagagtcctttggatgtatcgcagagtaatattccaagagggactttctatgactcgaaaaataaccctgaactacagattgcgagggcactaatagcatgcaatgcaagtactggtcgtcggatggatctctttctggaacaacgacaaaagcaatcagatgaaaagacggaatcagagaaaatgacatattcaacacaaactctgggcgttgggtcggtgctgattgttactgtcacacttggtgcaatcttcgccatacctggaggttataaaggtgacgattgttacataagttag

SEQ ID NO: 10985 - DNA, 726 bp, Oryza sativa
  Clone ID: TFbOSC900390j.C1.o16.fg
atggagatcacacctgctggcagcgaccatgagattcctgaacacctatccatgtgctctaaactttacctcgcagcatttcgcggctacacagatgaggtctgcaatctcttagccggaagcagtggcgccgccgtgcagccggcgaacagctcgccatcgccggcagcgcaagaacgtgctaatcaccaaggaccctgcagcattcgcgaggttaccgcagagcttcgcacgcttctccacattgcagccgggcaaggacacgacgacctgatcgccgagctgtgccttcacgacagcagcctcctctcctcggccagctcgtcggggcacacgccgctgcactgcgcggcgagggcagggcacgccctcgccgtccgggccatctcgctgttggccggggcaagtgttgaggaggacagggtaagggacgtagtgcgcagcaagaacgtcgctggggacaccgcgctgcacatcgccgcgaggcacggccatggcaaggcggtggaggagctgatggaggtggcgccggagaccgcgtcggagctgaacggcgccggcgtgtcaccgctgtacctggcggtgatgagcaggtcggtgcgcgccgtcagggccattatctcgtgcagggatgcgtcggctgccggccctaattctcagaatgcgctgcatgccgcggtgctccaatgttcagattttcaactaatattcacacgtgttaattaa

SEQ ID NO: 10986 - DNA, 753 bp, Oryza sativa
  Clone ID: TFbOSC12219j.C1.o1.fg
atgaatcctaagctgctcatggctgctcgacatggagacatcgagaccctaaaacgcctcctcgccgtgaacacagcacagccaccgccacaagtcgtcctccaagtcgaccggcctgcggcggcggcgccatctgcagctgcgaacacgctcctggagggagtcaccagcgaaggggactccgcgctccatgtcgtggcggcagcggcggtggcggcggcatgcggagacgacgacgacgacgtgttcctcgactgcgccggggtgatccacggggcagccaggcacctcatacgtgcccgcaacagcaacggcgacacgcccctccatcgcgcctccagggctgggagcgttaacatggtccgccgcctcatcgccatggcaaaagacgaggccggcgacgacgaccacgacgaccacgacgacggcggcgaacggcggagacagagggcggcggtggagctcctcctgagagcgcagaacaagcgcggtgagacggccttgcacgaggcgatccgctcgaacagcagggatctcgtcgtcgacgagctcctctcccacgatccggagcttgcccgtgttccaggagaagaaggaggcacctcgccgctgtacctggccatctcactgcgacggtttgaggttgcgaagaagctgcacgagagggacgaacagctgtcctactctggacctcaaggccgaaacgctttgcatgtcgcggtgctcattggcaaaggacttaaatttgggtga

SEQ ID NO: 10987 - DNA, 1326 bp, Oryza sativa
  Clone ID: TFbOSC401247j.C1.o9.fg
atgggcgaccccaacccgagcttcggcttccgcgtgggcctcgccttcctccgcgcgctcccgtacctcaacgacggcggcccgcagagccagttcttcgaggcggccacccacggcgacgtcagccgcctcaggggtgagcatggcggctggtcacgcttagcggcggccggtccggtgctagccttctcctgggcttgtgtgttggcgatgtcgaacttcgcaccgtctcgtgcgagttgttcaaaaaaaaaagagttggcgagcggcgaggacgcggaggggaaggcgaggcttgccgacgacatcagcttctcgggcatcgggccgctccaggccgcagcgcgattgggggaagtggacgcgtgcaggtgcatggtggaggagctcggcttcgacatcaatgccggcagagagcttgggcatgatgaagtagaacgactgttgctatctagaggagctagcgttgatatagcttattttcatgggacaccactacatattgctgctgcatatgggaaggccagcgtcatgaaagttttattggagcacgatgcagatgcaggtgctgacattaacttcagtgatcgtgacactccgttggtggtagcaattactaatggcttgactaactgcattaaatacttgctaaaggctggtgcagaccctaatatcccaacttgtcattgtggtgccttgccaatacaacttgctgcaagctatggaagaagaaaggatgtggaattactgtttcccttaacttcccccattcgagctgtgtcaaactggactgttgaaggaattcttgcccatgccaaatcaaagcatgccagatcaaaatgttcaaagcccaaggacaagcaggatgatcataataaaaaggctcagttcaaactacgtggtgagaaagctattaaggacaagcatgatgagcaggataaaaaggctcagctcaaactacagggtgagaaagctgttaagagaaaggactaccatggcgcctcaattttctacactgaggcaattgagctggatcctactgatgcaacattgtattccaataggagcctttgccatcttcaaatgaccgaagctttgtttgatgctgattattgcataaaatcgcggcctgaatggttaaaaggttactacaggaaaggggctgctctcatgttgctgaaggagtatgaaaaggcatgtgacgcattcttggctggactgaagttggatcctttgaatgctgagatggagaaagtattccgggaggcggtcgaggcgatgaagaagcatcatgttactacaaaaagcttcaagccatcagattag

SEQ ID NO: 10988 - DNA, 1689 bp, Oryza sativa
  Clone ID: TFbOSC401323j.C1.o1.fg
atggatccacggctgcacaaggcggcggtgcaggggaacacggcgagcctggcggcgctgctgggggaggagcagggcggcggcaagatcctcaactcgacgacgccgcaggggaacacggcgctgcacatcgccgccgggctcgggcgcgtcgcgttcgccgaggccgccgccgccgagcacggcgacctcctcgtcgccaggaacgaccagggggacacgccgctgcacctcgccgccagggccggcaagatggccgtcgccgacatgctcatcaccttcatcaccatggctgggccttgttggccggaggaggagccactgatgatgatgaacaagacacggaacacgccgctgcacgaggcggtgaagcagcggcggagcgcggtggcgctgcggctgctggaggcggagcccaactgcgggcacacgcccaacgtggacatgcagacgccgctgcacatcgccgcccgcgagggcctcgccgacgtcgtcgacaagatcctcgaccagccatgggtccccgagaagttcgtcaccgccgacaacgtcagcggcaccgccctccaccaggccgtcctcggcggccacacccgggtggtggagatattgctgatgaagacggcgccggggctgatcgacctgacggacgccgtcggcaacacggcgctgcacttcgcggcgcagaagaacgacaagcgcatggtgcggatgctgctcgaccacaagcccgacctcgcccaccgccgcaacgagcggcagcagtcggcgctccacgtcgcggcctactacggctcgacggcagcggcggcggagctgctccggcacagccccgacgcggcggagatgctggaccgggagggccggaacgccgtgcacgtcgcggtgtcgagcggcaaggtggacgcgctccggtgcctcctcggccgcgtccgccccgccgaggtggtgaaccgcggcgacaactccggcgacacgccgctccacctcgccgcgaagatggcccgcatcaagtcggcgctgatgctgctcagggacccccgcgtcgacccctgcctcctcaaccgcgaaggccactcggcgcgcagcctcgtggaggagcgcgtcgccggcggcgagatggacgcctacgtcgtctacctctgggagaagctcaagaagtacgagtcgcggcggtgcaagaaccagcagctgccgccggtggcgacgtaccagtcgctgcgcagccggcggccgggctccggcagcaacgacgagtacttcgagctcagcgtcggcacctacaccctcgtggccaccctcatcgccaccgtcaccttcgccgccacattcaccatgcccggcggctacaaccagaacacggggctcgccatccacgccgacagggcgccgttcaagatcttcgtggtgtccaacaccgtcgccatgtgcagcgccatcgtcgtcgtcttctgcttcatctgggcgtggagggaccccgtcaagttcaagctcgaccagctcacctggggacaccgcctcaccgtcgtcgcctgcctcgccatgatcgtctccctcatgacgtccgtctacctcaccgtcctccccacggagcggtggctggcgtacctggtcatcgccatcggagcctgcactccggccgtcgtcatactcatactgcgctgggaggtgttctacgtgccattgtga

SEQ ID NO: 10989 - DNA, 129 bp, Oryza sativa
  Clone ID: TFbOSC28368j.C1.o1.gm
gttggtgctgacatgaattttagagactccaatggcgttacttgtgtaatggttgcagcaaatcatggctcttctgtcatcatgaagtgcttactagatgctggtgctaatccaaacattccagatgaa

SEQ ID NO: 10990 - DNA, 1551 bp, Oryza sativa
  Clone ID: TFbOSC409418j.C1.o2.fg
atggcagcctgtgcagccagtactgcaaccatagattgggagctcctggaagcggccatatctggtgataccaggtcaatgaagatgaagtacatggattcacatgatcctacaattctgcttggaaaaaatccacaaggaaacacatgtcttcatatatcttccatgtgtggccatttggaattttgcaaagatgttctttcacttccacaggatccaaccgtgaagaagaaactactcactactgtgaatgtgatgaatgagacgccactgcttactgccataacaagtggccatgttactttagctgcttttctactcaaatactgccatgaacaaggattcagtgaggtaatcttgaaacaggacaagcacaaatgtaatgcactgcaccatgccatttgcaacggccacaaggacctggcactggagttgatagcgactcagcctgccttgtccaaagatgtcaacaaatacggcgagtctcccatgtacattgcgttgatgatgagggattctaagtttacagatatttttgagaaactgttgggaattgatggttcttctcattcaggaacctatggctacaatgctctccatgcagctattagaaatggaaatccagatattgctaaaagaatcatcgttgaacgcccaaatctggccacagaagaaaataaggatggtaatactccaattcagctagctatgctccatattgcaaaaaagatgggtggacatgtcttcataaagctgtcaaatcagaaactcgtgaacatgcgtagcagcaaggggaaaacagctctacattatgccatccagaagtgtgatccgaaaattgttgctgctttacttgacaagaaaatagacttgacaattcttggcagtgacggtaatgcagccgcttgggaawtacgggatgccttggatagtgcgaagacattaaactggaatgaagtgtcaatgcttatgattaaagctgatcctccaaatgcaaaatccgtttataatcttcacgaggaagccaaagaaaagttgatcaatgcgtcaaggaaggatgcaaggtcgctgactcaaacatacacaagcaacacttcgctagtggcgatcctcatcgcaacaattacctttgctgctgctttcaccctgcctggaggatacagcagtgatgctggaagccagggacttcctataatggcaaggaacgttgcctttaaggcattcttgatatcagataccttagcaatgtgcgcctcacttgctgttgcgttcatatgcatcatagcaagatgggaggatctcgatttcttgctttactacagatccttcaccaagaagcttatgtggttcgcgtacatggcaacaactacagcatttgcaaccggtttatacacagtattggcccctcggctgctatggttagctgttggaatttgctctgttgctgttttagtgccaattctcactaaggtgctcggggaatggcctgtcttaaagctcagaattcggttgggccaagctttcaaatcagagttccttgatatggtctga

SEQ ID NO: 10991 - DNA, 782 bp, Oryza sativa
  Clone ID: TFbOSC421303j.C1.o1.fg
gagattgtggaacagtacagctattgcttgcaaaaggagcttgtgtggacacagtcgcaaaccgtggcacaccacttcatgttgctgctagtaaagggaaagatggtgctatgaagattttattggaccacaatgcagattcaggagttcagattccagaagttctgatttttgtgtcatcatttaacaagatggtagatggtcatctgacacctctagctactgctataactgctggtgaattgaaatgtgtaaacctcctgattgaggctggtgctgttgtcagtggagactgcatctcaactgctgcaaagggtggctcaaatgagtgcaattactcaatggaagagactggtgccaaccgtaacatttctgataatggtgagcctgtcagtaaaaggaaagcaacagagttaaagtcattggggaataaggcggtcgagaaaaaggattatctttctgcaacaggattctacagtaaggcactggacctttaccctgatgatgcaaccttgttctcaaatagaagcctttgctggcatcacatgggtaatggaggcaaggctttgttggatgcttatgaatgcaggaaattgcggcctgactggccaaaggcctactaccgacagggtgctgctctgatgctactgaaggactacgagagtgcttgcgaaacactttacgatggattgaagttggatccagggaactctgagatggaggatgcattacgggaagctctggcgtccttgaaggcatctgcaagcacagaggctaggtga

SEQ ID NO: 10992 - DNA, 1149 bp, Oryza sativa
  Clone ID: TFbOSC420016j.C1.o2.fg
atggggcagggcgccagctgcgggcggcccagcgaggaggtggacttcttcggcgcggcgcagtcgggcgacctcgcccgcctcgccgccgccgtccgctcccgcccttccctcctcggccgcaccacgctcttcgaccgcctctccgccctccacatcgccgccgcccacggccacctccaggtggtgtccatggcgttggatctttgcgtgcacccggacgtcgttaaccgccacaagcagacggcgctgatgctcgcggcgatgcacgggaggaccgagtgcgtgcggcggctgctcgacgccggcgccaatattgtgatgttcgattcgtcgcacgggcggacgtgcctgcactacgcggcgtactacggccacgccgactgcctacgggccatcctctcggcggcgcagtcggcgccggtgtcgcaatcctggaggattccgtacgaggtggcgatgaagcgagggcacgtcgcgtgcgccgcgctgctgaacccgtcgtcggcggagcccctggtgtggccgtccccgctcaagttcatcagcgagctcgagccggacgccaaagccctcctggaggcggcgctcatggaggccaaccgggagagggagaagaggaccctgaaaggggccaggagcgcgtcgccgttggcgttgccatcgccgtcgcgttcagacgacggcgcgcacgacgccgccatctctgaggaggcggcggcggccggcggcggcgaggtgtgcagcatctgcttcgagcaggcgtgcacgatcgaggtgcgggagtgtgggcaccagatgtgcgcggcgtgcacgctggcgctgtgctgccacgcgaagcccagcgcggcggcggcgacgccgtgccagcagccgctgccgacctgcccgttctgccgcggcggcatctcccggctggtggtggcgacgaccaagaccagagcaggcggcgacgacgaggaggacgacgaggaggcgggcagcaggctggcgtcgccgctgcacaggaggtctcgccgggcggtgaaccaccccagcggcgacggcggcagcaccagcagcatcatgggcagcattgcgtcgtcgatcgggaagatgggcagacggcgaaccgacagcagcgaacacgtcgacgtcgacaagccctag

SEQ ID NO: 10993 - DNA, 1207 bp, Oryza sativa
  Clone ID: TFbOSC413853j.C1.o1.np
acatgaatgggcgaaatgcgcttcacttggctgcaagctatgggcatctggagatctgcaagttcctggtggaggaatcgggccttgatgtcaactcaggctctcacagaggtgcgtgcacatcaatgatttctcgcgcattgggaggatgggaggattcctatcatgatggcagcagctcgtgcctagggcatgatgaggctgtaagactattgctgtccaaaggagttcatgtggatcctctgaattatcgtggggccccactgcacttggctgcctcaaaggaccgggttcaagccatgaaggttctgcttgaacatggtgctgatgtaagtggtggttctcgttgttatcagttgtcaatcatatcttttcaccactcatgatggcatgctgcgggcactccttgaaatgcgtgaagctacttgttgaggctggcgctgatgtgaacggtaatagtaccaatggacctacccctttaactgaagcggttgatgacagtttaaccgatgttgtcaaattcttggtaggggctggagctgaccctaacattcctgacgagcaggaagggaggattcctatcatggtggcagcagctcgtggtcaacgagagcttgttgaaattctatttcctcggacaaaacctattccatgtctgccagattggaatgttgacgggataattagaactatgagaaccacacgtattgaacctcaggtatgtagtcctgtggaagaacaagtgtctgatgcaaagtcgaaaggaaaggaagcatttgcaaagggtgactaccttacagccatctacttctacaccctggcaatggataaatccccacttgatgccaccttgtttgccaaccggagcctttgctggctgcggcagcgagaaggggacagagctttactggatgcacagcagtgcaggatgctgcgccctggttggtccaaggcatggtaccgtgagggcgcagctctcagtttcatgaaggactacaaaggagcagtggacgcattcggggaggcactgaaacttgaccccatgagcgacgaggtcaagaacgcgttaagggaggcgatcgagtgtctgaagagagctgcttgatctgaagatccgaataacccttgagcagctactgcatcgtccttttggcctcacctcacctgtcagactgcttcacatctttccactgtaactaccaacgac

SEQ ID NO: 10994 - DNA, 611 bp, Oryza sativa
  Clone ID: TFbOSC100876j.C1.o4.np
ctgtgctgagagccaacccagttcagttgtataagcaagactctgaaggattgtaccccatacacgtcgctgcctcctccggtgccaatctgacagtcaagtcctttattagagagcgacctgagatcgctggtttacgcgattctaaggggaggactttccttcatgttgccgttgaaagggaaagatggaatgtagttgtgtatgcttgccatactcaatcgttggctaggattttgaatatgcaagacaacgatggaaacactgcattgcacatagcagtgaagcatgggaataaggctatcttctgttctctactgatgaataaggaggtaaacttaaatatatcaaataataaggggcaaactgctttagatatatcgcagagtaagattcttgcaggattgtttgctttgcagaaccctaacaaactgatattgcgggcactaacgttttgcaatgcaagaggtggttgtcgtcgggtagatcacctgcaggaacaatatattattcatcaaaaacaagtagatgaagtgagggaatcggacaaaatgacaaattcaacacaaactttgggtattgcctcagtgctgattgttactgtcacgttt

SEQ ID NO: 10995 - DNA, 606 bp, Oryza sativa
  Clone ID: TFbOSC400368j.C1.o21.gm
atggagcctgatcagtggcatggcaatggcaaaggcctttctccatcatgcagatgcaggggcaagctagcagacatgccttgctcttgtggggtaatgaagcactgggcagacatagaggaggcgagctacggtggcggcggcggtggcggcggtggttctcctctctttgatgagttggcggcggcggcggggaggaggagcatctccggcgccggccgcctgaagatccctgtctccgggaaggaggggagacgcatcatggggctcttaggtatggtgggcgactcattcggttgctcagctactggtgagcggcttgtctctgctgcaagggatggagacatccaggaggctatggccctgttggagcttaacccccgacttgcgcgagctctccggaggctaataaacaacaagtctgatgggggcgtcacaccgcttcacttggcagcccttcatgggcatgctgagtgcgtgcaattgctgttagaccttggagcctctgtttcagaggttcaggaagcacacctctccactatgcggcctgtggtggaagtgctgtatgctgtcaaccggagcaaacatgagagctcaaaatactaa

SEQ ID NO: 10996 - DNA, 1983 bp, Oryza sativa
  Clone ID: TFbOSC415431j.C1.o4.fg
atggcatcgccggcggcggagacctcgccgccgtccaccccctccaccgcatcttgccccaccccgcggccggatgcggcggcggcggcgccaagcatgagcccctcgctgctccgcgccgcgcgcagcggcgacgagcgccggttcgtgaaggcgctcctcgccgacccggccgccccggacctcgacgccgtcgccaccgcgggggggaacacgctcctccacgtggccgcgtggggggggcaccccgcgctcgcgtcgctcctcctccgccgcgccccgggcctcctcgccgcgcggaacgcggcgctcgacaccccgctccacctcgccgcccgcgccggggcgcacaaggtcgtcgccctcctcgtcgccgcgttctcctcctcctcctcctcctccgccgccgcggatgcctcctccccgtccttgcgcgccctcacccgcgccaccaacaggcgcggcgagacgccgctccacgacgcggtgcggggcgggcacgaggccgcggcgcgcgcgctgaccgccgcggacccggggctcgcggggctgtgtggcggcgcgggggagtcgccgatttacatggccgcggcggccggatcccttggcatggtgcgccttctcacaaagacttacaggaacgacgaggaggaggaggaggaattgcccgtattgtgttcgtgcactggcccgggcgggcgcacggtgctgcacgctgctgtgctcacgagcaacgtaatagaaatgacacagggattgttgcagtggaacccaacacttgtgaaagaagtagatgattctggaagtactcctcttcattatgttgcatctgttggaaatattcctgcgttgaagctgttattgggatatgatacatctccggcatatgtcccagattcaaatggtttatttcctgtacatattgctgctaaaatgggatatggtcaactgatctatgaactatcaagatacttcccagattgtgatgaaatgcttgacagcaaaggaaggaacttcctacatattgctgttgagcacaagaaatggaaagttgtttggcatttctgtggaacccaagaacttgaaagaatgttgaatgtcatggattatgaagggaatacagctctgcatcttgcagtcaagaatgctgaccagatgatagtgagccttctgatggcaaataaagctgtattgccaaatatagtgaacaaccaggggctcactgccttagatcttgccgtgttggcaactgacaaaggaattagttatacactgaatccacaggtcattatacttcgctgtttggcatggacgggagctgtccttagtcctcgtcgcttggatcatttcatagatgagtttaacatcgggaaagcttctggaaatgaactaaagaaattcaccaacatttcacagaacttagtagttggttctgtgctgatctccacagtcacattcgcagcagtgttcactctgcctggcggttacatatctgatggtcatccacatgccggtgcaccgattttatggcacagatataccttcaaggcatttgtgatggcaaacacccttgcatttgtgggatccacgctgtccaccatttggctcacttatgctggttcagagcatgtccacccactgctccgggcactctacatgttcttctcagtgatttcgatggagcaggcgacgagaagcatggtggcggcattcgcactgggagcatatgttgttctgagcccggtcagcgagcggatcgcccttgtgctgtatctcctggcactcaagctcaagtcgatcaccgtcgggcttccaccattgcttcagaccgtgcccgtcaccgtcaatgctcgagttcttccacaacctcgccgatggcaggagatgctgcagcgctccttctcgtcgtcgccgatcaaggagaagaacatgccaaagtacgacagcatctcattgtcgtcatctgcacctttctcgaagtag

SEQ ID NO: 10997 - DNA, 477 bp, Oryza sativa
  Clone ID: TFbOSC400431j.C1.o7.fg
atggcggcgccgttcgtccgccgcccgaccgatgacggcaccagcggcaccagagaagatattataaagagccttgatatggggaaaggaaaggcccgagatgcagtcttagctcgtaaaaaggatgggattgggttgctgcatgccgcagcatgccagggccatctgactgtttgcaagttcttgatggaggaattggggggatttatagctcatctcattcacgctcaggatgctgctggtgctgatgttaataacaagggtacaggtataactcccttaatgtttgccgcgttgcaagggtgttatacttacttcatcaagattctcctggagactggagcaatccctaatattcccaatgttttgggttggttgccagtagagcatgttgcatcatgtgattgcagggaaggagttgaaatgctatttccattcacatccccaaattccaaatgtcccaaactggagtgttga

SEQ ID NO: 10998 - DNA, 1641 bp, Oryza sativa
  Clone ID: TFbOSC900398j.C1.o6.fg
atgcaacctgtgaggattcaggcccatgacgataagatcatctgggcgaagtcccatggcgaagactatgaagtagagatggcgaaggctgaagaatcgcgttggtatctggcaagaccaaatgcatcattgggcgaagggtgtatgctgaaggatgggggcttcgccataacaagcccaactttgaagaggcccaaggggccatcccagccgcttaggcctattccagacagcaaagcaaccgcagattcgccagtgatggacagaggtctgctgaaagcagccacatcgggtgtgaagccggctctgcatgacccaagccttctgcttggaaggacagtgcaggggaacacctgcctccacatagcatcggcccatggccacgaggaattctgcaaggatatcttgatgctgaacccgtccctcctctgcactgtaaacgcggatggcgagacgccgttgctcgccaccgtaaaaagcggcaatgtcgctttagcttcttttcttctcagttactactgccgccgccatgacgatcttgatacgagggaggcgatggtgaggcaagacaagcaaggatgcaacgcgctgcaccacaccatccgcaggggacacaggaagcttgcattcgagctgatagaaaaagagcctgccttgacgaaagctgttaacaaacacgatgaatcgcccatgttcatcgcggtgatgaggaatttcaccgatgtgttcgataaactgttggaggttcctgattctgctcacggtggaacctccggatacaatgctctgcatgctgcctttagaaataacaatactgatatcgccaaaaagattattgagactcgtcctaaattggcaagagaagagaacagcgcacgggttaatccaatgcaatttggtgtgcttgagaacaagattgacgtgctaaaagtattgttggaacatgatttctctttaggatatataatcagcacaagtggtatccctcttcttggtagtgccgcataccagggccatgttggtgttgctatggagattcttaaacattgtccagatgctccatttctagttgaaaacgatggcaccacatgtctccacatagctgtacaaaaaggtcacataaagtttgtggaatttgttttgcagtcaaaggagctgcggaaactcattaacatgcgagacagaaacggtgaaactgcccttcattatgcaatccggaagtgccatccgaagatcgtcgctcttttactgcaatgtaaagcccaggatgtcacagtgctcgacagcaacggtaaccccccaatctgggtaccaaatgatgccgccgaccatgctaagacgctcaactggagtgaagtctccatgcgtatgttgaaagctgacccggaagacaaaggtgaaatctataatcttataaaaacaatcaaagatcaagtaactgagaaagcaaggaaggatataaggacattgactcaaacatacacaagcaacacttctttagtagcaatcctccttgcaacaatcaccttcgccgctgcttttaccttgcctggaggacacagtaataatgctggaagtgaggggcttcctaacatgggtagaaagcttgcatttcaggcattcttgatatctgacacctag

SEQ ID NO: 10999 - DNA, 1401 bp, Oryza sativa
  Clone ID: TFbOSC400144j.C1.o1.fg
atggcgtcgctctctcgcgtgcctcctcccgcccgcggaagccgccgccggccgcccccgtccagccccgtccccctctccccgcggcaggagatgctcctcgaggcggcatccgacggcgacctcggcttcctcaagcgggtggtgaggtcgctggacggagggaggggccgccccgcggaggcggtggaggccgtgcgggagtgcggcgcgggcgcgctgcacctcgccgccggcgcggggaagctggcggtgtgcagagtccatctatatactaaatttgtgtttagcgcattgttaggaaagcaactgctacatcagtcccaattctcaaaaggaccttcatcgggaatggaggagatggaaggtgaaacacctctggcttatgcagtcaatggtgcaaatgtagctaccgtgaggtaccttcttgaccatggtgcccatccagaaaaagctgataataaaggattcacccctctccattttgctgctgaagaaggatattgcaatgtagtggagctcttgcttgctaaaggggctcaagttgattcgatgtctgttcgtggtacaccactacatctggctgctactaatggacaacatcgtgtagtgaagattttattggaccacaatgctgattgcaataagattgtatctgctgtctacactcctctcctcgtcgccatttatggttcatcactgaaatgtgtaaagctgctgattaaggctggtgctgatgtaaatggtgttggtaatataacccccttaatagcttctgttggctcaactgagatcatgaagtgcttattggaggccggtgctgatcctaatgtccctgatgaattcggcaggatgccaatagaatttgctgtgcgatgtggtacattgaaagatgtcaatatcctatttcctttgacatctcctatgccgactgtacctgattggagtgtcagaggaataatccgtcatgtgaacacactgccagggcaaaaggactatgagagtggccttgaaaaagaagtggctggtttgaaattacaaggagttgaggcactgaagaggcaggattatcttgctgcatcagacctatacactaaggcgctttgcctcgacttcaatgatgcaaccctgtattcaaacaggagcctctgctttcttcacatgggtgatggagacaaagcttatggggatgcctatacttgtaggatgatgcggcctgattggccaaaggcctgctatcgccaaggagcagctctaatgctgctgaaggaataccaaaaggcgtgtgatgctctcctcgatggtttcaaaatggacccagggaactctgagattgagaacgctctaagggaggcgatggagtccttgaagatatctgatggtgctaagctgacaacctga

SEQ ID NO: 11000 - DNA, 3399 bp, Oryza sativa
  Clone ID: TFbOSC402545j.C1.o5.fg
atggatcgcgccaaggcagcggcgcgcgaggacaaggcggcggcggcggcgacggggaaggagaccgccgtgtcccgcgccgtcgcggaggacgacaccgcgctgctgctcgcggcggtgggaagcttcaggaaggaggcgatgggccgtctccggaagggctccgacgcgtcgcggatgctggaccaggagatgtccacgaggctgctccacctcgcctgcaagcacgacgccgtgcagtgcgccaggctcctcctcgagggagggcacggcatcacggcgtcgcccgtggacgccagggaccagctcacgcggacgccgctccaggtcgccgccgaggcgcactcggcccggtgcatcgagctgctgctctccaagaacgcgcgcaccgacctcaagctggtcgatggccgccctcttgtcgcgctcgagatcgctctcttaagcagaagagctcaagttaaatggtcactggacaactccattgaagatcttctgtcatctctgcaagaaaaggatctgaatgcagtgaggctcctggcagagaaaaccagagaggttggggaggtggcctacagatatgccatggaaggtcgtgttactgtgttggcaatgctgcttctggtggctgaagagaagatatcggcaccagtcagtgtagttatagagggcgtcaggacaaagaaatcaatctactactctattgtggatgaggctctgtccattggggatgctccagcccgggacagcaatgagaggagaaaggccctgctcagtgagattcagctacttaaccaatttggggcagcgttatggagagatcgcaacattgacaagagaagcttgccccctctgcttaaagctgccaaggttggagatgtaaatgtcacaaagatgctcctgatgggggatgttgatgtcaatgaagccgatcctgaagggaacacggcacttcactggtgccttagtggtagctcaagcacacaggagccaaggattgtgtggctcctgctgaagaatggtgccagagttttccaggggaacaaacttggtcttacaccagtacacagcgctgcagctaagggaaattataaagctcttcagtcacttctgcttcatgctcaagattgtgttgatactccttccaagaccaaagaaaccccattgttcttagcagtgaagaatggttctttggactgtgtaaagcttctcctgcgttctggggctagcaccaaagtccagaacctaagaaagcaaagaccaatagacgtggcaacgtcccaagatatgcgtttcattcttacctctgcaaatgtggctccatggaaccgtagctcacatccaaaaaaaagtgtgacgaataaggaaagctgcaaagagttcctggaagattttggtgattatgacagtgatgatttaaatgaaagctttactgggcttaaaacatcagcaagccatcgggatttccggtctagtaatggttctgcccaagggggcaagagtaagaaccattgtgctcccaagcaaggttccaagtttgtgcctcggcctaatcattggccgaagcacgactacactcggaaaatttttgttgggggcctcccaccttctgtgggcgctgagtacctcactgagttcttcactgctgaatttggacctgtggaggaagcagtagtcattgggataaggatgggtgatcgggtgcaatctcgaggatttggttttgtaaagttcaaaagagaagaggatgtgataagtgcaaaggaaactcatcatgtgtacatgcttgggaagagagtggaggtaaaggatgctgttgctagaggatccttgcctgcagaaatccagaaaattgctccattcaggcaccacagccaggaggttccaaaggtaactcaccatctgttggatggtgagctaaaggaggaacattacattaggaagcgccggcccttgccagagaagtgtcttccatcttggttctttatattcaggaagtggttgccaggatttcttgcagatgctaccgaacgacttggagataggtacccattgagctccctgaagggtgatttcagagcaatttgcagaatggagcttgatcatggcacacttggttatcctaagctcagtgatttcatgcgttcccttcctggtatctgcagaatgtgtgtagtccctgtaggaagtggtcctgccacacacatggtcctccttccaccggtctcgcgaccgaagtatgtacccttgctggaaccattctcttttgatcatgatgagctcccagaatcagtgtcagatcatcagtccccgaggtctccacttaccactaatatcaccgaggactcccctcataacacagacagtcagcagggtgatacttgcagtgagagcaatgtgcagagccatcagggcgatgagtgctgcgggagcaacactgaaagccagcaggatagtgcttccactgacaatggtagcttactgggtgaagttactgtcagtaccccaaagcctgattccattgagtccatacctacaggaaagtctgatttgattgagcttgtacctacaagaaaacctcatctgattgacacagtcactacaagaaaacctgatttgattgtgactgaacctacaagaaaaccaattgtgattgagcctgtgcctacaagaaaaccaagtgtgattgagcccgtgcctacaagaaaaccaatggcaattgagcctgttgtgcctacaagaaaaccaattgtgattgagcctgttcctacaaggaaaccaattgtgattgagcctgtgcctacaagaaaaccaattgtgactgagcctttgcctacaagaaaaccaactgtcattgagcctgcatctcttactcagaagattgtttctgagcctatgaggaagactgatttgtttgaatctggacttgcaaggaggattggtttgattggttccagaccaacaacatgcttcgttgactgtccagttgaaaggccagcagtaactccaagcaactgtgaggctgatatgagattctctttcttccaatcacaatgggacaggttcctggctccatatcccaagagtgattactgcatcatctgtcgatcctatgatgctgtgatgcagcttgtcccatgccttcataagatttgtgttgcctgcatgatgagatgcaatgtcagggcatgcatgacctgtggcactgctggagtcatggagcgtgcatcagatcaaaggtgccagctgatggtggtctgccgtggagctgaggcgattgtcagatgttccccctgtatgcacagcatcgcatgtcgaggatgcttcctggcttcagtaacattactcaagggctgcaccacttgtggctgcatgattgagcacttcaagttttgttga

SEQ ID NO: 11001 - DNA, 501 bp, Oryza sativa
  Clone ID: TFbOSC100621j.C1.o7.fg
atggtgcaattccgcagctctctcagcatgagccgggcacggacccgccacggcgatggcgacgaccgcggctggaaccagctccacgtcgcctcccgcaagggcgacctcaaccaggtgaggcgtctcctggatgatggcatggatgtcaatgcacctgcatgggggccaaaatcacctggcgctacccccctgcatttggctgctcagggtggacatgttaaaatcatggacgagctactggagcggggtgcaaatattgatgctcgcacaaaaggagcttgtggatggacccctctacatattgctgctaaggaaaggaacaaaagagctgtcaggtttctgattgagaatggtgcattcttgccacctgacatgaatgaccacaggttcaatcctcctctccattactgctctggattggaatgggcatatgagatgaagcgcatgcaagacgaaagtgattcgaccggtgaaacttctctgggctcggagagctag

SEQ ID NO: 11002 - DNA, 5118 bp, Oryza sativa
  Clone ID: TFbOSC413065j.C1.o13.fg
atggagagggtggtcgggcgcggaggcccggccggcgcagcgtgcggtgaggcggcggccggcatgcagatccaggtccatcaagatatagaagggttgcaaacttgcagcaactactatgtttcggtgctgattttggttttattgttttttgtcttgtcccttgcagagaacgtgagggcactggacgagggggacggccgcctcgccgacaaggttggggccgtgagggacagcgacggcctcggcgcgctgcacctcgccgccgcccgtgagaagctgcccgtttgccattatcttgtggaggagctccgcgtggatgttgatgccgtcgacaacaaaggtgaaacggcattgacatttgcgatcaattgtgggaatgaggacatggtgcggtatcttcttgatcatggggctgatactgaaaagatcaacaacgatggacttactgctctccattttgctgctggtgaaggaaagtgcaaaatagttgaaattttgctgtctaaaggagcttatattgattcgttgactactggtggaacagcactgcactgtgctgcttataatgggagggatgctgttgtgaagattttattagaccaccatgcagatcacaagaaggtatcttggggtgcctatacacctctttttgttgctgtcgagtctggctcactgaaatgtctgaagctcctgattgaggctggcgcagatgtgaaaggaattggtaaagaaatacctttaataactgctgcttctaagggcttaactgacatcataaagtgcttacttgaggctggtgcagaccctaatgttcgtgactgtcttggacacatgcctatagaagttgctgcacgctgcggtgagcggaaagctattgagatcctatttccagtcacttctcgtattcagtctgtgtctgattggactgttgatggaatcattaatcacgtaaagtcactacctgaggtgaaggaggaagatttttgtgaagctacgcttgatatgggaaaattccaaggccgtgaagcagtcaagaataaagattatcttggtgccatgaacatttatactgcggctattgctctcaatcctagagatgcatctttattctcaaataggagcctttgttggcttcacttgggtgaggggaagaaggctttgatggatgctgaagcttgcaggatgatgcgaccagactggccgaaagcttgctaccgtaaaggaactgctctaatgttactgaaggacagcatctaccctttagcatatttttcagttgctaggacaactgcggtgcggcacatgtgggaggcagtccggtacggtgacgtcgactacgacgaggatcggcgggcactggatgccctcatcgttgcagtcccgcccgagatgcagttctcgctttcccagaagcggactgccaaggaggcctgggacgccatcgctgcggcacgcatcggcagcgaccgcgcccgcaagtccacactgcaggcactccgcaaggagtgggagaacctggccttcaagccaggtgaggatgttgatgactttgctctccatctcaacactctcttgcagaaaatggagagagctgtcgagaagctcttccgctgcgtccctgagaagtacaggcagatcgctcgctcgattgaatctctgctggacctctccacgatatcgatcgaggaggcgttaggtcgcctcaaggtcgtcgatggtgatgagccacagcctctctcggggcccatcaccatcggcgggaagctccatctcactcgggagcagtgggaggcctctcagggtgacgggaggaagggggagtcatcttccccgacaggcggcccggctttcctccaccttgatgagccgaaggtactcgtctccctctgcaacggctctagcaatgacaaggctgatgggtggtacctcgacaccggcgccacccatcacatgaccggccgacgggagttcttcaccgagttcgactccagcgtccgaggctccgtcaagttcggggacgcctccggcgtggagatcaagggtgttggctccgtcaccttcaccgccaagtccggtgagcacaggctgctcaccggagtctactacatccccgcgttgaggaattctatcatcagcgtgggacagctggatgagaacggctcacgcgtgttggtcgaggacggactcatgaggatttgggatcgccgtcgtcgccttcttgccaaggtaaccagaggcactaatcgactctacatcctcagcgcgcaggtcgcacaaccagtttgcctcgccgctcgtcgggacgacgaggcgtggcagtggcacgagcgcttcgggcacctccacttcgaggccctgaagcagctcagtgccaaggagatgctctgcgacatctgcgtggtgacgaagcagcggcggctcccctttccccagcagacgagcttccgagccaaggagcggctcgagctcgtgcacggggacttgtgtggcccagtgacaccggccacaccaggaggacgacgttacttcctactgctcgtcgacgacctctcccgctacatgtgggtgatggtcctcggcagcaagggagaggctgcggacaccatcaggcatgcgcaggctgctgcagaggcggagtgcggccgcaagctgcgcgtgctgcgcaccgacaacggcggcgaattcacagcggctgaattcgcgtccccgcagcagaacggcgtcatcgagcggcgcaaccagacggttgtggggatggctcgggccctcctcaagcagagggggatgccggccatcttctggggggaggcggtggtgacggccgcctacatcctcaaccgctcgcctaccaaggccctcgatggcaggacaccgtacgaggcttggcatgggcgcaagccggcagtctcccacctgcgggtcttcggctgcctcgcgttcgccaaggagcttggccacattggcaagctcgacgacaggagcaccccaggggtgttcatcggctacgtggagggctcgaaggcctaccgcatcctcgacccggagacacagcgtgtgcgcactgcgggcgacgttgtgttcgacgaagggcgagggtgggtatgggacaaggcggtggacgatggtttgactccgatgtatgacgacttcaccgtcgagtacgtccacttcgagggagctgggggagtaggcagctcttcttcacctagcgtgtctaccccagcccccgaatctccaccgactccgacaccaacacaccctcgggccacgacttcgactacgacgagctcttcgtcgatacaaccccagccagtgactccacatgctccagcaccaacagccactcctccaagcacgtctactccgacgccagctcgtgttgagcgcagcccggtggagttcgctactccgctctcccacgacggggagcgcatcgacgcgtaccacgacggcgagcagctacggtaccgtacaatggaggatcttctcggcgaccagccggtgccgggactggtgcctcgcgacctagaggcgcagttgcaccttgcgtgcgacgacggtgagcctcggtcttatgtagaggccgagaaacacgcggcatggcgtgccgcgatgcagtcggagatggacccggttcaggagaaccgcacctgggagcttgctgacctccctcgtggtcaccgcgcgatcacccttaagtgggtgttcaagctgaagagggatgaagccggagccatcgtcaagcacaaggctcgcttggtggcacgcggtttcgtgcagcaggaggggatcgactacgacgatgatttcgctcccgtggcacggatggagtctgtgcgactccttcttgcgctggctgctcaggaaggctggggcatccatcacatggacgtcaagtcggcgtttctaaacggtgacttgaaggaggaggtctacgtgcaccagccgccgggatttgtgatccccggcaaggagggcaaggtgctacgcctgcacaaggccctctacggcttgcggcaggcaccgagggcgtggaatgccaagttggattccacgctcaaggggatgggcttcgagcaaagcccgcacgaggcggccatctaccagcggggcaatggaggaaatgccttgctggtgggtgtttacgtcgacgacttggtgatcaccggcaccaaggatgcggaggtcgcggcgttcaaggaggagatgaaggccaccttccagatgagtgatctggggcctctctccttctacctggggatcgaagtgcaccaggacaactccgggatcacacttcgacagaccgcctacgccaagcgcgtcgttgagctggctgggctcaccgattgcaacccagctctcactccgatggaggagagactgaagctgagccgcgacagcatggcggaggaggtagatgctacacagtaccgacgtcttgtggggagccttcgctacctcacccacacacggccggacttggccttctccgttggctacgtcagtcggttcatgcagcgaccgacgacggagcaccagcaggctgtgaagaggatcatccgctacgttgcggggactctcgaccacagtctctactacccgaggtgtcttggcaaggcacacttcatcgggtacagcgacagcgaccacgccggcgacatcgacaccagcaagagcacgagcgggattctcttcttcctcggcaagtgcctcgttagctggcagtcggtcaagcagcaggtggtggccttgtccagctgcgaggccgagtacatggcggcctccgccgctttgacccaggcgctctggcttgctcgactgcttagtgatctcctcggcagagacactggaacggtggagctcagggtggatagcaagtccgctctggccctgccaaagaaccccgtttttcacgaacggagcaagcacatccgggtgaggtaccacttcatccgaagctacttggaggaagggagcatcaaggcgagctacatcaacaccaaggaccagcttgcggacttgctcaccaagcctcttgggaggatcaagttcctcgagctctgctccaggatcgggatggcccaacttccccacaagacgacgcacaagacttag

SEQ ID NO: 11003 - DNA, 1137 bp, Oryza sativa
  Clone ID: TFbOSC400867j.C1.o23.fg
atggcggagcggtcttcttcttcgtcggagtcgactggtaatgatgagaaaaaaagttcaaaaccacaaggatcatccaatgatcatcaagggtttctgccaggaggctctcctgcaaatacttttgattttgcttctttgcacagcttgctcaatttattttacatgatcctgccagctgcatacttgcgctttagattttatgaaccttcggatccatctgtaaaggagatagcagatcagattgcaaaggaccctgcgttcacccagatggcggagcaggcactggaaggcgaaggagaacagggcatgcctgcaatagacccttacattgaaacaatgcaaaagttcatggaaagcccccatttttttacaatggcagagcgtcttggggatgctcttgtgaaggatcctgcaatgtccagtctgctggaaaacttgactagtccaatgcataatgcaaagatagaagagcgtgtttctcgtatgaaggaagatccagccgtgaaatcaattatggatgagttagagactggtgatcctgctgcactgataaagtactggaatgacccagaaacatttcgaaagatcagccaggcaatggggcctttaggcggccctgattttgctgaaccttctggaactgaaggaactgaggaagaaggtgaatatgaagatgaatccattgtccatcacactgccagtgttggtgatgatgagggtctgaagaaggctttagatggtggagcagacaaagacgaagaagattcagagggcagaagggccttacactttgcatgtgggtatggggaggttagcaatgataaaaacatctcgttgcgaatcctgtgcaaaacggattgcatgtatgccttactagtcttcagaaaattgcatttgaagtgtgcccaagtacttcttgaggcgggtgctgcagtggatgctttggacaagaacaagaacactccgctgcattacgccgctggctatggtatgaaggggtgcgtggatcttctgctgaagaacggagccgctgtcaccctcgaaaacatggatggcaagacggccattgacgttgcgaagctcaacaaccaggacgaggttctcaggttgctggaaaaggatgccttcctgtag

SEQ ID NO: 11004 - DNA, 1215 bp, Oryza sativa
  Clone ID: TFbOSC32697j.C1.o2.fg
atggttcaccttctactacaatggaagccagaattggccgtccaagtcgactgcaatggcagcactccgctccatttcacggtgtccgacggcaaccgtaaaatcgtacgtgcaatcctggccacggcgccacctggcacggcgtacatgaaggactcagatggcctctccgctctccacgtcgcggctcggctgggccacggcggcatcgtcgaggagctgacagggttctacccagacaccgccgagctgcgcgacggccgctgcgagaccttcctgcacgccgcggccagggagaggcgctcgtcggtggtgtccctagacatcaagaaccccataatgatgggtggcctcgtgaatgcgcaggacgccggcgggaacacgccgctccacctcgccgtggtcgccggcgcgcctgacattgtggaggccctgctccgggaggggaatgtgcaaactgatgtcttgaatgacgatggacacacgccgcttgatctcgcctcagaatcaaacagtttgttcaatatggcccagccacaaaggaacgaccatctgaagccgtcgagcggccatgacatggcgagtggtatcgagaagacatccgacagcctcgcattggtggctgttctcattgccgccgccgtcttcgccgtcgggttcaacatgcccggcgggtacggggacgacggcacggccaacctcagggacaacatctcgttcaaatacttcatggtcctcgacaccttcgccatcaccacgtcagtggtcgccgtcatcctgctcgtatacgggaagacggcggcggcggcgcacctcgccgtctcgtggaagagcttcgtggtgacgctgcagtgcatctgggtctcgctcgtcagcctgatcctggccttcttctccgccatccatgccgtcgtcatcgcaacctcgagctcgaggacggtcttgatcaccatgttcttggtcatctatgtgtgcttcaacgccttgattttgtggatcgagaagtggattgatcctgcagcgacgacgtatcgcgcggtttggaggttcgtgtggcgtggtcgccatgctcacgccatcaagaggcgatatccgttcctcggcgactccctatacagcttgcttatcttctcggttataattataaatatcacagcatttgtcgttctggttgtggtgtattatttcgatgtgagaagattgtcgaacaattga

SEQ ID NO: 11005 - DNA, 1320 bp, Oryza sativa
  Clone ID: TFbOSC401411j.C1.o8.fg
atggcgctgcctcaggccttcgagctcctcctcggcagagatcgagacgcctggccgcgcggggccgcgttcctcgtcgccgcccactacggggacgtccgcgaaatgaagaggattgcaaaggagctggacgaggacggcaaagggatcgaggcgactgtggctaacacaagcttcctcggcatgaacgcccttcacgcactgggttggctcggcaaggtgccggcctaccggtatctggtagaggaggtcaaaatggacgtcaacaaggccgacactgctcagggattcacacccctggagcatgccgtctaccatggtcgcctgcctgccaccagatacctccttgatcatggcgctgatgtgcatcaaattcgctctacgggaaatgtctctcttcttcactcagctgcagtaaaagggttctctgaagtagcaaaatttctgctttctagaggagttaatgttgatgcagaatcagaaatggggacaccactggctcttgctgctttcagaggatatgatagcactgtcaaggtccttttggagcacaatgctgatcccaacaaggttacaaacaaggcacttggtgcacctttagacttggcattaaccagctcttctgtgtcctgtgtgaagctgttggttcaggctggagctgaagtgaaagttgaggggccaaataatcatttggtaagagctgctgagaaaggcttaactgaagctattaaatgcatgttggaagctggtgcaaacccaaatgttcctgacaggctcgggagaatgccaatagagctggctgctgagtatggcacacgggaagatgttgagattctctttcctttcagctctgctattccaactgtggcaaattggagtgttgatggaataattaatcatgtacagtcagaaatcaagcaactagagatattatttactcaggacgataattttatcaaaaagagaaggtctgacatgaaacaacaaggggatgctgcatttaagaagcaggattatctaaatgcatcagtgttctacactcaggcactgaaggttgatccgtttgatggcacgttgttctcaaacaggagtctttgctggctccgcatgggtgatggagaaagggctttggatgatgccaatgcatgcgaaaagctacggccaaagtgggcaaagtcctactatcggcaaggagcagctctaatgtttctgaaggagtatgagagggctcatagggcacttggtcgagctttagagttggaccctgaaagtgaagagatcgagaatttgtattgggagtcgatggaactgtgcggttga

SEQ ID NO: 11006 - DNA, 2544 bp, Oryza sativa
  Clone ID: TFbOSC418633j.C1.o8.fg
atggggagggggatagggtcgaagcggagggtggaggacgacgacggggagaatatgccggggaggaagaagaaggaggaggaggaggaggaggaggatgacgatggggaagaggagtacgaggtggacgtggtgcgcgaccggatcgggtcgtcgcgggggagccgcctggcgctgttcggctccgacctccgcctcggccgcttccgcccgcgccgccgccgcgtcgcccccgtcgacggcgacgatggcatcttccaggacttcgtcatcgaccccgacaacaagtggtatcggttatggacgaggttcatactagtgtgggcagtgtacagttccttcttcacgccattggaatttggcttcttcagggggctccccaggaacctcttcttcctagacatagctggtcagatcgccttcctcatcgacattgttctcaggttcttcgtggcctaccgtgatcctgacacctaccgcatggttcacaatcccacctccatcgctctccgatattgtaaatcaagcttcatttttgatcttcttggttgttttccgtgggatgctatctataaggcttgtggaagtaaagaagaagtaagatacctattgtggattcggttgacacgagctatgaaggtgacagagttcttcaggagcatggaaaaagatatccgtataaattacctgtttactaggattgtgaaactcatagttgtggaactctactgtacgcacacagcagcatgtatcttctactatcttgcaacaacacttcctgaatcaatggaaggatatacatggatagggagcttgcagttgggagactatagttattctcatttcagggagattgatcttaccaagcgttatatgacatcgctgtactttgccatagtcaccatggcaactgttggttatggtgacattcatgctgtgaatgtcagggagatgatattcatcatgatttatgtttcctttgatatgattcttggagcctacctcattggtaacatgactgcacttattgtcaagggctcgagaaccgagcgattcagggataagatgaaagaagttatcaggtacatgaacagaaacaagcttggaaaggacataagggaacagattaaaggacatttgaggttgcagtatgaaagcagctacactgaagcttctgtccttcaggatatcccagtctcaattcgtgcgaagatttcacaaacactgtataagccatatatcgaaagcattccactgtttaaaggatgttcagcagaattcattcaacagattgtgatcaggctgcaggaagagttcttcctacccggagaggttattttggagcagggaagtgcagttgatcaactgtactttgtctgtcatggggcactggaaggtgttggcattggtgaagatggtcaagaagagaccattctaatgctagagcctgaaagttcttttggagaaatcgctgttctctgcaatatcccacaacccttcaccgttcgtgtctgcgaactttgtcgtcttttgcggcttgacaagcaatccttcacaaacatcctggagatcttcttcgttgatggaagaagaattctgagcaacctttctgagagtagcgaatacggcagccggatcaagcagctggaatccgacatcacgttccacatcgggaagcaagaggcagagctgacgctgcgagtgaacaacgctgcgttctacggtgacatgcatcagctcaagagcctgatccgtgcaggagccgatcccaagaacaccgattacgacgggcgatctcctctgcatcttgcggcttgcaaagggttcgaagatgtcgtccagttcctcctccacgaaggcgtcgacatcgatctttccgacaaatttggcaacacgccattgctggaggcggtgaagcaggggcacgaccgggtggcgacgctgctgttcagcaagggggcgaagctgagcctggagaacgccgggagccacctgtgcacggcggtggcgaggggcgacacggacttcgtccggcgggcgctcgcctacggcggcgacccgaacgcgagggactacgaccaccgcgcgccgctccacatcgccgccgccgagggcctctacctgatggcgaagctgctcgtcgacgccggcgccagcgtgttcgccaccgaccggtggggcacgacgccgctggacgaagggcgcaggtgcgggagccggacgatggtgcagctgctggaggcggccaagtccggcgagctctccaggtacccggagcgcggcgaggaggtgcgggacaagatgcacccgcggcggtgctccggtgttccggcccccacccgtgggacggcggcgagcggcggcgggaaggggtggtgctcggcgcaggagaagctcggcctcgccggctccggcgaggggctccggctgctcggcgaggacggcgccagagtgctcgacgtcgacatggtccacgacgggcagaagctctacctcgtcgtcggcggcggcggcgatgacggcggcacggaggcaaggcagtga

SEQ ID NO: 11007 - DNA, 1107 bp, Oryza sativa
  Clone ID: TFbOSC900156j.C1.o2.fg
atggcatcggcagtcaaatccaaactgacggtggccaaaacaaaggaggacaccgcaaagcctcccatgaatccatggttgctactccttgcatcgcgaggtgattgtgatgggataaccgatcacattcttctgaacatggaagctgcgacgcaacagaaggctgctaaagaggaaggtgcttgtcatcgtcctgcaccctctgcagactcgtcgcccctggaccaagctaaccctgcaattcctaccatggcgacgcagcaagcttctggtgatgatgggcatcagtcatgcctggacctggagggggtcaccattgaaggcgacacggcactgcatgttttggccacctctggtgatggctggagctacctgaggagtgtggagatcatctgcagcaaggccccgcatctcctgctggtgcagaacaacaaaggcggcacgcctttgcactgcgctgtcagggctggccattcccaaatggtttcttttctaattgatctggctaataatccgaggtcaaatctgcaggtagcggctagattgaaggaagttctgagaaaggggacggcctttcttcccttgcatgatgcaatccgcatcggaaacaaggaaatgatcaccaagcttcttgaattcgatccagaattggctagttcccctacggatgaagcaggaatttcaccgttgtacctagctatcgtgctacaacgtagtgacatcgcaaagttattgcatcaaatgagtccagagaatctttcatattcgggcctaagtggacagaacgcattgcatgcagcggttctccaaggcaaagttaccaattctgttatcagtgctagtccactattaataagtggctcctttctaaatgccactgttagatttggtcctatgttttttccatcggagagagaaggtttcctaatattttgccacttccacctaagtggtgtgacaagtaggattgccagcatgggtggtgtgaaaaagtccattttgcctcttgtagaccctacaactcagccacaacctttccccacactgctcacttctgtcttattcaagacggtgcttgacgcttatatggatggcgaaggcacataa

SEQ ID NO: 11008 - DNA, 1188 bp, Oryza sativa
  Clone ID: TFbOSC421842j.C1.o8.fg
atgccggtgccggggagccagaacgggcggccgaggccggcgaaggcggagaccatccacggcctcgcccgcgccggcgacctcgccggcgtccagaggaagctgcaggagaatcccgccctcatcaacgaccggaaccccgtcatgtcccaaacaccgcttcatgtcgcagctggctacaataacactggcatagtcaaattcttgcttgatttccaaggcacggataaagttgagctggaagcaaagaacatgtatggagagacacccctgcacatggctgtgaaaaacagttcttgtgaatcagcaaaattgctacttgaacgtggtgcacatatagaagccaaagcaaataatggcatggcaccattgcatttagctgtctggcatgcacttcaatctggagattgtagcacctgtactgaatcttgttctcatcacacattgccccaccaggaaggcaaaatcccttcgaatcatattcctggaggagctggtaaaacaatggttgctcggattcttggaaagcttcttcatatggttggggttctccctaccgacaaagttactgaagtacagcgaactgatcttgttggagaatttgtggggcacactggaccaaaaactaggcgaaagatacaggatgctgagggtggaattctgtttgtggatgaagcttacaggttgataccgatgcaaaaatctgatgataaggattacggtgtggaggccttggaggagataatgtctgtaatggacaatggcaagatagttgtgatatttgctggatactgtgagccaatgaagcgcgtcatcgcctccaacgacggcttctgtaggagggtcacaaagttcttttattttgacgatttcaccacaacagaattagcagagatcttacatctgaagatgaataacccaactgagagcagtttgctgtatgggttcaagctggacccaagctgcagcatcgaggtcgttggagagctgattgccagggagacaactgaacagcggcgtaaacagatgaatggtggccttgtagacacgctgctcatcaatgcccgtgagaatctagatctacgtcttgatttcaactgcgacgatgcgaatactatgatcacaatcacattggaagacctggaagctggccttaagcagatctccaaacagcggcagttgcagtga

SEQ ID NO: 11009 - DNA, 2535 bp, Oryza sativa
  Clone ID: TFbOSC412194j.C1.o18.fg
atggggttcctcaaccttgtgggcaactccattgggtgctcggcttccggcgagcggctcgtctcggcggacagggacggcgacctgcaggaggcgcgcgcgctgctcgagtacaacccgcggctcgcctggtactccactttcggtggccgcaactcgccgctgcactacgccgccgcgcagggtcaccatgagattgtttctctgttgctcgaatccgaagtcgagatcaacctcaggaattacaggggccagcgatgccacgcccccgtctctccaccatcttcgccggcgcggccacctccacggcgccggccccggcccccgcggcctcgccgtcggcgcgcgcacccctgcggcgacggcgacggctcggccccggtcccggcgcgcgccctcaacgggatcctcgccgcgctcgcccgcgccccgccttccgccgcctgcggtgacgcccccgccctcgccatcgagctcttcaagcggatggaccgatgggcctgcccccgccactctcctcccaccatccacacctacaacatcctcatcgactgctaccgccgcgtgcaccgccccgacctagggctcgccatcgtcggccgcttgctcaagaacggcctggggccggatgatttctcgtactcgctcatctacggtttcgttaaggatggggaggtggacaaagctcactgcttgttccttgagatgatggagcagggcgtattgccgaagatactgatttgtaactcaattatcaaagagctttgcaagatgaaggaaatggacaaggccgagagcattgtgcagaagatggtcgattcgggtattgcaccggacttgtttacttatagcttgattattgacgggctgtgcaagtcaaaggcaatggacaaggctgagagggttttggagcagatggttgaggctggtactcgacctaacagtataacatacaatagcttaatccatggatattccatttcggggatgtggaacgaatcggttagagtgttcaaacaaatgtcaagttgtggtgtcatcccgactgttgataattgcaactcattcattcacgctctcttcaaacacggtagaaccaacgaagcaaaatgtatttttgactcaatggttctgaagggccccaaacctgatattatctcctactctacgatgcttcatgggtatgctactgctactgacagttgtttggctgatgtgcataatatcttcaatttgatgctaactaaaggtattgcacccaacaaacatgttttcaacatactgattaatgcatatgctcgttgtgggatgatggataaggctatgcttatatttgaagacatgcagaacaaaggaatgatccctgacactgtcacatttgcaaccgtgatatcttctctttgcagaattggcaggttggatgatgctctgcacaaattcaaccacatggttgatattggtgtaccaccgagtgaggctgtttacggctgtctgatccagggttgttgtaatcatggtgagttggtaaaagccaaggaattgatttctgaaatgatgaacaaggatattcctcctcctggtgtcaagtatttcagttcaataataaacaacctgtgcaaagagggaagggtagcagaagggaaagatatcatggacatgatggtacaaacggggcaaaggcctaatgttgttacttttaattcattgatggagggatattgcttagttggtaatatggaggaggcatttgcattacttgatgctatggcatcaattggcattgaaccgaattgttacatatatggtacgcttgttgatggctattgtaaaaatggaaggattgatgatgcattgactgtattcagagacatgttgcacaagggagtcaagcctacaagtgttttatatagcatcattctccatgggttatttcaggccaggaggacaactgctgcaaagaaaatgttccatgagatgattgaaagtggaacaaccgtgagcattcacacatacggtgttgtgcttgggggactttgtagaaacaattgcaccgatgaagcaaatatgctgttggagaaattatttgctatgaatgtaaaatttgatattattactttcaatattgtgattagtgcaatgttcaaagttggcagaaggcaagaggctaaggaattgtttgatgcaatctctacttatgggttggtgccaaatatacaaacctacagcatgatgataacaaatcttataaaagaagagtcatacgaagaggctgacaatctctttatatcagtggagaagagtggccatgcttctgactctcgtcttcttaatcatatcgtcaggatgttactcaataaagctgaggttgccaaggctagtaattatctgtctataattggcgagaataacctcactcttgaagcttcaactatttctttactggcttctctcttctcaagggaaggtaaatatcgggagcatataaaattgctccctgcaaagtatcagttttttgagggagcctggcaagattaa

SEQ ID NO: 11010 - DNA, 1296 bp, Oryza sativa
  Clone ID: TFbOSC400025j.C1.o16.fg
atgtcgctgcccgacctcttcgagaagcttctcggcgacgatcgccgcgacgctggacgacgacggggaggggatcgcggccaccgtggcgcgcacggcttccacggcatgaacgcgctgcacgccgccagaagcctgcacgtctaccgctacttgctcgaggtggccaacatggacgtcacaagccggacaccactccaggtaggaagactcccctcgagcgagccattgccggtggggacctgccctctgtcaggtatctcattgatcatggtgctgatatccatcatgaacgtgaaggaaacatcacttttcttcattcagctgcaaagaaaggggaatatcctatcttcttgtaggattccctgctacatccaatctgcattctgtcatgatgagcagccttacgttgaatgtggagaaaaatgcagacaatactggaggactgaaatagtaaaattgctgctttctagaggagctcatgttgatggcaaatcagatcatgggacacctctgcattttgctgctattaaaggatatgaaagtactgtgaagattttgttggagcaccaagcagatcccaacaaggttatgccttcttctcaagcaacacctttatctgcggcgttattcactacttccttaccttgtgtgaagctattgatccaggctggagctgatgtaaatgctacaaacaaccccctggcgagagctgcagggagtggattaactgaagctataaagttgttgttgaaggctggagcaaacccaaattgtcctgacacgcatggtagaatgccaatagagctggctgctgtgtatggtacaagggaagatgttgagattctatttcctttgaccaacccaattccaactgttgctgactggagcgttgatggggtaattacttatgccaatctggaacgcaagaagctagaggatgatgattacgttaacacgaaaatgtctgacctgaaacaaaaagggaatgaagcatttgatgagcaggattatgaaaaagcatcagtgtggtacacacaggcactggaagttgatccttgtgatgccacaactcttctaaagaggtgtctttgctggcttcgcatgggtgagggaaaaaaggctgtgaaagatgcaaccacatgcgcaaaacatcacccgaagttgtcggaggcctaccatcggctaggagaagctctaatgcttgagaaggattatgagaaagcttgcgtggcgttgacccatggtatagagttggatcctgaaagtgatgagatggacaaactgttctggtaa

SEQ ID NO: 11011 - DNA, 3081 bp, Oryza sativa
  Clone ID: TFbOSC401616j.C1.o29.fg
atggcggaggttcgcaagtacgggctgcccaatcagccgccagatattccccagatactgctggaagctcagaatcgatggctacgtcctactgaaatctgccatatactgtcgaactacaagaaattctccattgcgcccgagccaccgaacagacctgcaagtggctcgctttttctgttcgatcggaaaatattgagatacttcagaaaggatggacataactggaggaagaaaaaggatggaaagacagtcaaagaagctcatgagaagctgaaagttggtagtgttgatgtacttcattgctactatgcccatggggaggagaatgagaacttccagagacgtacctattggttgttagaagagggtttcatgaatattgttcttgtgcactaccttgaagttaaggggaaaaataatttttccagggtggcaagcaaagtttcagccgttctaaagaagctgaagagagtgcaggattatctaatgctgatagtcctgcatgctcaaactctttcgctagtcagagccagtgtatctaaagaaaaattcggtgcaacagataattgtcgagcaagctccagataccaccctttcgttgagatgcagcagcctgtggatggagtcatgatgaataatatgctgggtgtttcagctccaagtgcaggatatcatggtgaaatgcagactacaacagctaactcagacaatcattttgctactcattatgacatagctggtgtgttcaatgaagctggagctggattaaggggcgtttccaaaactctacatgattcagtgcgttttgctgagccctatcctgaatgctcagctgagtttatggagccagcactctattcttctaatgccaccatggagtccaacaatctggatgataactcacggttggaaacgttcatgtctgaggcactctacaccaacaacctcactcagaaagaagctgatgcactgagtgctgcaggcataatgtcatcacaggcagagaataatagctatacagatgggatccggtatccacttttaaagcagtcatcactagatctctttaagatcgaacccgatggtttgaagaaatttgatagcttctcgagatggatgagtagtgaacttccagaagtagctgatttggatatcaagtccagttctgatgccttctggagtagtactgaaacagtgaacgtcgctgatggcactagcatacctataaatgaacagttagatgcattcgcagtcagcccttcactttcccaagaccagctcttcagcattattgatgtttctccaagctacgcatgcactggctctaggaataaggtcctaattactggtacattcttggcaaataaagaacatgtggagaattgcaagtggtcatgtatgtttggggacgttgaagtacctgcagaggttttagcacatggctctctgcgctgctacacaccagtacatttatctggacgagtcccattttatgtgacatgctccaatagggtggcttgtagtgaagtgcgagagtttgagttccgtgattctgatgctcgacaaatggatacttcagatccccagacaacaggcataaatgaaatgcatttacatattcgtcttgagaagttactttcgttgggaccagatgactatgagaagtatgttatgagtgatggaaaagagaagtctgaaataatcaacactattagttccttaatgcttgatgataaatgtttaaaccaggcagttccattggatgagaaggaagtttccactgcacgggatcagaatattgagaaattggtgaaagagaaactatattgttggcttgttcataaggtacatgatgaagacaaaggtcccaatgtgcttggcaaggaaggacaaggtgtgattcatttggtagctgcacttgggtatgattgggctgtaaggccaataattacggctggtgtaaaggtgaacttcagggatgctcgaggatggactgcgcttcactgggctgcatcatgtggaagggagcggacagttggggccctgatagcaaatggagctgaatctggtttattgacagatccaactcctcaatttccagcaggtagaacagctgctgatttagcatcagaaaatggacacaaaggcattgctggtttccttgcagagtctgctttgacaagtcatctttcagcacttacactgaaagaatccaaggatgggaatgtaaaagaaatatgtggcttaggaggggctgaagattttgcagagtcgagttctgctcaacttgcttacagggattctcaggctgagtcactgaaggattcacttagcgctgttcgtaaatcaacgcaagctgcagccaggatatttcaagcttttagggtggagtcattccacagaaagaaggtggttgaatatggagatgatgattgtggattatcagatgagcgcactctttcacttgtatccattaaaaatgccaaacctggacagaacgacgggtcacattctgctgctgttcgtatccaaaataagtttagaggatggaaaggtagaaaggagtttatgattattcgacagaaaattgtcaagatacaggcccatgtacgaggacatcaagtaaggaaaagctatcggaggatagtctggtctgtaggcattgtggagaaaattatattgaggtggaggagaaagcgaaggggcctgcgtggtttccaaccggtaaaacagcttgaaggtccatcaccgatccaacagcttgaaggtccatcgcagatccaaccagcaaaggaagaggaagaggatgaatatgattacctcaaagatggcaggaagcaagccgaaggcagattacagagagcactagctcgtgtgaaatcgatgactcaatacccagaagcaagagaacagtacagtagaatcgcaaaccgtgttacagaactgcaggagcctcaggcgatgatgattcaggatgatatgcaaagtgatggagctattgctgatggaggcgacttcatggctgaactggaggagctatgcggggatggggacgcaccaatgcccaccattttgtga

SEQ ID NO: 11012 - DNA, 1482 bp, Oryza sativa
  Clone ID: TFbOSC415309j.C1.o12.fg
atggggctgcagcaatccaaggaggagctggtgtatcagcagtggatcgacaaggaagggaagacgcccctgatggtcgcgagcatgcggcctgatctgatcaatgtggttcaggtgctgattgaattgggtgcaaatgtgaacgcctaccgtcctgggtcatattgtgggactgcattgcaccatgctgccaagaaaggtcttgagcagactgtccatttgcttctatctcatggagctaatccgtttataacaaatgatgattgccacacggcacttgatttggctagagaaaagggtcatgtgaatgtcgtacgagccatagagggacgtatttctcttttttgtggatggatgagggagaactatggtcctggatttttggaagcatttgctccacaattcctgactaggaaaatttgggcggtgattttaccccgtgaagcacgaaatcaaactcggccactcaagcttgagctgacgatataccctgaattgcaggcttctaaaccacaagctgtaattaaactttggaaatgtcaacttgaggaaccaaagtttaatcaggccaatccttctgtgacaattttcgacaagggaacaagaactcgatacaagcttctaccggtgtgtgaaggtgacaaacagcagcttcaatggttttatagtgcatgttgtggcattccacaggttgccagcatggttcctgctcaaccagcgaatgccccactgccaaatccatcatcagcatcatcattaccttcagtgatatccacacccagcaaggaggatgctgagttagcaatggccatcaatgcctccatcctgtcagctatagccgagggagtgcccgatgttcagccaataacaacgactactgcgaccaatgattggggaaaccctccaagcaactccctcaatggatggggcccaccagatacttctgcgccttcaaagacaagtggccaagtaccagttgttacatcaagcagtagcacatacaatgggtgggacgtgcctggaacaagctctggccaaagttcgtccaaacacaacaaaagccagaacagcactttcgtggttccgcaggaggcgcttccatctcttccagtcccaactgcgcctccacttgccgtgggaaccttctacgatggtcctattcagtatccgtcaatagattccacgccagtcgacgtaaccatgccttctgctgacggtggtacagcggtaagctctgcaaaacctgcagagaacgaaggtgatgcaaaacctgcagaaagtgatgctaatgcaagcaacagcggtaacactccaccgggaacctgtgttatttgtttggatgctcctgtggaaggtgcctgcattccgtgtggtcacatggctggttgcatgtcctgcttgaaggatatagaatcaaagaaatggggatgccccatttgtcgagccaagattaaccagattatccgcctctatgcagtttga

SEQ ID NO: 11013 - DNA, 1320 bp, Oryza sativa
  Clone ID: TFbOSC401914j.C1.o20.fg
atgtcaaaaagaagaaaaaagaacgaaagggtggagttgagatttaaggcacccgattatgctacgtggaaaaaggaggcagctgcatgcgacaaagctaatggcaatggtaaagatggatcgattacatttatggatgaaaggaatatttcgattgccaagaccatagcaaatgacataatcatcccagaccctgctcccgagtggatgtgttataccttcttggacaaatatgaccaattggagcccatctttataaaggatagtgcacgttgcttcctccgattattcaagaactggaagggctataccatgtcatggaatctcaccatcaccgcacaaaccttaacctgcatggtcagtttcaattccctgcgatgcgcgaaagttgtattggagggcagggcacctgagctccttggggtgcatgccaatcccaactgcgtaaccaaatatggatacttcccgctccatgaagctgctgaaaggttctctattgagatgatcaagctgctcttacgccatggtgcatcagccaacgtacgcacggttggcgacgatgtcatcgatggcctactcctgctccatatcgcgattgagaacacttgcctgcataagtatcttgaggacaatctttctcccggccaggatcatctggattatatctacaagcttttccatctgctgtgtttacctgaaatgaagatcttcctggatacaactagactacttgcaggaaaaacaaataatctccttgaagagctctggaattatattgagaatggaaaacttatccagaccgcaattctactactggctgctcaggagcagatccgagggggatgttcctccaagataaatggcagtagaaagaaaaatgggtatgacattatgtacaagcgtatactgaggctttcatttgccttgagatgggggaaagtttcaaatggaatgacacagaagcttatgaaggaaaagagggcactcattgattgcatggggctgcttgttgatgcaatttcccatgctggtgaacctctttctgcatacattcaggctcattcagaggcgccacatgtggaggtcttggaacatgtttcaactatcctcaaggagtatggattttgccctactgaagaagtcatggacaccataaacctccaaccttatgactgcaaaatgtcagaaacaaaatcatgtagcaaagggtttacagatgcaaacacggcagttgcggaaatggctaatctgcatgctgcagacaaaaaggctcttgaagctgttgaagtaaagcacgagtacaaaaggttctatagttga

SEQ ID NO: 11014 - DNA, 1893 bp, Oryza sativa
  Clone ID: TFbOSC29958j.C1.o2.fg
atggatggatcaatccctccaaaaccaccgagttgccgccagcctcaaagggaaactcacaataactctgagaacacgggtgccactggtaacgatcaggctcaggatgagggttttctactccatgtcgtagcagccaatggggatggtgaaaactacaggaaatgcgcgacattgctctctgggatggataaaacacgtctcttcgcacgcaacagcgagaataagaccgctctagagtgtgcagcaaatgctgggtacaccaatatggtttttcatctccttgacatggagcgaaaacacaatttttgtggactgaacactaaaccaaatgagatcttgaagaagacaagtggacgctcagagacaccgttgcacgaggcagtgaggcagcgttgtgaacgtaagattgaagagttgaagggcaaggacagtggtttagcgcgtgtcccggacataaacggcatgtctccgctctacctcgccatccccttgggatacagagacatcgttgataagctaaccttaacctttggtgatgcgaatctgtcctacgatggaccaaatggacaaaatgtgctacatgctgcggctcttcagagtgcaggaaggagaggagatctcatgaataaagctgattggtctggaagtacacctcttcactttgcagcatcagtaggagttcagggcgtaacaactgcgctgcttgatggcatagaccaagatcgcagaacggactacacccaacggcccgacaacaatgggatgttccccatacacatagctgcttctgttggttcaatggacacaatcacctcattggtcaatgccgatcaagactgtgccactcttcgtgataatgttaaaggtagaacattgcttcatatcgccattgagaatcggaagtacaaagtagtcaaattggtgtgcaaagatccgaggttcaaggaaactctgaatttggaggacaacgacggtaatactgcattacatcttgctgtaaagaaaagagacgagtacatcttcacgtatctcctacagaataaggccgtggagctcaaccatgtcaacctagaaggctatacaccactcgatcttgcaaaagtgataaggatggaagactactttgcctctccccagaacccaacagaatggatggtgagggtattggctcattctggagccgtcttcagtcctcgtaggcgtgatgaactgatccgtggtggtagctctcaagaacaagaaaagcacgggaaaaccctttcagagtcgactgaaagcgtgttggtcgcatcggcgcttatcgcgacactgactttcgctgcagcattcaccatgccagggtcctacagaacgacaggcccaaaggaaggcacgccagcactgggtgccctctacggtttcaaggttttcctcgtcgccgacatcttggctttcttctgttccgttgcggccaccttcagccttgccgagtacgggaaccgcgggacggtggatccccttgtccgctgtcggtactcacagcgtgccgtgtggctcttccatgtcgccctcaggagcatcatagtagccttcgcgttcggggtctcggtggtgatgtggaacatttctctcagtgccatcagcatcggtggtgtagccactatcgctgtcgtgttctacgggaacgttcctcttggtcaagatttcaggcttatgttgctgatgcaccgcaggtttggcttctcacgttcttggaacctgtatccttctacggcctctcatctcaactggacatcctggcagctcaaaagcttttccgcgacgctggtttggaatctgatgaatcttttttggacttatgtcctcatatttgcacttgctggcttcgctcaactgaagcagaaacattaa

SEQ ID NO: 11015 - DNA, 897 bp, Oryza sativa
  Clone ID: TFbOSC18672j.C1.o1.fg
atgactgaaatgttactgaattggaacaaggacctcacagaacaagttgacaaaaatcgaagcacgccacttcacttcgctgcatcactttgtaaagacttcgctgcatcacttagtgaatatactgtaataacgtggatgtcacgcactccgctcattccagtactgctagccaacccagttcagttgtaccagcaagattctgaaggattgtatccgatacacgttgctgcatcctcaggtgccattcggactatcaaatatttaattgaggagcaacctgatgagatcgctggtcttgtagattttaaggggaggactttccttcatgtcgctgttgaaaggggcagaaggaatatagttgagtatgctcaccgtactcgatcattggctaggattttcaatatgcaagacaatgatggcaacaccgcaatgcatatagcagtgcggaatggaaataagtacattttttgtattttactaaggaacaggaaaaacccagaaaaattgatattgctggcattaacacattgcaatgcaagtggtggttgccgtcgggcagatcactttcagaaaaaacaggcagacgaagcgaaggaatcagagaaactgacaacttcaacacaaactctaggcatcggatcagtactaattgttactgtcacatttggcgcaattttagccatacctggaggatataaagccgacgaccattacaatggcggtacaccaacacttgctggaaggtatatattcgatgcattcaccatggccaacacaatagcattcatttgctcaactttagccatcatccacctcatgtactccggaatggctatggtatgtatttggtactggctccagtggctcgatggactgcaattgcaatctgtgtaa

SEQ ID NO: 11016 - DNA, 1164 bp, Oryza sativa
  Clone ID: TFbOSC900156j.C1.o1.fg
atgactgaaatgttactgaattggaacaaggacctcacagaacaagttgacaaaaatcgaagcacgccacttcacttcgctgcatcactttgtaaagacttcgctgcatcacttagtgaatatactgtaataacgtggatgtcacgcactccgctcattccagtactgctagccaacccagttcagttgtaccagcaagattctgaaggattgtatccgatacacgttgctgcatcctcaggtgccattcggactatcaaatatttaattgaggagcaacctgatgagatcgctggtcttgtagattttaaggggaggactttccttcatgtcgctgttgaaaggggcagaaggaatatagttgagtatgctcaccgtactcgatcattggctaggattttcaatatgcaagacaatgatggcaacaccgcaatgcatatagcagtgcggaatggaaataagtacattttttgtattttactaaggaacaggaaaaacccagaaaaattgatattgctggcattaacacattgcaatgcaagtggtggttgccgtcgggcagatcactttcagaaaaaacaggcagacgaagcgaaggaatcagagaaactgacaacttcaacacaaactctaggcatcggatcagtactaattgttactgtcacatttggcgcaattttagccatacctggaggatataaagccgacgaccattacaatggcggtacaccaacacttgctggaagttcggtgataagtttgggtgctgcttttatgctaggtatgtatttggtactggctccagtggctcgatggactgcaattgcaatctgtgtaatgatgatgattgcatctctatgcttattcacggagccattgcatgcaccccgtgttgcaatagcgatgtatgttaggaagggaaatcaggatatccaaagaacatatattattaactgtgggacaccaaataacatgcatggtaactatcgacaggtgatacttgtagaccgtatcctgagggcactagggcccctcaccaactcatccggccttcctcttttccctcaggcggtgacaacgacagccacggtgacgacgcgtagatccatcgctggccgtgatgacgatggcggcgacagtgcttggatctgctgccgaccgtaa

SEQ ID NO: 11017 - DNA, 2394 bp, Oryza sativa
  Clone ID: TFbOSC900138j.C1.o2.fg
atgtcgcggcgcagggcggccgctgtggcggcggcggcgcgggaggaggaggaggcgtcgcccgctcagcgtctcgtggaggctgccctacggggggacgtggtgaccatggaggcgtgcctggcggccgccgccgccgctgccgcagcggacgacgacacggacgatggcgtgcccgcggcgagccgcgtcggggtggcgcgcctgcgggtgaggtgcgctgaggtggccctccgcgaggaggcggccggggaggtgatcgtggagtcccgcgagctcaagaccgacgtctcgccgctttttgccgccgcgcacgccggtcatgccgaagttgttcgcaccctcctgagtggaggtggtggaaaggtggctggtgtatcaagttgtaaaaaagtatactgctcggtatttgaggttgctggagctgatgttaatcaaaagttatttctaggctatgcaacaacagctgccgcacgtgaaggaaacatccatattctagagatgcttctgcaggctggagtcactcgggaagcttgtgaagattccctatcagaggctgctctttttgctgaggctgaagccgttcggctattagtctgttcagagatgatacagcctgaagctgcagcacatgctttggtgactgcttcttcaagaggctttgatgatgttgtggtcatactactgcagaatggggttgacgttaattccatggctagggtcctcttgaggtctgttaagcctgcactacatgctaatgtgaattgcactccactggtggcagcagtaatgagccggcaaatttcaactgtgaaactcttgattgaggaaggctcttacttggactgtcttgtgcaagttggttcttggtgttgggactctgcaacgggtgaagaacttcgtgttggtgcatgccttggggaaaaatacaacgccatttggtgtgcagtagagtactacgaatgcagtggtgaaatcctcaaattgctgctcgataaagcaccatggttgctggaaaccccacgcaagggtcgaaatcttctttgccatgccatactctgtcagaacccgaatgcagtaagcgtgcttctaaatgctggtgccaatcccagatttcccataatgatgacaaacggcacacacgtctcctacccaatacattttgctgcaaggttgggtcatgcgcccgtactgaaacaactcatgttggatggggctaatatcaatgcgcagacttctactggggacactcctctgatggtctctgcgaggtgtggacactccgattgctttcttgaactgatcaaatcaggggcagaccttgggatagtgaacaatgcaggtgacacagcaataatgcttgctaagaaaagctcatttagctcaaccatcatcgacattctttccagagcattgagttgcggaggctgcatcacttcatcggatatcaccgtcttctctccgctgcacttcttcgctgcaagtgacagtgcagaagctcttctaatgacgctacactactcagcagcagatctgaacaggcctgatggttcagggctcactcctgttatggttgctgcagagtcaggccatgctgacattttcaggcttctagtgatggcgggggcagatatcgctgccacgagtgccgaagggaaatccgcgatgtcgatcatccgaagcagagctcctgaaaccagagatcggttcgaacagatcttactccaggcttcgctcgcggatgcgatcgcaggccagcagccatctttcagacccctgcactacgcggcccggatcggcgacacctcctccctgacgcagctcctgaagatgggccacgatcccaacgcgatggacgaggatggctacacgccgctgatgcacgcggccgccgcaggcaagctggaggcgtgcagggcgctggtgtcgcgcggcggcgccgccgacgcggggagcgagacggcgctgtcggtggcgaggaggagcggcaggtcgaacaaggcgacggaggagtggctgctggaccacgtggcgcgcgcccacgtgctcgccggggaggagctgacgaagcacacgcgcgggggccggggtccgccgcaccgcaaggcggtgcggatgatgcggtccggcgtgctgacgtggggggcgacccgccggaggaacgtggcctgcagggaggcccgggcggggcccagcgcggcgttcaggaggaacaggaggatcatcaggacgggcagcgaggagcagctgatcctaatggtggagacggtgaccgggagggagatccacttcgaggccacctccgcgtccagcgtcgagctatgggtcagaggcatcaatctcatcgtgcaagactgcgcgtggtcaaggccggatgaagctgagcaagcatag

SEQ ID NO: 11018 - DNA, 2379 bp, Oryza sativa
  Clone ID: TFbOSC900205j.C1.o26.fg
atgtcgcggcgcagggcggccgctgtggcggcggcggcgcgggaggaggaggaggcgtcgcccgctcagcgtctcgtggaggctgccctacggggggacgtggtgaccatggaggcgtgcctggcggccgccgccgccgctgccgcagcggacgacgacacggacgatggcgtgcccgcggcgagccgcgtcggggtggcgcgcctgcgggtgaggtgcgctgaggtggccctccgcgaggaggcggccggggaggtgatcgtggagtcccgcgagctcaagaccgacgtctcgccgctcttcgccgccgcgcacgccggtcatgccgaagttgttcgcaccctcctgagtggaggtggtggaaaggtggctggtgtatcaagttgtaaaaaagtatactgctcggtatttgaggttgctggagctgatgttaatcaaaagttatttctaggctatgcaacaacagctgccgcacgtgaaggaaacatccatattctagagatgcttctgcaggctggagtcactcgggaagcttgtgaagattccctatcagaggctgctctttttgctgaggctgaagccgttcggctattagtctgttcagagatgatacagcctgaagctgcagcacatgctttggtgactgcttcttcaagaggctttgatgatgttgtggtcatactactgcagaatggggttgacgttaattccatggctagggtcctcttgaggtctgttaagcctgcactacatgctaatgtgaattgcactccactggtggcagcagtaatgagccggcaaatttcaactgtgaaactcttgattgaggaaggctcttacttggactgtcttgtgcaagttggttcttggtgttgggactctgcaacgggtgaagaacttcgtgttggtgcatgccttggggaaaaatacaacgccatttggtgtgcagtagagtactacgaatgcagtggtgaaatcctcaaattgctgctcgataaagcaccatggttgctggaaaccccacgcaagggtcgaaatcttctttgccatgccatactctgtcagaacccgaatgcagtaagcgtgcttctaaatgctggtgccaatcccagatttcccataatgatgacaaacggcacacacgtctcctacccaatacattttgctgcaaggttgggtcatgcgcccgtactgaaacaactcatgttggatggggctaatatcaatgcgcagacttctactggggacactcctctgatggtctctgcgaggtgtggacactccgattgctttcttgaactgatcaaatcaggggcagaccttgggatagtgaacaatgcaggtgacacagcaataatgcttgctaagaaaagctcatttagctcaaccatcatcgacattctttccagagcattgagttgcggaggctgcatcacttcatcggatatcaccgtcttctctccgctgcacttcttcgctgcaagtgacagtgcagaagctcttctaatgacgctacactactcagcagcagatctgaacaggcctgatggttcagggctcactcctgttatggttgctgcagagtcaggccatgctgacattttcaggcttctagtgatggcgggggcagatatcgctgccacgagtgccgaagggaaatccgcgatgtcgatcatccgaagcagagctcctgaaaccagagatcggttcgaacagatcttactccaggcttcgctcgcggatgcgatcgcaggccagcagccatctttcagacccctgcactacgcggcccggatcggcgacacctcctccctgacgcagctcctgaagatgggccacgatcccaacgcgatggacgaggatggctacacgccgctgatgcacgcggccgccgcaggcaagctggaggcgtgcagggcgctggtgtcgcgcggcggcgccgccgacgcggggagcgagacggcgctgtcggtggcgaggaggagcggcaggtcgaacaaggcgacggaggagtggctgctggaccacgtggcgcgcgccccacgtgctcgccggggaggagctgacgaagcacacgcgcgggggccggggtccgccgcaccgcaaggcggtgcggatgatgcggtccggcgtgctgacgtggggggcgacccgccggaggaacgtggcctgcagggaggcccgggcggggcccagcgcggcgttcaggaggaacaggaggatcatcaggacgggcagcgaggagcagctgatcctaatggtggagacggtgaccgggagggagatccacttcgaggccacctccgcgtccagcgtcgagctatgggtcagaggcatcaatctcatcgtgcaagactgcgcgtggtcaaggccggatga

SEQ ID NO: 11019 - DNA, 546 bp, Oryza sativa
  Clone ID: TFbOSC26895j.C1.o1.gm
gagttcagggcgtaacaactgcgctgcttgatggcatagaccaagatcgcagaacggactacacccaacggcccgacaacaatgggatgttccccatacacatagctgcttctgttggttcaatggacacaatcacctcattggtcaatgccgatcaagactgtgccactcttcgtgataatgttaaaggtagaacattgcttcatatcgccattgagaatcggaagtacaaagtagtcaaattggtgtgcaaagatccgaggttcaaggaaactctgaatttggaggacaacgacggtaatactgcattacatcttgctgtaaagaaaagagacgagtacatcttcacgtatctcctacagaataaggccgtggagctcaaccatgtcaacctagaaggctatacaccactcgatcttgcaaaagtgataaggatggaagactactttgcctctccccagaacccaacagaatggatggtgagggtattggctcattctggagccgtcttcagtcctcgtaggcgtgatgaactgatccgtggtg

SEQ ID NO: 11020 - DNA, 824 bp, Oryza sativa
  Clone ID: TFbOSC418633j.C1.o14.gp
catcaaatccgttccctccttttctttccttttcccctcaatgtatctacaccacaacaaggatcttataacccagagtaacgtggtcactgatttgtgggcccgtgagtaatgacacgtcacgcttccatcgatctacaccggctatgcccgccgctatggtacaccgcaaaactcgcgcgcaaatgcggagttgaggagaaaacgtgcaacccttcactgccttgcctccgtgccgccgtcatcgccgccgccgccgacgacgaggtagagcttctgcccgtcgtggaccatgtcgacgtcgagcactctggcgccgtcctcgccgagcagccggagcccctcgccggagccggcgaggccgagcttctcctgcgccgagctgacgagcccctcgatggtgtgcgggatccacaccaccaccccttcccgccgccgctcgccgccgtcccacgggtgggggccggaacaccggagcaccgccgcgggtgcatcttgtcccgcacctcctcgccgcgctccgggtacctggagagctcgccggacttggccgcctccagcagctgcaccatcgtccggctcccgcacctgcgcccttcgtccagcggcgtcgtgccccaccggtcggtggcgaacacgctggcgccggcgtcgacgagcagcttcgccatcaggtagaggccctcggcggcggcgatgtggagcggcgcgcggtggtcgtagtccctcgcgttcgggtcgccgccgtaggcgagcgcccgccggacgaagtccgtgtcgcccctcgccaccgccgtgcacaggtggctcccggcgttctccag

SEQ ID NO: 11021 - DNA, 1254 bp, Oryza sativa
  Clone ID: TFbOSC401428j.C1.o1.fg
atgcgccacatagacatatacactctttgtttggaccggttcctctatcctaggaaaaccaggggagatagcttgactctgactggtatgttgatggatgctgatgaatcctcagcgtatcagcctgacgacaagggttctttccccatccatgtcgctgcagcagagggtaatgatggcacgatcaacatactgctcaataagagccccaattgtgccaccttgcgcaatgcccagggaagaacatttctgcatattgctgttgagaacggaagacacacaatcataatgtttgttcgcaggagaagaaggctggcagctaaaattatgaatttgcaggacaacgatggaaacaccgccctacacttggctatacaagatggggatctgcatgctgttttatgtctattgatgaacccagtagtaaaagttgattgtctgaacaaggagggtctaacacctctagatatatcaaggaagctgataccagaagggcttcttcatggatcgcatcaacgaatttggataaagaggtcactacatcttgcgaatgcacatcatgctaacccttcccttgaccatcgtcaagagaagtgcatttgccgaacggtccgtgaggaaagagattctaaaatagttgaaaaagatgacgatgaacaagaagattcaaagacaattacggagtctacacaagttatggccgtctgctccacactcattgcaactgtggcattcgcagcagcttttacattgcctggaggttatagagcagatgatcacaccaatggcggcacgccgacattcgtcggaagctacggtttcgatgcattcgtcttggccatcacatttgcattcgtctactccttgttggctacatttagcctcgtgtattcaggaatgaccaaagttgactacagcatccgcttggagcaccttaactcggccaatagcttggtctggctatcaatcaggtgcttgctagctgcatttgcattaggtttatacgttgtcctggcaccagttgctcacaagactgccttgcttatctgcctcatgtgttccgttgggttattgcacgggcatacgtcaatgaagacacagatccgcatggccgtgctcttacagggaaggattgggtttaaggtgtggtggattttgggcaggaagatacttcgaaactttctgcactcattttggcccttcctgattatctttggttgggcagcttatctgaaatggaggcaccaacagtag

SEQ ID NO: 11022 - DNA, 1173 bp, Oryza sativa
  Clone ID: TFbOSC900359j.C1.o1.fg
atgcgccacatagacatatacactctttgtttggaccggttcctctatcctaggaaaaccaggggagatagcttgactctgactggtatgttgatggatgctgatgaatcctcagcgtatcagcctgacgacaagggttctttccccatccatgtcgctgcagcagagggtaatgatggcacgatcaacatactgctcaataagagccccaattgtgccaccttgcgcaatgcccagggaagaacatttctgcatattgctgttgagaacggaagacacacaatcataatgtttgttcgcaggagaagaaggctggcagctaaaattatgaatttgcaggacaacgatggaaacaccgccctacacttggctatacaagatggggatctgcatgctgttttatgtctattgatgaacccagtagtaaaagttgattgtctgaacaaggagggtctaacacctctagatatatcaaggaagctgataccagaagggcttcttcatggatcgaagtgcatttgccgaacggtccgtgaggaaagagattctaaaatagttgaaaaagatgacgatgaacaagaagattcaaagacaattacggagtctacacaagttatggccgtctgctccacactcattgcaactgtggcattcgcagcagcttttacattgcctggaggttatagagcagatgatcacaccaatggcggcacgccgacattcgtcggaagctacggtttcgatgcattcgtcttggccatcacatttgcattcgtctactccttgttggctacatttagcctcgtgtattcaggaatgaccaaagttgactacagcatccgcttggagcaccttaactcggccaatagcttggtctggctatcaatcaggtgcttgctagctgcatttgcattaggtttatacgttgtcctggcaccagttgctcacaagactgccttgcttatctgcctcatgtgttccgttgggttattgcacgggcatacgtcaatgaagacacagatccgcatggccgtgctcttacagggaaggattgggtttaaggtgtggtggattttgggcaggaagatacttcgaaactttctgcactcattttggcccttcctgattatctttggttggccagcttatctgaaatggaggcaccaacagtag

SEQ ID NO: 11023 - DNA, 3717 bp, Oryza sativa
  Clone ID: TFbOSC401095j.C1.o7.fg
atggctcaggagtaccagacaatgccttcttctgctcacgacaagaggtactcaggactgtcgaatggtggtgacaaagaacaattgccatctcaaggtgtttgtgtcactctttcatgtttaacggttggaaaatcagaagttcctttgactactagatttgatgggaatgcaatgcaagtagatggactcctaaaaaatgtttctcccacaactaagattgtggtgaaaccaaatgaggagttgaagtcaccgttcttggtaaagcgccacctatttcttaagaggcctgatcctattatactagacgaattgtacagcttgactacaaaagtaaccgatgaagagtccagacagtctgtttgggtatcaggcaacctgccgatcaatttaaagcttgtagatatccaggaaacaataaaacctgaaggagtcatgggtataaattgcatggacttggctgttagaattatgtcaagacaggatgctgaaatttttaaaaacacaaaatgtctaggttggaggcattatgttgattcaaattggaagcaatatatcaatgatcccaacaatctgaggaacgagtattcccgtttgtctactatgtatgatccttcaggttcacatctggtattaatccctgtatcatctgatggccactggactctatatgctttcaacatgcatgataagaagctctgcattctggattctcgacgagataccagtgaaggcggtgatcaggatccagtgaagcgtcatgagaaaatccgaaaagaagtctgccatgctcttaacgaaaccatggatgttgatttcaattttctctcttggaagcatgagtttcccaaagtgcctaggcaacagaacagttgtgactgtggattctttgtattcaattttatgcgattatgggatggtcatcgactgattcggtggttttcaactgaaacaaaggagttgcggaagaactttctagcatacatactctccagtttggatgatcattcagtcctgcctactaatgtctctgagttgatcaaaaagctccctggggaaacaatgatgaatgttgagctattagaagctgcacgggcaggcaacgcaaatgcattttgtgaacttgttatagatcctgcaagaagtattaatcatgagcccttcagatctgcctcctgttcttgtcttctttttcggagcacatcatctggcagctattgtctctgttttgagtgcacatcctcacgcaattccgatcaagaaaagagtccaaacaagcataatgcattaacacgatcagatgcaccatcaacatttacgagagatacaagggacatgctacatgctattcagggtgtaacggttgaaggtgacggggtgctccacatcgctgcaagctttggtgttttggaacctgtgaaaaccgtcttggaagcgcagaatggagctttcgcaacggcgcttctgcaagcagagaacaacaaaggagacaggcccctgcactgcgcagccaccacagggagtatagttactgtcaaactcatcgttgatgaagctgagaaaattatgcgggcccaatccgatacctttgcctggtttctgcgtgcgaaaaatctcgatggccagacgtgcttgcacgaggctgtgcgccacggtcacgaagatgttgtgaaatatttggtttcgaaagatgcagatttgggggatgtcccgttgccgctggtgcagatagtggacaacgagggcacttctccgctctacttggcgaccacattacgcagagacagcattgttaaggtgctcacagaagcagcgccatcaggcatgcctagagccgcgtcctattctgggcctgcagggaaaacagctttacatgctgctgttctcttcagtgaagaactgagtagaacactggtgaattggaaccatagtctcattaagatccgggatgaatctgggagcaccccgcttcactatttggcagacgggaagtatactactgaacccagttgcatttctgttactgaacttctccttaagaaggatccatcgtcaggctactgtgaagattcagagggctcattgcccattcacattgctgctgcaaatggcacgcttggcatcattgatcagctgataaaattgtgtcctggctgtgagtcatcatgcaatgcttctggccagacaatcctccacatcgctgtccaaacggaaagccatgatgtggtgcgatttgtttgttcgaatgaaatgttcaaaatggttctgaatatgaaggattacgatgggaatacagcactccatttggctgtacagaagggacataacaagacctttggcattttgatgggatgcaagaatgtctctttaagtatcagaaacagaaatgggtatacgcctcttgatcatgccgtactgaacaaaacaagcggactgacgtatgccacatattggccaggtcaccagcgatgggtatgcaatagtttgctcgctgctggagctgattttggtactttccgtgcggaccatttgtccagcaagatcccagaacaagccaaggctgacagggaagcattctccgacacactgagcaaatctgccgcggtcatggccacatgcgcggctctgcttttcaatgcggcgcttaacatctttctgaatgtgcaagccatctaccacaacaataacaccagcaccaacaacaacaatgcaactcaaggaagcgatcagctcaagcaaattcagaaagttaagaaactcagtggagactcactgagcatctctgcatgtgccatccttttatttgcgattgctggatttcccatcttgcccggtgtcataggacgcacctttgctcttatcttgggactaggggtgctcattgggtcgtccatgattagcctgcaggcgttagcagcacggcttgatctagccaaggtttatggcacaggaatcggtgccttctgcgttatattttcgctgttgtgcgtaacgctgtgcaccaaccttttgcggaagatagtgcagcacgcgcgtccgctgtgggataggtgtggtgcccgtggattcttccgtagcattctgaatgtgcgcagagctcaaaactactctgccatcccgttgttgcaggttgttaatttgaaaacagtagaggagataactgaatgggagttgagaggagggaagggaaatggcagtacacgcatatggcgggatgagcctttttttttccttaatggagaagtggaaggaaagcgtatgtacacaaatggtctgatgggtggggagcagtggggatctagtaggttgatgggctttctaggcccgaatgccgtactattaagagggatcaacgccgaggtgtttgttgttggcctctatcggctagcacgacttgatctagccaaggtttatggcacaggaattggtgccttctgcgttatattttcactgttgtgcgtaacgttgtgcaccaacctattgcggaagatagtgcagcacgcgcgtccactgtgggctaggtgtggtgcccatggattcttctgtagcattctgaatgtgcgcagagctcagaactactctgccatcccgttgttgcaggttgtgatatctgtgcccagaaacggttgttttgtcttattgtgtgcagatggcttgaggtcagccttggttaatggtgaggaccgggactatgctcagagaggagtagaggtctag

SEQ ID NO: 11024 - DNA, 416 bp, Oryza sativa
  Clone ID: TFbOSC3151j.C1.o3.np
acaccgccagatatcaacatcagagattagcctagacaaacccaatccggtgcctatggtagccggtaagagggatctagcgctatctctgatctcgacgggttcatattcaaggaggaaaactaccccgtcatcgactacgagctgataaataaagagaaacaccggtttaggccaacaagatgtagggttattatctgtcagataagaggcccgaacctgcataaaaatccttgtctccatctcttttacctcaatctcgcatataccctggtaccaatgatccccataccatccaaataccgtagtcgcgatctcaaacgtcgacagcagctgcacaaggtggatgggtcggtggcggcgcgggcggagggcgtcggccgtcggccgcgacgacgaagactaccgcaggacga

SEQ ID NO: 11025 - DNA, 1128 bp, Oryza sativa
  Clone ID: TFbOSC3151j.C1.o6.fg
atggagaccccctccgctcccgctcccggggatggaaactcggctcccgcatcatctcgggtgacgtttgaggatatgcttcgcagctgcgatcagagttattatcaaatgctcgggttccctgacgctgcttcctacttcgaggcaaaggagcggaatttgttggctcagtactcgcgtcaggtattccctctgctatggcctatactggagaaggatagcctcacgcgcttcaatcgactttgccaagggtggtcgcgcttgatgggccttcgtggtttcatttacccggagattctcagctccattgtcgccaacaacgctttgcgctgtgccagagtggccctgcaaggcagctctccgttgcgcggacgtcgtgccgatcccaacggcctccatccttatggctacacggctctccacctggccgctgagacgttcagcgtcgaaatggtcaagctcctcctccgccacggtgcgtcagcaaaccaccgcactgagggcgactacgtcattgagggcctcctgcctcttcacgtcgctgttgagaatgccagcatgcacaaatacctggaggacaattgggctgatggccactctcctaacaacctcatatctctcctctgtctgccagagatgaagatgtatttggacacaactagattaattgcccaacatacgcataacattgtcgatgagttgtgggattacatcgataagaagaagtttgtccagttagcaattttgctgctggcttctcagaagcagctccatggccccataaataggagccgtggcaaggctaatctgaatgggtttgaatctattagacggcgcacttatgaagctatcagtggcctacatctccagatgatagctatggtgaatgaggggaaaaatggcagtgcgcttaagaagctgaaagagaagaaggaagcccttcttacagcagacgcactagttggtattatagacaaagctggtcaagatcttgaggattatattcagactaactcagagcccaccgtatgcaccaatatgtacaggcagaaatcacaatggatcctagacagaagtgattctgttctgcaaaataggggcaagaacgaaattatccctacaatttaa

SEQ ID NO: 11026 - DNA, 927 bp, Oryza sativa
  Clone ID: TFbOSC414138j.C1.o10.fg
atggccatggagacgccgccgccgttccaggagtccgcccactgcgacgtctgccgctgcaccttcaccaccttccgccgccgccatcactgccgcaactgcgggaggacgctctgccacgagcactcgtcgtaccatatggctctcccacagtacgggatatacacggacgtcagagtctgctatgattgcttcaacaaatcctccagtcgtggtggtgttggcaatgccggttcacctgggagtgtatctagtgcagctgactccttttcagggttaaacttgggggaagatgatgcttcatcacctatgaaaaattcagcgtttcacagtgcacctgctgttattgagtgcaaatgtggaatgcctttgtgtatatgcgaggctccgaaaccagaacctgtgcctgtaaagttttgtgtgcctccgcctaacgagcatatgcagcagagtatcagcacaacttcctcaagtgcacagtcgaatcctaggccaaaaaaatcttctaccaatcaacaatctgctgaatcaagtgtcaagaaggcttcggccacttcaagcagcaactcaagctcattcttaaatcttggcctgatgagcaatgatactaatgataagggtccttctgaatatgatgttactggggagggactgagggaagcaattaagagtggggatattaaagctgtcaagaaacttctcagccagggagtggattctaattactgcgataagcaaggatttgctttgctacatttggctgcactatttaaccagacagagattgctcttattctcatggataatggagcaaatattcagagcaaaaatggacaaggggaaactcctttggattgtgctccagccatgctgcaatacaagatgcgccagaggatggaagaacttgcggcatcacaacgaccctag

SEQ ID NO: 11027 - DNA, 576 bp, Oryza sativa
  Clone ID: TFbOSC100669j.C1.o3.fg
atgacgacgcagcaagcttctggtgcagatgcagagtcgggcatggatctggacggggtcaccactgaagggaacactgcactccatgttgtggccacctgcggtgatggcccgggctacttgaggagtgcaggcgtcatctacagcaggtcccaacatctcatgttagtgcagaacaacaacggtgacacacctctgcactgcgctgtccgggctggccattccaaaatggttgatcatctaattgatctggttgaaactaaggacaactcccctagcagcgcgagactggaggaactcctgagaaaggaaaactgccgtaaggagacggcctttcatgatgccgtctgcattggaaataaggatataatcaccaaccttcttaaatattattcagaattggccggcttccttatggatgcaacaggtacttcaccgttgtacctagctgtcttgcatcaacaggtcgacattgcaaagttattgcatcaaatgacagacgggaatctttcgtactctggcccaaatagacaaaatgcattgcacgcagccgttctacaagaccaaggtgtataa

SEQ ID NO: 11028 - DNA, 705 bp, Oryza sativa
  Clone ID: TFbOSC28292j.C1.o6.fg
atggatcccaagctgctcagagccgcaggccgcggcgactgcgcggtgcttgaggctctacttctgggcgccgccgccgccgccgccgcgacgccaaaccagcaagttgccatcgacgtcggctccgggcaacaatcgccgctcctcctggacgcggcgacgacaccacagggagactccgcgctacacgtggtggcggcctccggcgacggcgaagggtccctgcgctgcgcgcgcaccatctacagccacgccgcgcgcctcctggaccgccccaacgcgaggggcgacacgacgctgcactgcgccgccagggcgggcaacgcggcgatggtcaggtgcctcctcgacatggccagggaggaggagctcgccggcagcgcgggcagggtggccgaagtgatggagaggcagaacggccggcgggagacggccctgcacgacgcggtcaggctcggcgacaagcagctcgtcgaccatctgatttcggtgcatccccggcttgcccgtcttcccggcggcgacgggatgtcgccgttgtacctggcggtctcactgggccacgaccacatcgcagaggctctgcatcagcaaggggacgagctctcgtatgcaggaccggccggccaaactgccctgcacgctgctgtcctacgcggtgcagaattttcgttcatctatgccatccacgtcactcaagagtag

SEQ ID NO: 11029 - DNA, 1422 bp, Oryza sativa
  Clone ID: TFbOSC28292j.C1.o4.fg
atgacagaaaagatgctgcaatggaacgatggtctctccggcgaagccgacgcatccggcagcacagcgctccatttcgcagcctcagcggagggaccagagatcgagctcgagaagagctcactcctccggcggctcgccttgcgatggccgtgctcgcgcaatggccgccgccgccgccggacatcgactcaagttctcctgaaagccgacccgtccttagcctgccggccggacagcaacggcgagtaccccatacacgtcgccgcgtccatgggaaacctcaagctcgtggccctcctcctccacaggtgcccggagtgcgccggcctccgcgacgcccgcgggaggaccttcctccacgtcgccgtcgaccgggggagggaggagatcgtgggattcgccaccgacgacaggcggaggcgggacggctctcagctggcgacgcccatcctcaacgcgcaggacgacgacggcaacaccgcgctgcacctggcggtcgcgagcggtgtcctcaacgtgttctgctacctgctgcggaatcgcagggtttgcttggatcttgccaacaacgacggcctcactccggctgacctctcaaggtgtaccattcccgctgggcttaactacaaaacgaacgcacgaacgtggatactttggtccctggtggtagcgaaagccctcagcggcaacatccggcgcgatcacttccagcagcagtacgtacccaagctagacgagatcgccgagtccaagaaaatgacggagtcgacgcagatcctgggcgtcggctccgtcctcgtcgccactgtcgcgttcgcggcggctttctcgccgcccggtggctacgcggctggcgatggtaataataacaatggccgtggcaacgtcgtcgtcgtcgcgggctctccggcgctgtcggggaggtacgccttcgacgcgttcatgtacgccgtgacggtggccttcacctgctccatgctcgccacgttcagcctgatctacgccgggacggcggcggtggactggaagatccggcacaggtacttcaagcactccctgtcgtggatgcgcaagtcgacgaggagcttgctggtggccttcgcgctcggggtgtacctggtgctggccccggtgtcccgcgccacggcggtgggcgtctgcgtcttcaccaccggcacgctgctgttcaggaacagggaggtggtgcggatgctgatctgcgcgtacgtgctgcagaggaggatggggatcacggtgctcgcgaagattggggtccccatcaccgtcgacctggtgaagtccaatcttgtctacttggtcatcttcggtgggcccctttgcactccgctgtgcgttctgttctttgtttggaggctagcaccagtgattatgagatacgtccacagaaagttaatatga

SEQ ID NO: 11030 - DNA, 990 bp, Oryza sativa
  Clone ID: TFbOSC401769j.C1.o15.fg
atggaagaccagaagaaaaatgcaaaaccagaggggtcttctggctcgcaaaggggagctcccccggcacctgatgcaggccttcccaatccttttgatttttctcagtttagcaacttgctcaatgatccatctataaaggagatggcagagcagattgcaagcgaccctgtgttcacccagatggcagagcagctgcagaagagtgctcatgtgaccggggaacagggtggccctgcattggatcctcagcagtacatggaaacaatgacacaagtcatgcaaaaccctcaattcatgtcaatggcagaacgtcttgggaatactcttatgcaggatcctggaatgtccagtatgctcgagagtttgactagtccttctcataaggagctgcttgaagagcggatgtcccgtattaaagaagatccctctttgaaggggattcttgatgagatagagagtggtggtccatctgctatggtgaagtactggaatgaccctgaagttcttcaaaagattggtcaggctatgtcaattaattttccaggagatgctgctacttccactacattgtctggacctgaagaaactgaagaggatggtggagatgatgatgagtccattgtccatcatactgccagtgttggcgatgcggagggtctgaagaaagctttagaggatggagcagacatggatgaagaagacgctgagggaagaagggccttacattttgcgtgtggttacggtgagttgaaatgcgcagagatccttctggaggcaggtgctgctgtaaacgcactggataagaacaagaacaccccactgcattacgctgctggatatggtcggaaagaatgtgtggatcttctgctgaagcatggcgctgctgtcacgccccagaatctggacgggaagacccccatcgaggtggccaagctgaacaaccaggatgaggtcctcaaggtgctcgagatggacgctttcctataa

SEQ ID NO: 11031 - DNA, 525 bp, Oryza sativa
  Clone ID: TFbOSC400284j.C1.o44.fg
atgggcggcgacgcggcggccagcgttgtgaacgggaaggacgaggaggggtgggcgccgatccacacggcggcgagcagcggaaaagctgagatcatctccatcctgctcgatcaaggtgctaatgttgatttgacaaccgatgctggccggactgctcttcattatgctgccagtaaaggacggcttaatatagcagaaacactaatagcgcacagtgcaaatgtcaacaagaaagataagtttgggtgcacacccttacatagagctgccagtacaggaaatgctgaactgtgtgaattcctaattgaggagggggctgatgttgatgcagttgacaaaacaggacaaacaccactaatgcatgctgttatttctgaggacaaagcggttgctcttctgctagttagacatggtgctgatgttgccattgaggacaaggaaggctataccgtacttggtcgagcatctgatagctttagacctgcactaattgatgcagccaaggcaatgcttgaaggctga

SEQ ID NO: 11032 - DNA, 1251 bp, Oryza sativa
  Clone ID: TFbOSC34032j.C1.o41.fg
atggggaattcgcttggctgcgtggggcttggggagaggttggcggcggcggcgaaggacggcgacgcggcggaggcgcagcggctgctggcggcgaaccccgggctggctcggtgcaccaccttcggcaacctcaactcgccgctccatgtcgccgccgccaaaggccaccacgagataatttactgtaataatatgctcaatgatcaaatcacagacgagattgctgcattgctgctggagaatggagcagatgtgaatgcgaggaacatctatggacaggtgtggagggtggagaacctgagtgggcggacggcgctgcacatggcggcggccggcggacatgtcaagtgcgtcaggctgctggtggcggacgccgccggcgacagagacgggtacgtgaacaaggcggcgaacggcggcgtgacggcgctgcacctggcggcgctgcacgggcacgtcgagtgcgtccacctgctcatcgacgagcgcgccagcctcgccgcgcagacgctgccctgcgccgcgccgcccatggcatccatcggcgccggcagcacgccgctgcactacgccgcgtgcggcggcgaggtcaagtgctgtcagatactcgtgtcaagaggagcagacagaacagccatcaattgcaatgggattgtggtagtcaggtggctcccaatcgacgcagccagaatctggggctgcaactggcttgaacacgtcctctcccccaagtcgcatcttccgatccccaagttccctccttccggctacctctcccagccactccccagcctcatcgccattgcaagggagcaaggtctgaacttgtcttcggaggtttctgatggcttcgatgaaggagcagatgcctgcgccgtctgtcttgagaggccctgcactgtagctgctgaaggttgcgatcacgagctgtgcgtgaaatgcgcgatggatctctgctcggtgatcaaatcctacgactcggcggggatcgccggcgagatcccgtgcccgctctgccggaccgggatagcctccttccggacaaccgccgccccgccgccgccgagcctcgccgggtcgcccgcccgccgcagccgccgcaacaactccggcggcggcggcggcgagcacgaggcctccaactccggcggcagcgagaagggatacggcagcatcgaccccgacgccggcgccgtcgtccccctctactacgcgccgcccttcgcgccttctgccatcctgacctga

SEQ ID NO: 11033 - DNA, 2379 bp, Oryza sativa
  Clone ID: TFbOSC9742j.C1.o4.gm
atggatttcggaccttgcaacgagacgctcgacaccgaactgctacacgtgctgacctccggcgacgaggtccgcatggcggacctgctgggcagagaacgccgtggccatggccactccctgtcccaggtggcgatacgcgtcgacgacgacgacgacggccgcgcgccggcgggagcgagccgcctccttggcgtgacgacgggcaacggcaacacggcgctgcacgtggccgccacccgcgggcacgccgcgctcgcggcgctggtctgcgcgacggcgcccgcgctggccgccacgcgcaacaggttcctcgacacgcctctgcactgcgcggccaagtccgggcaccgcgacgtggcggcctgcctcctgtcagagatgctgcgagccggcggcgcggcgtcagcggcgctgccgctgcggcgggcgacgaactgcctgggcgccaccgccttgcacgaggccgtgcggaacggccacgccggggtggtggctctcctcatggcggaggctcccgagctggcctccgtggccaacgacggtggcgtctcgccgctgtacctggcggcgacggttggctccgtggacattgtccgggcgctgctccacccgttgcctgatggaacgccctcgccggcctcggccgctggtccggacggacggacagctttgcattctgcggcaactactagcaaagagccctccctagctctggtttgtgatatccaaggatcatttcctttgcatgttgctgctgtgatgggcagtgttaggatcgtcgttgagctcatacagaaatgccccaacaactacaacgatttggtcgatgatcgaggaagaaattttctgcattgtgctgttgaacataacaaggaaagcatagttcgctacatttgccgagatgacaggtttggtatcctgatgaatgcaatggacaatgaaggaaatactcccctccatttggccgccgagtatgggcacccaaggatggtcagtttactcttggagacgatgagcgtcgatgtagccattaccaacagggatggtctaactgctgctgaccttgcttatcgccatctgcaacctggtttgcactattttctgaatcctcgagccgtggtaaagaatctcttctactgcaccagagcaccggttaccctagaaggggatcatgctaggactggcatcccatcggccatggaggatgccgatgctcccaaggacagtggtggcgtgacatccaccggaacagtcgcgtccgtgctgatcgccacggtgacgttcgcggcggctctcaccgttccggggggctacgtcgccgacgaccacccgaacgccgggacggcggcgtcggccgggcggttcgccttcagggcgttcgcggtgtcggacaccatggcgttcctctgctccatcgtgggcacctgcctcctcgtcgtcggcgaggcgagggaggtccggccgagcaggggccgtctccgcgcctaccaggggtcggcgtgggcgctcgtgacggccggggcgcagttcatggtcgccgcgttcgcgttcgggctccaggtcgcgctcggcggcggcgcggacagccggtggctggtggtgttcgtccacgcgctgtgctcggcatcggtgctgctctgcttcccgggcatctgggcgccgttctgcctcgggaaggcttgcgtcgacctcgagccggccacgcgggcgtggaggtcgccgaagtgcgcggcggcatcagcgagaaaggaggcttgccatgcgggaacgcggaggtcgtataactggcggttcagcttcttccagcgcttccgctcggcctccacgtggctggctctgggcttgttgggacacggccgccgcccaccactgcctgctctgatcctcgccataggagccaccgctggcagtttgccgccttatcagcgactccccgtcgccaacgcgtccctccctcagttgccttcaccagcccagcgacaactccacggtggtagcttggtaggagggagagcaactgctaaagtgtcaaagctctccagggggtcgacggaggagtggaggaaggtgacatcggaggcacggaagttgtcgaagcacaacgtgttctgttgggcgtgcctcgtggacgacaaggccgtgccttggctgctatgcttcctctcctccaccaccgccgccatacaggataatgccgtggcgtcgctgctcaacctcttgaagcaccccgccgggcagatgaccatcatggaggtcggaggcgtcggcctcgttgtcgacgtgatcaacgtcgttgccaaggccgtggcgcagcataacgtagcggccatcctcttctacctctcgtcgaacaacccggatgcatcccggaggtga

SEQ ID NO: 11034 - DNA, 2358 bp, Oryza sativa
  Clone ID: TFbOSC400283j.C1.o61.gm
atggcagtgctgctgcggccggcggcggcgatcgccggcgggcggcaggtgtggccggtggcggaggaccaccaccggcagctgcgggacgaggcggaggcggaggccgcgtcgcagcggctggtggaggcggtggcgcgcggggacgcgagggaggccggggagctgctcgcgtccggccgcgcggacgtgaactacgccggggtggtgtggctcaaggcgcggcgggtggcggaggccgcgctgcgggacggcgccgccgctgagctgcgggcggcgcacgaggagatccgcgccgacgtgtcgccgctcttcctcgccgccggcaacggggacgccgcgctcgtccgtgcgctgcttgcagatgagctcgcacgggccacggccatgagggcctctgcgaagggggcggacgtgaacggcaaggtgttccgtgggtacccggcgacggccgcggcgcgggaggggcgcgcggaggtggcggcgttgctggtgcgcgccggggcgtcgcagccggcgtgcgaggaggccgtcgtggaggcggcgctgcaggggcaggccgccctcgccgtcatcttcatgggctccgacctcgtccgccctcgcgtcgctgtgcacgcgctcgtgtcggccgccgcccgcggcttcgtggacgtggtggactcgctcatcaagtgtggagctgacccaaatgctacttctcgggtgctcctgcgctctctgaagccttctctgcatgccaatgtcgactgcacggcactcttcgccgcgatcgtcagccggcaaatcgccgtcgttcgtcagctacttcaggccggagtaaagagggacaccaaggtgaggctgggagcgtggtcatgggacacggccaccggcgaggagctgcgcgtcggcgccggcctcgcggacccctacgacgcggtctggtgcgccgtggagtactacgagtccaccggcgccatcctccgcatgctcctccagaacgggtactcgtcgggcgccacccatctcggccggaatctcctccaccacgccgtcctctgcggcagcgccggcgcggtgcagacgctgctggcgtccggcgtggaccacgaggtggccgtgaagacgtccaggagctccaggtccaggcctgttcacatggccgcgcgcctcggccagccggagatcctggagatgctgataggcaagggatgcgacgtgaacgcgagggcggagggcggcgacgttgcggccatactcgccgcgcgccacaagcgcgaggattgcctgaggatcctcgtgtccgccggagcggacgtcgcgctgttgaactcggccggcgagtccgcggcttccgtcgcttgttccgggggctggaaggccggcttcgagcgcgccgttcttggcgtgattcggtccgggacgatccctcggtcgagcgaccggaacgtgttctcgccgatgatgttcacggcgcgctgcggtgacgccgccgcgatggaagttctcctggcccagccagacgtggacgtcgacgagcaggacgtggacgggtgctccccgataatggccgcggccaaggagggcaacgtcgacgccttccgcgcgctcgtgttcgccggcgccaacgtgaagctgagcaacaagcgcggcgagacggccatcgggctggcgcagcagagcaagaagagggacctgttcgagcaggtcatgctcgagttcgcgctggagaagggcatgccggggggcttctacgcgctccactgcgcgtcccggcgcggcgacaccgcggcggtgcgccacctggcgagcgcgggctgcgacgtcaacatcccggacggcgacggctacaccccgctcatgctggcggcgagggaagggcacgcggccgtgtgcgagctcctcatctcctacggcgcgcggtgcgacacccggaccccgcgcggcgagacggcgctctccctggcgagggccaccgcggcgttcaacaaggccgaggacgtgatcatggacgagctgggccgccagctcgtcctcgggggcgcccacgtcaagaagcacaccaagtgcgggcgcggcaagccgcacggcaagtccctgcggatggtcgccgcggcgggcgtgctccggtggggcgggtcggggcggcgcaacgtggtgtgccgggaggccgagctcggtggcagctcggcgttccagctgcaccggcagaggcggggctgcgacgcgtacgagcccgggctgttccgcgtggcgacggcgacggggagggaggtgcacttcgtgtgccagggcggcgaggaggaggcggagctgtgggtgaggggcatccgggcggtgaccagggcggtgtacggcaagagagggaaggagtga

SEQ ID NO: 11035 - DNA, 2088 bp, Oryza sativa
  Clone ID: TFbOSC900133j.C1.o13.fg
atggattccaagaagacgacgacgcagagcgagccgaacgatggggtgcaggcgccgcatcgtcccgagctgctcatggccgcccgccacggcgatcgcgaccggctgaaacgtcttcttggcacggtgtcgccgccggtggcattgccggttggggaggtcgtcctccatgtcgaggacgttgaaaccgtcggtgtgggtgtcgacgacgacgacgacgccgagcctacagctgcggtggtaacatcggcggaggcggtcaccgtcgcgctggactccgtcctccacgtggtggcgtccagcggcgacgagcccgcgttcctggagagcgcgacggcggtccacgccagggccagccacctcctcgacgccggcaacgggaagggcgacacgccgctgcactgcgccgccagggccggcatggtcaggatggtctcccatctcctggacctggcgaggaggggcggcggcggcggcgtcgcgggcgacgcggcggcgagggcgttcgcgaggaggcggaacagcaagggagagacagcgctccacgaggccgtccgtctgggcagcaaggcgatggtggaggcgctgatgtccgccgaccctgagctcgcccgcgtcgtggcggccgacggcggctcgccgttgtacctggccgtctcgctggggcgccgcgacgacattgcacggctgctgcatgagcacgacagggggctctcgtacgctggaccggacgggaataacgccttgcacgccgctgttcagaaaggcaaagaacgatatgagttcaatgatttatcgatttcagagacgacgaaaatgatactaggatggaacaaggatctcatcaagcaagccgaccggcacagagggagcacgcctctccacgtcgcggcgtcatgggggcaccacgacgtcatcagcttgctgctcgatgccgacccatcggcggcgtaccagcctgaccacgacggcgcgttcccgatccatgtcgccgcctacgacggccaggtcagggccgtctccatcctgctcgggctcgacaaccaccgcaagtgcgccgggctgtgctcgggggagcgcaggcgtcgagacctaagaggctgcgccgagctccgtgacggccgcgggcggagcttcctccacgtcgccgtcgaggagcagcggcagtccgtggtcgcgtacgcctgcaagctcgggaacctctcgccggcggtgatgaacatgcaggacgacgacggcaacacggcgctgcacctcgccgtcaaggccggcaacatgtggatcttcaaccctctcatggagagacgccaggtcgagctcaacttgacgaacaataagggagaaaccccgcttgatatttcttggatcgagaaaccagttggtgtttatttcggattgaatcaacgggtcaagatatacaagttgctgaaagatgccaacgccaagcaaggtaatcaccgatgggatctctttctcaaaaaacacaacaagaaggtagacgaggaggttgaagggaagaagctgacggaatccacccaaaccatcggcgtcggctcggtgctgatcgccacggtggcgttcgcggcggcgttcgcgccgccgggcgactacggcgacgatggcgcgccgaggctggccggccgctacgccttcgacgtgttcatcatcgccaacacgctggcgttcatctgcgcggggctgtccgtcatcagcctcacgtacgccggggtggccgccgtcgacatgcgcacccgcatgatctccttcgtcttctcggcgtcgttcatggcgtgctcggcgaggagcctcggcgtggcgttcgcgttcgggatgtacgtcgtgctggcccccgtggcacgcacgacggccatcgccgcctgcgtcatcacggggctcgcgctggccgacgtcgcgtggttcgtctttgtggtggccgccggcgaggtgatgctgctcaagaggctcgggattgcacgggcgtggtggcggctgccgttcgccatcatggccaccttgctgatgcaattctggccttacattgtgattgttgtcgtggtgttgtactccaagattaggggagtacattga

SEQ ID NO: 11036 - DNA, 2832 bp, Oryza sativa
  Clone ID: TFbOSC400795j.C1.o4.fg
atggcgaggtggggcgccgctcggatggcggcgtgcgggccgtggggccgcaaccggagggtcggcgccggcgacgcgttcgaggccagcgaggtgaggcgggacgggcgcagcaggatgatgcccgcgtgcgggccgtggggggcgggccatggcggcggggacccggcgctcgagagggagctgtcgcgggacggcagccactacagcatctccagcgccatcctcccgtcgctcggcgcgcggagcaaccgccgcatcaagctccgccgcttcatcatctccccctacgaccgccgatacagaatctgggagactttcctcatagttcttgtagtctactctgcgtgggtctcaccatttgaatttggcttcattccgaagcctacgggggctctagctacagccgacaatgtggtgaatgcattcttcgcggttgacatcattctgaccttctttgtggcttatttggataaaatgagctatatgcttgaagatgatccaaagaagatcgcatggcgttatagtaccacatggcttgttcttgacgtggcctccaccatcccatcagaatttgctcgcaggatactaccttcaaagcttaggtcatatggatttttcaacatgcttcgtctgtggcgtctccgcagagtcagctctctgttttctaggttggagaaggatagacacttcaattacttctgggttcgatgtgcaaagctcatttgtgtcacactttttgctgtgcactgtgcggcatgcttctactatcttcttgctgataggtaccccgtcccaacttctacgtggattggcaattacatggcagatttccatgaacggagcttatggattcgctacgtaacatcagtctattggtcaatcaccactcttaccaccgtgggctatggggatctacatgcagaaaatacaagggagatgatcttcaacattttctacatgctctttaaccttggtttgaccgcttatttgatcggtaacatgaccaatttggttgtccatggcactagtcgtactcgaaactatagggatacaatccaagcagcaacaagctttggagtaagaaatcagctaccacctcggctgcaagatcagatgatttcacatattagcttaaaatacaggacagattcagaaggtcttcaacaacaagagatccttgattcactgcctaaagctattaaatctagcatttctcaatatctgttcttccatctggttcaaaatgtttacctgtttcaaggagtctcaaatgatctgatttttcaactgttgcgtactgttacagaatatgcttatctggttcttttacttgatttcgtttttgaggtttcggagatgaaagctgaatattttccacctagggaggatgtgattttgcagaatgaagcacccactgacttctacatcttagtttctggtagtgtggtgatacaagtggctacgtcaggagaggttgttggagaaattggggttctttgctacagacctcagctattcacagttcgaacaagatccttgtgccagttgttgcgtttgaatcgtacagcttttctcagcattgttcaatccaatgttggggatggaactatcataatgaacaaccttattcagttccttaaagagcagaaggagaacagtgtaatggctggtgtcgtaaaggagatagagagtatgctagctcggggaaatctggatttgccaattacactctgttttgcagtaactagaggagatgattttttgttgcatcaacttcttaagcgtggtatggatccaaatgagtcagataatgacgggcataccgcactgcatatagctgcttccaaaggaaacgagcaatgcgtcaggcttctattagaatatggagctgatccaaatgccagagactcagaaggaaaagttccactgtgggaagcgctgtgtgagaagcacgccgccgtcgtgcaactattagtcgaaggcggcgcggatctgtcgtcgggtgacacgggcttatacgcttgcatcgccgtggaggagagcgacaccgagctgctcaacgacatcattcactacggaggcgacgtgaacagggctcgccgggacgggaccaccgccctgcaccgcgccgtctgcgacggcaacgtccagatggccgagctcttgctggaacacggagccgacatcgacaagcaggacggcaacggctggaccccgagagccctcgccgagcagcagggccacgacgacatccagctcctgttccggtcgcgcaaggcggcgacggcgagtggccaccatcacgtcccaagctccaccaccaccagggtggcgccggcggcggcggcggcatcactgatcgggaggttcaacagcgagcccatgatgaagaacatgatccacgaagacgccgacctgcccagccgggttctccccgagaagctccggaggaagcgggtcaccttccagaactccctcttcggggtcatctcgtcgtcgcaggcgcagcgggagaccgaccacccgctctcgaggggtggcctcgcggcgacgggctccccgaacccgagcagcggcagccgcaacgccgtcatcagggtgacgatcagctgccccgagaaagggaacaccgccgggaagctcgtgctcctgcctcagacgctggacatgctcctcgagctcggcgccaagaagttcgacttcgcgccaaccaaggttctcaccgtggagggcgccgaggttgacgaggtggagctcatcagagacggcgatcatcttgtgctcgtcagtaatgaatgggatgcagagaagatgaaaggcaagagctag

SEQ ID NO: 11037 - DNA, 2334 bp, Oryza sativa
  Clone ID: TFbOSC4903j.C1.o2.fg
atgtcgcggcgcagggcggccgctgtggcggcggcggcgcgggaggaggaggaggcgtcgcccgctcagcgtctcgtggaggctgccctacggggggacgtggtgaccatggaggcgtgcctggcggccgccgccgccgctgccgcagcggacgacgacacggacgatggcgtgcccgcggcgagccgcgtcggggtggcgcgcctgcgggtgaggtgcgctgaggtggccctccgcgaggaggcggccggggaggtgatcgtggagtcccgcgagctcaagaccgacgtctcgccgctcttcgccgccgcgcacgccggtcatgccgaagttgttcgcaccctcctgagtggaggtggtggaaaggtggctggtgtatcaagttgtaaaaaagtatactgctcggtatttgaggttgctggagctgatgttaatcaaaagttatttctaggctatgcaacaacagctgccgcacgtgaaggaaacatccatattctagagatgcttctgcaggctggagtcactcgggaagcttgtgaagattccctatcagaggctgctctttttgctgaggctgaagccgttcggctattagtctgttcagagatgatacagcctgaagctgcagcacatgctttggtgactgcttcttcaagaggctttgatgatgttgtggtcatactactgcagaatggggttgacgttaattccatggctagggtcctcttgaggtctgttaagcctgcactacatgctaatgtgaattgcactccactggtggcagcagtaatgagccggcaaatttcaactgtgaaactcttgattgaggaaggctcttacttggactgtcttgtgcaagttggttcttggtgttgggactctgcaacgggtgaagaacttcgtgttggtgcatgccttggggaaaaatacaacgccatttggtgtgcagtagagtactacgaatgcagtggtgaaatcctcaaattgctgctcgataaagcaccatggttgctggaaaccccacgcaagggtcgaaatcttctttgccatgccatactctgtcagaacccgaatgcagtaagcgtgcttctaaatgctggtgccaatcccagatttcccataatgatgacaaacggcacacacgtctcctacccaatacattttgctgcaaggttgggtcatgcgcccgtactgaaacaactcatgttggatggggctaatatcaatgcgcagacttctactggggacactcctctgatggtctctgcgaggtgtggacactccgattgctttcttgaactgatcaaatcaggggcagaccttgggatagtgaacaatgcaggtgacacagcaataatgcttgctaagaaaagctcatttagctcaaccatcatcgacattctttccagagcattgagttgcggaggctgcatcacttcatcggatatcaccgtcttctctccgctgcacttcttcgctgcaagtgacagtgcagaagctcttctaatgacgctacactactcagcagcagatctgaacaggcctgatggttcagggctcactcctgttatgatatcgctgccacgagtgccgaagggaaatccgcgatgtcgatcatccgaagcagagctcctgaaccaagatcggttcgaacagatcttactccaggcttcgctcgcggatgcgatcgcaggccagcagccatctttcagacccctgcactacgcggcccggatcggcgacacctcctccctgacgcagctcctgaagatgggccacgatcccaacgcgatggacgaggatggctacacgccgctgatgcacgcggccgccgcaggcaagctggaggcgtgcagggcgctggtgtcgcgcggcggcgccgccgacgcggggagcgagacggcgctgtcggtggcgaggaggagcggcaggtcgaacaaggcgacggaggagtggctgctggaccacgtggcgcgcgcccacgtgctcgccggggaggagctgacgaagcacacgcgcgggggccggggtccgccgcaccgcaaggcggtgcggatgatgcggtccggcgtgctgacgtggggggcgacccgccggaggaacgtggcctgcagggaggcccgggcggggcccagcgcggcgttcaggaggaacaggaggatcatcaggacgggcagcgaggagcagctgatcctaatggtggagacggtgaccgggagggagatccacttcgaggccacctccgcgtccagcgtcgagctatgggtcagaggcatcaatctcatcgtgcaagactgcgcgtggtcaaggccggatgaagctgagcaagcatag

SEQ ID NO: 11038 - DNA, 1206 bp, Oryza sativa
  Clone ID: TFbOSC406054j.C1.o11.fg
atgcggcaacaagaaggtggggatcaccggcatgtggcagctgatgatgaactcctcgcgcggctcagtagccagagggacaatgacaacgggagcacacctcttcacttggccgcatcaattaacgggttaccgtcggcactatatattcccatatgttctccgcgagttttggcgccgttgcggcggccaaagccggtggagctgctgctgaaagccaacgaattcgcggcgtaccagccggacaaccaagggatgtacccaatacacgccgccgcgtcggctggcagcctggagaccgtgaagatcctgcttgagaaacacccagactgcgccactctgcgagatgcgagaggaagaactttcctccacgctgctgttgagaagaagaggtttggagtggttaagtatgtatgccactggaagaggaaggaaagcatgatgcctctaaaatgttattatgcatgggatctaagagtccacatacgaacattgctattgaaattgggagctccatatggtgaaagtcagagccacatcttcaacaaaaaacgacacgccatcatcgtcgaccccaaatttaaaggaggcgaggaaaagatgttggagaatgtaacagctgcaacgcaagtcttggcccttttctccgtcctcatcacaaccgtgacatttgcgtcggttttcacgttgcccggaggctaccggtctgccggcgatggtggcagtgccgccggcacgccgttgcttgctgggcgtgggtgctacgctttcgatgcgtttatcctctctgacgctctagcattcgtttgctatttcatggctacgtccgtcctgctctatgccggggtgcctgcttataaactcgaggtccgcctccgccacattaattttgcatatagcctgatgatgaattctggaagaagcttggcggccgctgtagctttgggactctacgtggtgctgcttccaccggttggccgcaccattgcgatcgcgatcgctgccgcgatggtcatgcttgcacttctgctcagcaaggcatcagaaggcatcgagtctctcttcggcattgctattgcaagaaaccggaagctgtcaattcgagactctgtggtaggcttcactatatatgtgggggaacgctattggtccttcatcctaatcttcggcctcccagcaattcgtaagtgggcaagggcagggtaa

SEQ ID NO: 11039 - DNA, 1401 bp, Oryza sativa
  Clone ID: TFbOSC406019j.C1.o1.gm
atgttgtgctctgcttcggagcaagcacagctgttgctgaacgacaacctgaggagggtcctgctgcggattcccccgttgctgatgctgcaactggaggcgctgctgctgaaccttatgcgcgtcatgatgtggatccccccgctgcttttgctcacttaccaaataacggcgctcctcatggagaagaagaagaaggtcaagccactgatggcgcttctcattcacaacctcaaaccatcgacggcgctcatcatgcagaagatcaaaccgtctacgactttccaattgcacaagttgctatcaacgaagaagttggaggagctcaaaatattcaccgtgatccgcatgaaaataaggaaggagctcaaggccaagttggagccatcaacccccaacttcatcaccacaccatggcactttgtgcgaaaccgagtagcaatagcaaggagagaacagtacgagagcagaatagatgcggtcaccgccgaagggaacacggttcttcacattgctgcaagtagggggcacgcccatgcccctggtccagatgggacgagccaacaagaggacctgatcacagtgctctacaaggcgcgctggcacctcctttcttctctgaactcggagggagagacacccttgcaccgtgcagccagggcaggccacgtccacgccgttcagcgcatcattgccggagtgaaggaaaatctggaaaagttagcagaaaaccagctcatggacattattgcaacaaggaactgtgccggtgaaaatgctttgcatctagcggcaatgcacggcgatgcccaagttgtgacgacgttgttgaaatatgcgcgggatgcgcgtttgtcgtctgtgttgaccgaagccaataacgcatcggccctctacttagcggtcatgagtacatcgtggccaccgtcaaagcactattcgctcacgaatgcaatgatacgtcagctcaaggtccaaaagggcagaatgctctacatgctgccgcagttctccagaatagaggacagtgaaggaagcacagcgttacatatcgctgcgctgatgggccatgtcaatgttgttcgcttgctgataaaagccagccctgattctgctgatattcgtgacaaacaaggcagaacgttcctgcatattgcatgtgcagacgaaggatggcaacgacctactgttcgttacgttgttaaaaacccaatgctacatgaccttttgaattcacaagataaggaagggaatacgccgcttcatttagcagcgaatcatggaaagttcgtagatgtttatgctctgatatccagcggaaaagtgcatccagatattatgaatgcagagggagaaaccgcatttgatattgccaagaataccgttagcttcttcttcatg

SEQ ID NO: 11040 - DNA, 2199 bp, Oryza sativa
  Clone ID: TFbOSC400867j.C1.o7.fg
atgcttttcgccaagctcgatgactcgcccatgctccgcacgcagatacagtcactggaagaaagtgctgaaattctcagggagagatgtttgaagtttcataaaggttgccgcaagtatacggaaggattaggagaagcttatgatggagatattgcatttgcaagctcactcgaaacatttgggggaggccacaatgaccctataagtgttgcttttggtggacctgttatgaccaaatttacaattgccttgagagaactaggcacatacaaggaagtcctccgctcccaggttgagcacatgctaaatgacagattgctgaattttgtggacattgatttgcatgatgttaaggatgcacggaagcgtttcgacaaggctagcctcttgtatgaccaggttcgtgataagtacctgtcactgaagaaaggcacacgagctgacataacaactgccattgaagatggatacgacctattgcatcagatggagccatatattaatcaggttcttgcttatgcacaacaatcaagagaaagggcaaacaaggagcaagcctctcttgtagagagaatgcatgaatacaaaaagcagatagatcgggaaattcgtttatcaaatggtttgactgatgcccataatggtgatggaattcaaacgattgctagaagttcacataaaatgattgaggcagtgatgcagtcggcctcaaaaggcaaggtccagaccattcgtcaaggttacctctcgaaaagatcttcaaacttgagagctgattggaaaagaaggttttttgtccttgatagtcgaggaatgctgtactactatcgcaagcaaattaataggacacctggtggttgttccagtcacccaagaagcattggcaaccccactgaacatggttctgggttgctgagcagactattctcatctcattaccatggcattatacatgatgagaaatctgttgcacggcatactgtaaatttgctgacatcaaccattaaagtggatgcagaacaatcagatctgaggttctgcttcagaataatttcacccacaaaggtctacacactacaggcagagagtgcaatagatcaaatggattggattgaaaagattactggtgtcattgcatctttgcttagctcacaatccccagaacagtgttttctgctaagccctaagagctgtggccatgatggcagtgccagtgaaagtagctcctttactagccaggatctggaaccttccatgtatgatgacttaacattggaaaagaacactggaaatgggcaacatgatgtcagaggcacacattatcacaagactaacatgaaacctgaaaaaccaattgatttgcttaggaaagttgatggcaatatcatttgtgttgattgtggttctatggaacctgattgggcatcattaaaccttggtgcacttctgtgcatagagtgctctggggtacacagaaatctcggagtgcatatatcaaagttaatcagcactacattgttccgcagcgctcatggattagatacggcatggcacttcactgtcagcaagcctaaacactcagatcctttctctgccaaagagaagtttatccatgccaagtatgctgacaaggaatttgtacgaaagtatagcatggatgagattcagctagctcagcagatgtgggataatgtaactgcaaatgacaagagagctgtatacagtctcatcgtgcaatcccgcgccaatgtaaatttagtttatggagagatgtcctatagttcacgttcgactactggaagatcatctcagcaagagcactcttcctcaccatctgatggaagccctgtatttttcgattgccattcacatgaaaaagtttctcctagagagcccctttctcctgccagcacaagttcacgtgtagatgatggggaagaaagatgcgaagatgttggaatggttgaattacttttgcagtacggagctaatgtaaatgcaattgattcaagaggccggacaccccttcatcagtgtatattgaaaggaagacacatacatgctaagcttctactctccaggggggctaatccacaagttgcggaccaagatggcaggacggcattacagtgtgccatcgacggtggaacaagcgacgacgagattcttgtgttgttagaagattatactagataa

SEQ ID NO: 11041 - DNA, 1248 bp, Oryza sativa
  Clone ID: TFbOSC401493j.C1.o1.fg
atgtgtgataagaagctcagtattctggactctctaccagatgccagtgaaggtggtcaggatagtctgaagcgtcatgaggaaatcagaaaaattgtatgtggtgctcttaacaaaaccatggatgttgcgttctgttttttctcttgggagtacgagtttccaaaagtgcctaggcaacagaacagttatgacggtgggttctttgtattcaattttatgcgattatgggatggccatcgactgattcgctggttttcaactgaaacgatggacatgcggaagagctttctagcatgcatactctccagcaaaaataatgatgccaccatgcctactaatgtttctgagttgatcaaaacgctcccaggggaggccatgatgactcctgaattggtacaggctacgagacagggcaatacaaatgcatttagggaacttagatgtcctgcacgaagggagggttcatatggaggccatacctcaataagtattaatagagccgcttgctgttcttgtgttttttttgagagcacatcatcccgccgttcttgtttccgtttagattgcaagtcctcatgccgttctgatgagcaagagaatcagattatgcggagtccattgcgcttagatgcaacatcaacagttactagtgatagaggtccacctgagccatactctatccggggtgtgacggttgacggggacggggtgctccacattgctgcaagcttttgccatttcgagcttgccaaatccatcttggaagggcaggaggacaaagccctcatagttatgctactacaacaagagaacaagagaggagataggcccctgcactgtgcagctgccacggagagtaaagaaatggttcaactcattgtggaaagagcgaaatgtatcacagagccgtccaattttactaccaatctgctgcgtgcgagaaatttggagggccaaacatgcttgcataaggccattctactcggtcacacggagatcgtcaagtatttggtttcgcaagatgaaggattggcgcaaatagtagacaacgaggatatttctcccctctatttggccatcgcattacgaagaggtgacattgtccaagaactgacaataaaagcatcgtgtgggcctgcaggtgccgtgtcgtattgtgggcccgcagggaaaacagttttacatgctgctgttctcttcagtgaaggtacagacgcaatctcaagttttgttgtcaagttttga

SEQ ID NO: 11042 - DNA, 879 bp, Oryza sativa
  Clone ID: TFbOSC900166j.C1.o2.fg
atggcaggtatgacacctttggcttgtgcggtgtccaagggaaaagcaattgctgtgaggtattttcttgacaaaggtgctgatccaaataagcaagacaacatcggttttactcctctgcactatgctacaaaagaagggtatgatggactggcacgactactgctgtctaaaggggctagtgttgatgttatttcttctaaaggcacagccctgcatcttgctgcctccagttggaagtctggcatcatgaagattctattggagcacaatgcagatccaaacaaggtctccgcagattcagagacaccattagctgcaacacttattgcttctgatggactgaatgaacctgctgtgctgaagtgcataaagcttcttgttaaggctggtgctaatttgaaccgcgctattcctgatacaccactggtgatagcaactaacaaagactttgttgaatgtgttgagtacttgttggaggctggtgcaaacgccaatattccaactaataacggtggtaagacaccaatagaaatagccgcgaagtctggaagaaggaagcttgtggagattctatttccttgcacgttgccaattaaaggtgtgtcaaactggactgttgaaggaatcatcacccatgtgaaatcaaaaaaatcaaagaagaaagcatgcgctcaggataaggaaagtggtacagacaaaaaggctcagttgaaatcattgggtgcaagtgcagttcaggggaaggactatgttggtgcatccaaattctacagtgagatgagggtgagaggagtagcaactggcatttccttggtgaggttaaacatggaagaggatgaaaaagtgcctggaagttctaataccagttacatttag

SEQ ID NO: 11043 - DNA, 1461 bp, Oryza sativa
  Clone ID: TFbOSC400090j.C1.o61.fg
atggtgatcttggatagatattgtgaagcggtggaatatttagtgaagaatctggatcattcaatgccaatgcaaacaaccgacaaaactgatgctgtgaaatctatgctttccggagagaatagtgaaggctcagatggatcaaagtcatcggacacagttgagtgggacccatgggaccctccgcatcctccttgtcctactttgccacccacagcaagccttatgagccaagtggaaatggtcaaacagcatcattttcaagtactggccgtacttgctgcttccagggccacaaatataattgccccagaccgtactcctcaggaggtgcgccgtaaatttgctgaaatatgcagtgaactggcggacatccttgaaaaggacagtgttcggagattcctcaacttgtacagaagaaatatgcgtatcatgggttggggtctggtcatcacatctcaaacaatggacttcattgtttcattcaatgccctgcgttgtgctaaggttgtcttggagggcaaggcacctaagctttgtcagatccgtgccaaccccaactacatgactagctatgggtacttccccctccacaaagctgctgaaaaattctcagttgacatgattaagttgctgctttgttatggtgcatcggcgaatttacgcacatcaggccaaaaggtcatcgagggcctcctcccactccatgttgccattgagaacacttgcatgcacaagtatctggaggacaatctattaactgaccggaagctcaagcaagtggatcttgacttcatctacaagctcatccatctgctttgtctgcctgagatgaagattttcttggacacgacaagactgcttgcagataacacagataatattgttgatgagctatggaactacatcaaggaggggaggcttgtccatgctgctattttgctccttgcagctcaacgaaaaattcgtacctgtgcttcctctaatagaaacatcagctgtaacctgaatggatttgatattatcagggatcgtgttatgggatccatagtttccatagaaagggaagggcgtggattaacaagtggtaaaaatagcaaggcacataagcagctggaggagaagcggaaattttttcataattcattgatgctcatttttgtaatttcgaaaaccggtgaagctcttgatgagtatatccagtctcattcagaggtctctcatcaggaggtgcttgagggtgtttcatcaattctcgatgatcatggttttgctcctactggaaaagggatcagcataggagacctggaatgccgtccctatgactgcaatgcgtcgaatagtgtgccgaagtgcaactatgaagattctggtacgaccaaggcagttggagaatctcctaatctgaatgttaaagctaaaaaatctgcaccagtagttatgctttatggatttggctga

SEQ ID NO: 11044 - DNA, 2250 bp, Oryza sativa
  Clone ID: TFbOSC402265j.C1.o11.fg
atggagaagccggcgtcgtgctgctgctacttcccgctgcggtgggagagcaccggcgaccagtggtggtacgcgtcgccgatcgactgggcggcggcggacggccactacgacatcgtccggcagctgctgcacctcgacccgaacctcctcatcaagctcacctcgctccgccggatccgcaggctcgaggcgctctgggacgacgacgcgcgcttcgccggcgcggcggggcaccgcgcgggcgtcgcccggagcctcctgctggagtgcgagtgcagcaagaacgggggcgccgccgccgccgccgagaacacgctgctccgggcggggtacggcgggtggctgctctactcggcggcgtcggcgggggacatggcgttcgtgcaggagctcatggagagggaccccttgctggtgttcggcgagggcgagtacggcgtcacggacatgttctacgccgccgcgaggggcgggaacgccgaggtgttcaggctgctgctggaccacgccatgtcgccgaggtgctcgacgaattgccccaacggcggggaaggcgcgcgcggcggtggcggtggccgctcctcggtgttccggctggagatgatgagcagggcggtccacgccgccgcgaggggcggcagcgtggagatgctgagggagctcatcgagcgccgctccgacgtgtcggagtatctcgacttccgtggatccaccgtgctgcatgctgctgcagggagagggcagctagaggtgaggcatctacttcttggccattgcttacttcactacttctgcaaaatgcaccatagtgaacttctgtttgtgccaatatgcatggatgacaaggttgtcaagtaccttatggccactttcgacattgtcgattcgactgataatcaagggaacacggcattacatgtagcggcctaccgagggcatctgcctgttgtagaggcattggttgctgcatctccatcaaccatttcagctgtcaacagagctggtgatactttccttcattcagcaattgcaggtttcagaaccccaggcttccgacggcttgaccgccaaatggagcttatgagacacctgatacgtggaagaacatcaaatatccaaaagattatcaacctgaagaatgatgcaggcctcacagtccttcacatggctgtggttggttgtgttcatccagacctcgtcgaactcctgatgacaaccccatcgatcgacctcaatgctgaagatgccaatggcatgactccactggcattgctgaaacagcagctgcgctcttcaacatctgacaagctcatcaggcagatagtttccgcaggaggggtgctgaattcgactgttctgcgaactcggtcagcgatcgtttcgcagataaagatgcagggagggattgcaagcagccccggtacaactttcaagatatcagatgcagagatcttcctctactccgggatcggaaccgcggagtcccgacgccctagctcatgctctagcaatggcaagtgtgaccatgcccatcatggagatgcaaaatgcggaaatgctgaaaaccatggatcttcagagaagaggctgagctctgccagccgtgccaaggaccgtctcaagctgatgctgaaatggcctcgtcagaagatgtccagaggacacaagaaatccgacgatggcgacgccatggattccatcaagaagctgagcgagcaggccgtcgagaccccggccccgctcaggcagacattcaccaagacgacggcgctgaacaacaagaggaccctcgcggtgaagacctcgactcccagctcggccaccaagaagaagctcaacagcaagctcatccacggcatcatggaggccatgccgcacctggcgtcctcgtctccggcgtccgccttcccgaggtcctccaccccgccgccgccgcagtccggcaagatgaagggcgtctgcctggaactggacgacgagaactcgatgacgacgccggtgttcggcaagctgaaggacatcgtgctgaacaacgacgacgatgatgacgccatgggcgagccgtcgagctcggggtcgtccgtgaacgacgacgcgtcggcggagatgccggcgcggcggcacgggtgcggcaacgggaggctgatcaacatctgcttcggcgcgcagggcctcaccgtggaggactcggccagcgggcagcagaccagcaagatgttcaagcagcagtgcctcagggtgtcctga

SEQ ID NO: 11045 - DNA, 1719 bp, Oryza sativa
  Clone ID: TFbOSC407936j.C1.o23.fg
atggccgacgccaccgccgccctctcagagctcgctgcggcgctcgacgaggagggcaagggcgtcgccgccgtcgctgctgccgtcaaggacgccaacaagcgcaccgccctgcacttcgccgcccgcgagggccgcacccacgtctgtcacttcctcatctccgacctcgccctccccgtcgaccccaaggacgacgatgggaacctggaccttatgaaactatttctctccaagggggttgatgttgaatcagaaagcgatgccggcacacccctcatatgggctgctggtcatggacagcaagaggcagtcaaacttttgcttcaacacgatgctaaggcttctctttgtttagcactcaaccacctttcaatcagccgttcatgtggcctttccttaacttttttactgaagctagttattgcttggcagccaaatactgaaaacgatgatggtattacgcctttgttgtctgctgttgcagcgggttccctcccatgcttggatattctaattcaggcaggtgcacatccgaatatcagagctggtggagcaaccccattacatattgctgcagatggtggaaacatggaaataataaattgtttacttaaagctggaagtgaccccaatgcatgtgatgatgatggactaaagccaatacaggttgctgctttgaggaataaccgtgaagttgtggaacttcttttacctttgacatcaccaattccaggtgtttcgagttggagtattgatggaattatagaatacactaaatcagtcgaggaaaaggcacaggtaaaggaagctacaactcagaaagcagacagattacaagtaccacaacttgttgaggtgtcatctgaggcaaaagagagatcattggaggcaaaatcgagaggtgatgatgccttcagaaataaagactacctagtagcagtagatgcctacacacaggctattgagttaaatccaaacgacgccacgttgcattcaaacagaagcctttgctggctacgggcagggcaagctgaacgtgctctggaggatgcaagagcatgtcgagcgctgaggccagactgggcgaaagcttgctacagggaaggcgcggcactgcgcctgctgcagaggttcgaagaagccgcgaatgccttctatgagggggtgcagcttgagccagagaacggcgagcttattagcaccaagctaatcgaccagcttgctcgtgatgacgagaagatcaaaaagaaaaccaggaaacccaagcctaagaagactgtcaaacaacatcaacaagagccccaggacaactcaagggaactcccagcttctgaacccaaggctcctcctggctggccactgcagcctcccatgtatctccccgtaacccctgctcctccaccacccccacctgctttttcagagctggaagccatccgtgccgttctggaagagagcgaaaaggttcaggagaagctggataagcagcatgctgggatgcgtgatgaactcatcaagaaatcaaaagacctgcgtgacaaggagttcaagctgccgtaccaaaaccccacgccatgcactgaggagaggtcaaactgccgccagtgttacgtgagcaatgcacaggacccactcaagtgtgctgaggcagtcaagagatttgaagcatgtgttcgcctggcgaggcaaaggggcaacacaaaagttgctcagtag

SEQ ID NO: 11046 - DNA, 1332 bp, Oryza sativa
  Clone ID: TFbOSC409221j.C1.o5.fg
atggcggaggagctccccttccccgctaacatcgaagtgatgcgccacacgccgcggttcaagctcatgcaggcggcattccacggcgacctccgcggcttgaagcggcaggcgaagattctggatatggggaggggccgcctgaggaaggccgtagaggatgtgagggtggaaggcgtgccgggcgaggaaggtacaggggtgctgcatatggctgcctcccatggccacatggagatgtgcaagtacctggtcgaaacgcttcaggtggatgtggatgatgcggatgacaaagaaaattttaaaatagactctcttgtcagctgtttttttaacaaaaggttttggccaaatgcccaaacccataagggtggtttggcaaggcaatccacaccaggtagaacatctctacttaaggcggtacattctgggcatcggggaattgccaagtatcttcttaatcatgacgccaatccagacctagccatgtgctgtgggcttacccctctacattctgccgctggattaggtgattgtgagtccgtaaaactattgcttgcaaaaggagcttatgttgacccaatgtctacttttgggacaccacttcatcttgctgctaaagaagggcaggatggcaccatgaagatattgttggacaacaatgcagattgcaacaagatggtaaacggtataacacctctcctccttgctatgaaagctgcatcagcaaaatgtatggagctgctggttgaggctggagctgatgctacttactctgatgtcatctggaattatatgtcaactacttttatggatgatgaagatagtggttcatctgtgttctcggattctgaaccagaagagattgatgccaatcaccatattcccgtcaatgacaaacctgtgaatcgaaggaaaattgcagagtttaagtcgttagggcttgaggcagttgagaagaaggattatctttctgcagcaggattctacagtgaggccatggaccttgaccctgatgatgcaaccctgctgtccaataggagcctttgctggctttatctgggtgaaggaggcaaggctttggtggatgctcataaatgcagaaaaatgcggcctgactggccaaaggcctgctaccgtcagggtgcagctttaatgttactgaagatggttttcaatgttagcttgatttttttttggcaggactatgtgagcgcgtgtgaagcactttttgatggattcaagttggatcctgaggacgttgagattgaaaatgcattacgggaagctctagagttcttgaaggtgtctcaaagcacttcggctaactga

SEQ ID NO: 11047 - DNA, 330 bp, Oryza sativa
  Clone ID: TFbOSC421294j.C1.o1.fg
atggcgacgttgctggatgatgggaggggtcgaatcggggaggcggtgcaggcggccagggtgagaggtgcgccgatgggcgggatgggggcgctgcacctcgccgccggcaaagggaggctggaggtgtgccgctacctcgtcgaggagctgcggctggacgtggatgacgctgaccaggaaggtagaactgctctgattattgcaacactttgtaaacatttaagcactgtcaagtatcttcttgatcatggtgccgacgtaaacaaagccagccatgatgggcgcacccctctacattacgccactcatttaggtgcccctctataa

SEQ ID NO: 11048 - DNA, 1341 bp, Oryza sativa
  Clone ID: TFbOSC401721j.C1.o26.fg
atggggcacggcctgagctgcagccgcgacaccgacgagtacgacctgttccgcgcggcgcagctgggcgacatccacgccctctccgccctcctcgccgccgaccccgcgctcgcccgccgcgccacagtctacgaccgcttcaccgctcttcacatcgccgccgccaacggccgcctccaggtactgtccatgttgctggatcgcgacggcgacgtggacgtcctgagccgcaagaagcagacgccgctgatggtggcggccatgcgtggcaacaccgagtgcgtggtcaggctcctccgcggcggcgccaacgtcctgaccttcgactcgccgcgcgccaggacgtgcctccaccacgccgcctactacggccacgccgagtgcctgcaggccatcctcggcgccgcggcgcaggcgcagggccccgtggccgcctcctggggtttcgcgcgcttcgtcaacgtgagggacgagcggggcgccacgccgctgcacctggctgcgaggcacgcccgcgcgtcctgcgtgcgcctgctgctcgacaagggcgccatcgtgtcggcgccaaccgccgtctacggattccccgggagcacggctctgcacctggcggcacgcgccggcagcatggagtgcatcagggagctgctggcctggggggcggaccggctccagagggactcggcggggcggatcgcgtacgcggtggcgatgaggcgggggcacagggcgtgcgcggcgctgctgaacccggcggcggcggagcccatagtgtggccgtccccgctcaagttcatcggcgagctggaggcggacgccaaggcacttctggaggcggcgctgatggaggccaacagggagagggagaagaggatcctgcacggcagcgacatcaacatcaagggcggcgacgaggaggaggagagcgaggatgaggaggaggcgtgcaacatctgcttcgagcaggcgtgcagcatggaggtgaaggagtgcgggcaccagatgtgcgcggcgtgcacgctggccatctgctgccacagcaagcccaaccccaagaccctcctcctccacccgcccgcctgccccttctgccgcaccaccatctcccgcctcgtcgtcgccaccaccaactccaacaagaccaacagccgccgccggtcgaggagcagaagcagcagcttcaagggggggctctcgtcggccatggggtcgttttccaggataggccgcggctccgggagattggtggtggacggcagcagcgtaggagagctcgccgacaagcctgaccacgacttctcttctgtcgccgccgctgctgctatttgtgacacatga

SEQ ID NO: 11049 - DNA, 1050 bp, Oryza sativa
  Clone ID: TFbOSC18816j.C1.o2.fg
atgacaagctttcaacactacaaatgccaaaaattaatttgcacggattttgttgccatctccaccgatgttatatgcaattggggaaaaaagcgctcaccaaacaccgtaccgacgcctgaagggaggaggccacacgatgacgtggaacaatggagagaagccgcgcataccgccgcggcggcggcggcggcgacggcaaatgaggccgtgccgtcgtcggctaccaccgagcagcaggaggcgcgtccggatgatgagcgggcgccaaaggatcacaccggctgcgaatgcaagcccaaggtggtaatgctcccggagctactacgagccgccagtcatggcgatctccagaggctgcgcgttctcctaggtgtcctacacgacgatgagtcgccggcaccgacgacgacgacgacgacgaccagccaagacgacgacgctgtcgtcctggaggtttatcgctctgcacccctactaccaccaccctctactactgcaggtgaaggtgaagatgaagggacgttgtccctcctggagggaaccacgtttcagggggactccgcgctgcatgtggtggcgagcagcggagacgacggcgacttcttgaagagcgcaaggctgatctatggcaaggccaggcacctcctcgaggcgaccaacaacaatggcgatacgcccctccactgcgctgccagagctgggaatgttaagatggtcacgcatctcctcgagctggctggaggcgatggcgccggcgatcaacggaagaagctgatcctgaggaaaaaaaaccaccagcatgagacggtgttgcacgaggcagtccgcctcggcaacaaagatttgatcgacaagctgatgacggaagatccagagctagctcgtcatccaagcaacggcgccacttcaccgttgtatctggctgtgatcttgccaaatccacaagttgcgatgcagctgcatgggtatgataaaatgctgtcctactcgggacctgacggacaaaatgtcttgcacgctgctgttcttcgacaaagaggtacgtaa

SEQ ID NO: 11050 - DNA, 2151 bp, Oryza sativa
  Clone ID: TFbOSC900348j.C1.o4.gm
atggtggatactaaggctagagttcaatgcacgtggaaggtgaaggacaccagcggtcagaccggcgacataagggcggtcagaccggcagcggcagccaggcagcagcaggagtacataaaatttgagatgaaaccaggagaagctttggatgattatcttggtagatataataaaattttgagtgatcttagatctgttgattcttcttatgatgttaattatacacaatatgaggtttctcgccactttttgaatggtcttgacatgatggaagataagggtgatgagaagaccaacgacaacaagccgaatagtatagttaaaggagggaagaagatcagggagactctcaagaaggcttttgatcaagtctatgccccgtttgggccactaagcgatgtagatgatgagagtggagatgaagataagggaaagaacatctccgtggatcccacggtcggaccggcgaccggtcagaccggcagcagcgcctcggtcagaccggcccctggtcagaccagctcctatgttgcgtactatggcttcgacttctgcttgtgtgtagactttggtggcgaggaaggagagcatgtggatcatggattccggttgttcgcggcacatgactggtacattgtcacaggttcaggggaggatggtcgtatttttgaagacgagagcgacgacgacgacgacggcgaggtcggctcggccgtgagggtacagaacgtgaaacaacttcagaagtcgctgctactttgcacattcaacgatgacatccgccggaacaaattattggtggagggtttggagtttgatgaaacttttggtcctgttgctagaattgaagcaattagacttttgttgacttttgctcaaggttttgaagcaatcagaccggcgcagaccgcgtccaaccggcaggacaccaatggtcagaccggcggcatcgcagcagtcagaccggcggccaccgtaccgacgcctgaagggaggaggccacacgatgacgtggaacaatggagagaagccgcgcataccgccgcggcggcggcggcggcgacggcaaatgaggccgtgccgtcgtcggctaccaccgagcagcaggaggcgcgtccggatgatgagcgggcgccaaaggatcacaccggctgcgaatgcaagcccaaggtggtaatgctcccggagctactacgagccgccagtcatggcgatctccagaggctgcgcgttctcctaggtgtcctacacgacgatgagtcgccggcaccgacgacgacgacgacgacgaccagccaagacgacgacgctgtcgtcctggaggtttatcgctctgcacccctactaccaccaccctctactactgcaggtgaaggtgaagatgaagggacgttgtccctcctggagggaaccacgtttcagggggactccgcgctgcatgtggtggcgagcagcggagacgacggcgacttcttgaagagcgcaaggctgatctatggcaaggccaggcacctcctcgaggcgaccaacaacaatggcgatacgcccctccactgcgctgccagagctgggaatgttaagatggtcacgcatctcctcgagctggctggaggcgatggcgccggcgatcaacggaagaagctgatcctgaggaaaaaaaaccaccagcatgagacggtgttgcacgaggcagtccgcctcggcaacaaagatttgatcgacaagctgatgacggaagatccagagctagctcgtcatccaagcaacggcgccacttcaccgttgtatctggctgtgatcttgccaaatccacaagttgcgatgcagctgcatgggtatgataaaatgctgtcctactcgggacctgacggacaaaatgtcttgcacgctgctgttcttcgacaaagaggcgtggcggtggctggcaacggcgcgccctcccctccgccggatctagctggaggggaggtggtggaccttggggacggccgggcggtggtccggtggaggcggttgcggcggccgcgccctcccctccgccaaatccggccggagaggaggcagcggacctcggcggaggcggcacagcggctggcggcggacctcggcggaggcggctggcggcggccgtgccctcccctccgctag

SEQ ID NO: 11051 - DNA, 1320 bp, Oryza sativa
  Clone ID: TFbOSC9745j.C1.o1.fg
atggcggcagcttcagcagcaaccgtggaattcgggcctcaaatactgtggctcgacaaggagctgttgcaagtgcttgccgccggcaacaaggtcctcttggaggagcttctgagaggagagggcggtacacacccgcctcgcacaaacggccaggtcgcgataagcttccatggcacgagtgagccggcggcgcggcgcggaacaagccgccttctcggcgtgacgagcaacgggagcacggcgctgcatgtcgtcgccagccacggccacgccgagctcgcggcgctcatctgcgagagggcgccctcgctggccgccacgcgcaacaggtccctcggcacgccgctgcactgcgcgtcgaaggccgggcaccgcgacgtggcggcctgcctcctgcgggtgatggatcaggcgacaccgcggtcgaggaacctgacgggcgccaccgcgctgcacgaggctgttcggcacggccatgttgaggtggttgatctgctgatgacgacggatccctggctggcctcggtgacaaccaacggcggtgtttcgccactgtacatggcgttccgatcattgaactcagtaaatttcaactgtaaaccagaaatagctcaggagatactgaactggccagaaggtccatctttgctaaccagagccgattcgtcagggaggacacctcttcattttgccgtaatctatggaaggcttgacacagttaagctattcctaggtggtgatgctgcttctccaaggctgactagcatttctgacagcgatggttcatatcccgtgcatgctgctgctatgttcggaagaaccaagattattgatgagctcgtgaagaaatgtcccaactactatgaactggttgacgataaagggagaaatcttctgcatattgcagttgagagcgagcaggaaatggtggttcgccacatttgcggaaatgatatgttcgcgatgctgctgaatgcgacggattatgatggaaatacccctctccaccttgctgtgaaacaaggatatccacggattttcggtctgctactggggacaagaggtgttgatatgtgcattatgaacaaggatggccatactgctagagatatttcttgctgtgcctcaacgttagagcacggccgattgcgctattttctgcttttcgtggggagtcgcaaccaggcgacgcgttgggagcttggggcgcccgtggacacggctaccgcacctacgatttccccttctaccctcgacctcgtcactgggaggaggccgacggcagtagtgaggagcctgaggcggcgaggaggttga

SEQ ID NO: 11052 - DNA, 1216 bp, Oryza sativa
  Clone ID: TFbOSC900351j.C1.o6.np
gatgaacccaatcccctccggtgaccgttttacctgggtataattatcccttggtgccgaacgaggcctgagtttaaatgctgattgtgcttctccgatcgatgctcacccgttgatatagagatggcgcgagggctggacaccgggcagggcgaggcggctgtcgtggcggcggtggagggcagcggcttcgggcaccgcgctctgcacatggcggcctctggagggagcgtggacgtcctcaggtacctcgtggaggacctctgcctcggcgtcaaccagtcatgtttttcttggcaggtcaaacaccactgttcctgtcttcaattcatgggagagctgctgctacaagatatcttctcgatcatggttccaatcctgcgattgataaaatagtgttacctcttcatggtgctgcagtgaaaggacactgcgaaatagtagagttgtttctttcaaaaggagttgatgtggatttatattctatcgctgggaccccattgctggcagctgcgattagtggccaacatagcacgatgaagatcttattggagcatcatgctgatcctaacagggttttcaatcttgatggtaccccgttgattatgtccatagtttctggatcattggaatgcgtgaagctattaatcaaagttggtgctgacatgaattttagagactccaatggcgttacttgtgtaatggttgcagcaaatcatggctcttctgtcatcatgaagtgcttactagatgctggtgctaatccaaacattccagatgaacagttcaatacgactccaattgaagttgccgctaatcatggcagaagggacattgttgaaatgttgtttcctttaacctcaccaatttcaacactgtcagattggagtatcgatggaattatttctcacgtggaaaattttggtttgaagccaagggtatttgttcctttatctgcccacttgcaattgcatatcattgtttatcatcattattagtttcccttactaccccaccttactaggctcagggaaatacggccgcgaggctcgccacctggaaggcgcccgggccgagcgcgcagcgatggcagcgcgggcgtccgagctggaggttagggagaaggcgctggcgtcgcgcgagcagcgcagtgacaccgatctagctgaccggctcgccacggctcaggacgcactcgccgctctggaacgcctga

SEQ ID NO: 11053 - DNA, 2790 bp, Oryza sativa
  Clone ID: TFbOSC400431j.C1.o4.np
atgcctataaagagacttgagattgagaaagtaaaggcccaggatgcagtcttagcttttaaaaatgatggaatcgggttgctgcacgctgcggcttgccagggccaactgaatgtttgcaagttcttggtggaggaattggggggtgacgtgaatattgctggagcacaaggtttaacaccgtttatggcagctgctgagtctgatgatgttcctactgtaaaatattttcttgatcatggtggtgatgtaacaaaagcagatgttagaggatgcacagttctccaccatgctgctggcacaggatgctgtaaggtaacagagttcttgctttcaaaaggaatacctgttgacatagactgtggccttggaacaccactcttgcatgctgctaacgatgacaaggataagacactgaagattttgttggatcacaaggcagatgctggtgctgatgttaatggcaagggagcacttgtgtctcccttgatgtttgctgcatcacaaggatgctatactaacttcattaagtttctcctgaaggctggagcaaaccctaatatacctgatgatttgggttggttgcctgtggagcatgctgcattacgtgattgcagggaagatgttgaaaggctatttccattgacttccccaattccaaatgtcccggagtggagtgtcaatggaataatctctcatgcgaaagtcaaagatataaggccaatgacaatagatcatgggccaaccacagttctgtacacaaacaggagcatttgtagattgctcatgggtgatggtgaagatgctcaatctgatggtaacagatcccgaatgatgcggcctaactgggaaaaagcttgttatcgttggagtgcaggtcacatgctactcaaggagtacaaacaactgtgggatgctctcatggatgcacaaaaattggatcctgggagcgttgaaattgagaaggaacaaagggaatatgatatccaagaaagtaaagatgttgtggagtcgaaggttggcctttatgataaacccactgcatcttatggggtcaaacctccaaatgtttcatctgttatgggaaaaacacaaattgatacatgcaaagatgtggtcttcttaaaagaagaggtagagaaaaggatgaggctggatgtttctggatccttcttcgtgtaccagatgagcacgttagaagcaggaataccattatcatcgtatgctggaaagacatggaatgggaacattgacatggatggtttgattgttgttcatgggagagtcagaatcaagaaaaagccatggaaaggcctcaactcaagcaagatgaacagtgactgcaccaagttgacttcgatgataagagaaatgtttgtcaaaaaaaatgttcatcctccgtacttgaagcaccttcttggaaagttagaagctttagctgtcgatgttttcacagtgcgtcagcagcttgcttttgactatcatatctctttgataccttctctgaaccgagtaaatttggtgtatcaaattaagagatgctatgatggctgggatgacagagagaaaatgtacttcagatttgttgcagacaattgcacagtcccagaagattggtgcaatactttgatgtctaagcatttgtttcgcctagtgattttggaaggacagaagaggaacatcatatacggctccaatggcatgagtgcatttcatttggtgagaaattacaatactcatgcaccagaacattcctggattcatgtgttcgtggattccaaaatagaacattaccaatggtttcaatgtgatagtggtattgagctaatggtcccaaaatatctaggagactttcttgcagaagctgtatttaagtttattgaagatgagtttgatttaactcatgtgaaaccaaatataaccaaatgcaattcaggtattccaacactgctacgacacaacttccatgaaggatctgaatgtaacagccatgacaagctgtcaagtccatttgatgggatgggacaaaaagtaatgcccagcgagacgttcgatcgttcggttgtctacgtggcaattatctatggcgaggctctcgatcggcttgctagctcctcggccatgtgctctaatggcgatttctcggtttgttcgcaggtaacccgtataaatgagtttatggatcgacccacttgcatctctaagtgcggcaaatcggaccacgacgtgaaaacacacgggttatcacttattttacatataaatgccgtcttagctcttaacaagcatgggattggggtgctgcacgccgcggcatgccagggccatctgaatgtttgcaagttcttggtggaggaattggggggtgacgtgaatattgctggaaaagaagatataacaccgtttatggccgctgctgagtctggtgatgttcctacggtggagtattttcttgatcatagtggtgatgtaacaaaagcagatgttagaggatgcacagttctccaccatgctgctggcacagatttatggcccatctcattcattgcaggatgctgtaagtctaacgtaattgtcaataatggagccggtagtcccctgatgagttcccttatctaccgatcattgaagtgtatgaagctactcataaaggctggtgctgatgttaatggcaagggtacagttgtaacccctttgatgcttgctgcgtcgcaaggaggctatactaacttcattcagtttcttctgaaggctggagcaaaccctaatattcctgatgatgtatgtttt

SEQ ID NO: 11054 - DNA, 1839 bp, Oryza sativa
  Clone ID: TFbOSC28294j.C1.o1.gm
atggcgatgctggctctgccaccggccggtcacacccggcacacgggatgcaatgcaagacaagaccccgtatcgatggatcgcaggctgctcagagccgcacgcggcggccaccgcgagtggctggaggctgtacttctgggggccgctccggcgccaaaccacgtcaccgtccacgtcgccgcggccggggagccacagccacccaccgcggcggcgctgctcctggacgtggcgacgacgccgcagggagactccgcgctgcacgtcgtggcggcctccggcgacagcgaagcgttcctgagctgcgcgcgcaccatctaccgcagcgccatggccctcctggatcgcgccaacgcgaggggcgacacgccgctgcactgcgccgccagggcggggaacgcggcgatggtcaggtgcctcctcgacatggcgatggaggaggacgaggagcgcggcggcgcgaggttcagggtggccgacgtgctggagaagcagaacggccggcgtgagacggccctgcacgacgccgtcaggctcggcgacgagcgcctcgtcggccacctgatggccgtgcatccgcggctcgcccgtctccccggcggcgacgggatgtcgccgttgtaccaggcgatctcactggggcacgaccgcatcgcggagctcctgcatcagcaagggggcgacgagctctcgtattctggaccggccggccaaactgccctgcacgctgctgtcctacgcggcgcagaaatgacagaaaagataatgcaatggaacgccgggctctccggcgaagccgacgcgtccggcagcacagcgctccacttcgccgcctcggcggacggaccaaagatcgacatcgagaacagctcactcctccggtggctcctcttgccgtgcccgttccaatgccgccggacaccaaccgaacttctcctggagaccgacccgtccttggcctgccagccggacggcgacggcgactaccccatccacgtcgccgcgtccgccggcaacctgaggctcgtcgccctcttgctcgacaagtgccccgagtgcgccggcctccgcgacgcccgcgggaggaccttcctccacgtcgccgtcgaccggaggaggcaggaggtcgtgggattcgcctccgacgtcgatggacgggccaacgccctcagcggcggaaacatcaggcgcgatcacttcctgcagcggcacgtacccaagctcgacgagagcgccgagtccaagaaaatgacggagtcggcccaggtcctgggcgtcggctccgtgctcgtcgccaccgtggctttcgccgtggccttctcccccccgggaggctacgtcgcagccggcgcgccggcgctggcggggcggtacgccttcgacgcgttcatgtacgccgtggcgctggccttcacctgctccatgctcgccacgctcagcctgatgtacgccggcacggcggcggtggagatgaatgtccggcacaggtacttcaagaattccgtgtggtggatgcgcttgtcgatgaggagcctgctggtggccttcgcgctgggggtgtacctggtgctggctccggtgtcccgcgccaccgccgccggcgtctgcgccctcgccgccggcacgatgctgttcaggaacagggagctggtgctgatggtgagctgcgcgcacgtggtgcgcaggaggatggggatcagggtcgtgctcaggattggagccccgatcggcatcgacctgctcatctccaacattgtctacttgatcatcttcggtgcacccttctgcactccgctgtgcgttctaattctcttttggagggtagcgccaacagag

SEQ ID NO: 11055 - DNA, 612 bp, Oryza sativa
  Clone ID: TFbOSC400151j.C1.o24.fg
atggcggcgccgttcgtctactgccgccccaccgacgacggcaccagtgagagcgctctcctgagggcggccttcgacgggaacctcggacgcctcaaaggtattttaaagagccttgggatcgagaaaggaaagacccagtatgcagtcttagctcttaacaagcatgggattgggatgctgcacgccgtggcatgccagggccatctgaatgtttgcaagttcttggtggaggaattggggggtgacgtgaatattgctggaaaagaagatataacaccgtttatggccgctgctgagtctggtgatgttcctacggtgcagtattttcttgatcatggtggtgatgtaacaaaagcagatgttagaggatgcacagttctccaccatgctgctggcacaggatgctgtaaggtaacagagttcttgctttcaaaagggatacctgttgacatagactgtggccttggaacaccactctttcatgctgctaacaatggcaaggataagacactgaagattttgttggatcacaaggcagattggcggagccaggataaaattatagtgggggctcctcagacttttgggccttctaacaatctcagataa

SEQ ID NO: 11056 - DNA, 4982 bp, Oryza sativa
  Clone ID: TFbOSC418872j.C1.o2.fg
ccaccgtcgggtgccactccgtctccgcgctgcggaagaacttccccatcctctcgctgctgtcgtcgtccccgtcgtcgccctcgttcctccactccgactccggcggctcttcctccgacggctccgacgacgacgacgacgacttcttcggccggcccagccgccgatcctccgccgcgggggcgggggcgggggcggcggcgccgtcgctgcagcccgcgggctgcgcctcgttcgacctcgcctcgcatccggacctcaagctcgcccgccgcatcgggagcgggccgccgggccccgcggggcaggaggtgtggtccggcacgctgtctcgtggtggtgggggaggtggggccaagaggtgtaagcatccggtggcggtgaagagggtgcccgtgaccgcgggggatgtgcttgagggcgttcaggaggaggtggagcggctgaggcgcgccgcgacgtggtgccggaatgttaccacgttccatggtgctgtgagggtcggcgggcacctctgcttcgtgatggatcggtacgcggggtctgtgcagacagaaatgcggcagaatggcggtcgcctaacgttggagcagatcctcagatatggagcagatattgctcgtggagtagcagaactccatgcagcaggtattgtttgtatgagtataaagccgtcaaatatccttttggatacaaatgggcatgcagttgtttccgactatggtctttcggccattcttaagaacctcactagtcgtagagtgtctgatgattccaacatggttggcttggatgctacacttcttagccccaattatacagctcctgaggcttgggtgccattgaagaagtcaatgaatctgttttgggatagtgcaaatggaatattaccagagtcagatgcatggagttttggatgtacacttgtggaaatgtgtactggtgctgttccatgggctgggctaagtgcagaggaaatttgtaagtctgttgtaaaagagaggaagccaccgcctcaatattcaagggtagtcggtgtaggacttcctggggagctctggaagatgattggtgactgtttgcagttcaaaccttcaagaagaccatctttccaggacatgctaaaaacttttctgaggcatcttctagatataccaaggagcccacctgcaagtcctgaaaatgatttcacaaatgcaagcatgcccaacggtacggatgtgccaccagcctcagttctggacatggtccaggacaatccaaatgctttgcatcatcttgtatgtgaaggagatgctgctggtgttaggaatcttcttgcagaagctgcctcagatggaaatggccgtttaattcgttcgctcttggaagcacagaatgcagatggatatactgccctacatttagcatgccgaagaggctcagcagaaattgttgaagctattgtggcttatcaagagaatgtggacttgttagataagaatgaaaatcctccaataatatttgctatggctgctggctctccacagtgtgttcgcgcacttgtaaggagatcttctgatgttaattcgaggcttagagaaggtcttggtcctactcttgctcatgtttgtgctcatcatggccaaccagagtgcatgcgggaattgctcatggctggagctgatcctaatgcaatagacggagaaggcgaatctatcctgcatattgctgtggccaagagatatactgattgtgctatcgtcttattggaaaatggtggttgcaggtctatgggcataccaaattctgtgaataaaacgccattgcatttatgtattaaaacatggaatgcggatgtggtgaaaagatgggttgaagttgcatctgaagaggagatagctgaagcaattgatgtacctagccctgttgggactgctttgtgcatggcagctgctcttaaaaaagagcacgagaaagagggtcgagagttagtacgggtattgctttctgctggtgctgatcccacagcacaagatgacccacactgtcgaactgcactgcatactgcagcaatgatcaatgatgcagaattggttaagattattttggaagctggagttgatgtaaatataagaaatgctcagaacacaacaccacttctcgttgcactgaacagaggtgcaaactcctgtgttggtttgcttttagctgctggagcaaactgcaatctacaggatgacgacggcgataacgctttccacatagctgctgatgcggctaaaatgatacgtgaaaacctctcatggattgttcaaatgttacaacagccatcgccggctgttgatgtgagaaaccacaggcaagtttatgatgtatctggtgttaagctaaacttacttcaatacaacgtgatgcaaagtaaaagaggctggacattgcgagattttctggagaggctcccacgagaatggatttctgaagaactgatggaaactttagaagaaaaaggagttcatctcaccccaaccatatatgagttcgcagattgggtgaaatttagaagaacagttactgaaccagcttttggctggcaagcccatgctaggtttcgctctgtgctgatcatgattgttttaaaagtttacactgatgtactggatgttgtcaaaaatgatggcatcctggtcgtcccaaagaaagaaaatgatgctcgctgcaaatgttgctcttctgcctactgcaaaaaggcaaactttaaaaatctgataataggagccactgttctgattttcatgtcaatgttaatgagaattccttccatcaatatactaaccgaagatttgtggagaatgtctcatggatcaaataacaaattcactcatcttagtagatttggatggcgtggtcagtcacgagatagcattgggacagttctctgtgttgatgatgatggaatcttgagggttggttttccaggagcttctaggggatggagagctgatcctgctgaaattgtaagggttgaagaatataaggttggtaactgggttcggattcgtccctcattaacggttgctgtacatggcatggaatctattactcctggaagtgttggtattgtctactcaatcaggccagacagcagtcttctattgggactttgctatttgtcaagtccatggctttgtgaaccagaggaggttgaacatgttgatcccttcaagtgtgaagctcatgtttcttcaaatttccagattggtgaccaagtatgcgtaaaaaggtctgttgcagagcctagatatgcctggggtggtgaaacccatcacagcgtgggaaaaataattgacatcgagagtgatgggctactcataattgatattcctaaccgggctgtacattggcaggcagatccatcagacatggaaaagatagaaaagtttaaggtcggtgattgggttagagtgaaggcagcagtaccatcccctaaatatggctgggaggatgtgactcgtagcagtattggggtggttcatagtctagaagaagatggagatatgggtgttgctttctgcttcagaagcaagcctttttcttgctcagttgcagatgtggagaaggcacagccttttgaggtaggagaaaaaattcatgtgttaccttcaatatctcagcctcgccttggatggtcaaatgaaactgcagcaaccatcggggctatctcaaggatagacatggatgggactctaaatgtcaaggtgtctggcagaaatagcttgtggaaggtagctccaggtgatgctgagaggctttcggcttttgaggttggagactgggtgcggttgaaatctagtattgggagcaggcctacttatgactggagtgttgggaaaataagtattgcagtagttcatagcattcaagactctggttacctggagttggctggttgtttcaggaaagggaaatggttaactcataacacagaaattgataaagtagagcctctcaagattggtcatcatgttcggttccgtgctggaattacagagcccagatggggatggagagatgcaaagcctgattccagaggcataattgctggtgtccatgctgatggagaagtaagagtagccttctttggtgtgcctgggctgtggaaaggtgatcctgcagatcttgagattgagcaagtttatgaggtgggtgaatgggttaggctgagaaataatgcagatgattggaagtcgctcaaaccaggtagcattggcgtggtacatgggattggatatgaagatgatgtctgggatggaaccattcatgtggcattttgtggtgagcaggaaaggtggatagggccttcaagccagcttgaaggagtcagcaagtttgtcgttgggcagcgcgtgcgggtcaaactctgtatccaccagccaagatttggctggtctaatcataatcattctagtatagggaccatctcatctattgatgctgatgggaagcttaggattcatacacccgctggtgcgagagcttggttgatagacccagcggaggttgaaaaggtggaggaagaggaagaagtctgtgtcggggactgggtaaaggttaaggattgtgttgcgacccccacatatcagtggggtgacgtgaaccataatagcataggggtaatccaccgggccgaggatggtgaactttgggttgccttctgtttctgtgaaagacaatggttgtgcaaaaggtgggaagtggagaaggtgaggccattccgattaggggacagagtacggatacgacctggccttgtaaccccacgttggggatggggggaggagacatatgagagtaaaggtgaggttgtaggcgttgatgcaaatgggaaactgaggatcaagttcagatggagggatgggctttggattggagatcctgccgatatcgttcttgatgatatcccatcactgacagaggcttctaatggcttttgttcatag

SEQ ID NO: 11057 - DNA, 1080 bp, Oryza sativa
  Clone ID: TFbOSC401048j.C1.o4.gm
atgacccttacaacggcggcaccactggaggcgcggcagagtgccgttggaagcggagacaggcttcatgacatacagatccacggcgccggcgagggcagggcgcggtggccgcggtggagtgtctcagcggcggggaggcacggagcacgctggagtgaggagttgcggatcaagggaaggaggagcatcccggagtcatcgcgcgggggatggggccgaggtcggctccggtcgcggcggtggacctcgtcgtcggtgctggcggatggtgccgaggttggaaccggccgcggcggctccggtggcggggaagaagcaccggctccggcggcggggatgcagtggcagtccacgcggggaagaagcactggctccggtggcggggaagaagaagaatcagaggctccggcagcggcagtccacgcggggaggatatccagcgaggatgcggcggcgcggcggcagaacatccggggaggaggaggagctagcgaggaggagaagcgaagtcttcgcgatgggtggacaccgttgcatttagctatacagagtagaaatagagatataacaatgatattgcttgtcaatggtgcagatgagacaagaagaaacaaggagctcagcttggcagttactgatgttttaacttgtgcatatgcagtgctgctaagctcacttcgaagatcatggtcacgcggcatctgctaccaaatttcaaaatctagagtagggggtgccgacacacggtccccatccgtcggtgacatagcaccaggtccactgtggaccgggaccaccgtggtggtccaccaccggtccacgggtactggagcgcagctcgggacaagccggcccgatgacggcgagcggcggcacggcaaggagagggaggaggaaaagaggagggcctcaccgacgacgacggcgaccagcacggggaggacgacaacgatggcggcaaggggtgtacaggctccagaacgacctagggaagaagatcagaggggtttgagaggccacggcggcaaccattgccgaccggaggcggtggatatggagggctcaccggcgaactga

SEQ ID NO: 11058 - DNA, 1836 bp, Oryza sativa
  Clone ID: TFbOSC900035j.C1.o5.fg
atggaacgagcacaaccagatcagccggtagcagcagctgctccgggtcatgttgtgctctgcttcggagcaagcacagctgttgctgaacgacaacctgaggagggtcctgctgcggattcccccgttgctgatgctgcaactggaggcgctgctgctgaaccttatgcgcgtcatgatgtggatccccccgctgcttttgctcacgttcatgctctggaccatcccgcagcttcaattgatgctgctttgccgcctcgcatgccgaaacatctttatctcgccgtattcaacggtgaaaaagcaaatgtcatcgagatgttacagttaccaaataacggcgctcctcatggagaagaagaagaaggtcaagccactgatggcgcttctcattcacaacctcaaaccatcgacggcgctcatcatgcagaagatcaaaccgtctacgactttccaattgcacaagttgctatcaacgaagaagttggaggagctcaaaatattcaccgtgatccgcatgaaaataaggaaggagctcaaggccaagggcactttgtgcgaaaccgagtagcaatagcaaggagagaacagtacgagagcagaatagatgcggtcaccgccgaagggaacacggttcttcacattgctgcaagtagggggcacgcccatgcccctggtccagatgggacgagccaacaagaggacctgatcacagtgctctacaaggcgcgctggcacctcctttcttctctgaactcggagggagagacacccttgcaccgtgcagccagggcaggccacgtccacgccgttcagcgcatcattgccggagtgaaggaaaatctggaaaagttagcagaaaaccagctcatggacattattgcaacaaggaactgtgccggtgaaaatgctttgcatctagcggcaatgcacggcgatgcccaagttgtgacgacgttgttgaaatatgcgcgggatgcgcgtttgtcgtctgtgttgaccgaagccaataacgcatcggccctctacttagcggtcatgagtacatcggtggccaccgtcaaagcactattggctcacgaatgcaatgatacgtcagctcaaggtccaaaagggcagaatgctctacatgctgccgcagttctccagaatagagaaatggtcaatatattattagaaaagaaaccagagctggcaagcggggtcgacgacatgaaaagcacaccactacacttcgcttcgtccgatggtgcctactcaattgtacatgccatcctatatccaaaatcgaaatcattatttggtgatccagcaggacagagtcttgttgccatgcaggacagtgaaggaagcacagcgttacatatcgctgcgctgatgggccatgtcaatgttgttcgcttgctgataaaagccagccctgattctgctgatattcgtgacaaacaaggcagaacgttcctgcatattgcatgtgcagacgaaggatggcaacgacctactgttcgttacgttgttaaaaacccaatgctacatgaccttttgaattcacaagataaggaagggaatacgccgcttcatttagcagcgaatcatggaaagttcgtagatgtttatgctctgatatccagcggaaaagtgcatccagatattatgaatgcagagggagaaaccgcatttgatattgccaagaataccgttagcttcttcttcatgctccatgatccatataccccagcgacctacaatgaccaattaggttttagtgttgaggtacggttgatggagggaggggtggagagttccttgcactacactggtcaaggtcacctgtga

SEQ ID NO: 11059 - DNA, 3150 bp, Oryza sativa
  Clone ID: TFbOSC401685j.C1.o224.np
atggtgtcgccgactctcttcctcccggtccactggtgccggcttccggccgccacacggcgcgtcgagttcaacacgcggtcgggcaccttcccgcacatgccgcgccgccgccatccgcttggcgctgatgaagaccgcgcgtggcgtggtcaccacgacgcgtacgccgacgggcaggccatcgtacggtgggaggcgcaacgcaagcgcgatgggctacggcttctccaccaagctcacggccttcttctggccatggcgcttctcgccgtggcgcttctcgccgccgccctccacgccgatgccgcgcccgcatctgccgcccccgggagctccttccccgacgcctatggcgaccgcgcccgcgctgcacaacttcccccacgcaagcagcagccgcaggtcgcctacgctctgcgacgggcttccgctacctcatcggcacatctccacggcgccacctcccggtccttcaccggcgtcgccaccgaagacctagtagcgcggcacggcggggttggggaagccggcctccgagaggagaatggtgaccgcagcagtgtggaggcgtcaggcggtggccactggccaaccattgtcaagctcgcatcatctattggcacggtggtccctgtggctttatctatagtaccatatttctaccaagtctacacaggaaattttgagaggacaatagaagtgtatggtgcccccgccatgttggctggatcaattaacagcataatttggttgacgtattcaataatggccagcaaaaaggatcttaaccttgctcttatcctgatgcatgcattactttgcatgtcgacattcacttacttgatgtgtatctgtgcttgtaaaagagccactaaagaggggagtgttcccaaaagatctcagaaagttgctactggatttgaccttattctaagttgtataacgaacttggtgactttcatcataacttttcatgatcatcctgagcacactacttctctgatcacttctggagtagggtttgtcctcaatgttgtggagatcgtacttcttgtcatagtaacaattatggttcgaggtctcttacctgattttgcaatgctatttgtagaagtaattcaaaggacaatgatgcggattgagcgtgaccactacattcaaattcttttacaagcctcggggatagctggtcaggagcctgacgcgtcgccgtcgatccgcgggaggaagagaggcggcagcgtaccactactagtctactaccgctgcgctgccgtcctcgacgtcgacaccgcgcgcgcgcaagcaggtgagacgccgctgctcctggtggccacgttcggccacaccgcgagacgcggcggccggcctacctacctcctggagcgcgccgccggcccgtccacgcctgaccccgacgtacggcggcgacatcacaacgccgccgccgcctcctgtctcgctctccaggcgcctagcaagcaagccatgtcgcccatggccatgccggctgccaatctgcccggcgccccacggcgcgtcgtcagcgagtcggcggctcggcgccgtgctggcttgggcatgggctgtcggaccagagagaacggtttgcataattgcattgtcgtgtactcgttcgtatcgggtgagaatgtcaccaatggaagcagttcgtcggagatgaacgtgctctgcccgtcctcgtcggcggcgactcctcctcctccggcgccggccgccggcgcaccaggcgtcggcgtcgccgtcggcggcgaagcgcgggaggaagagaggcggcggcaatgttactactaccgctgcgccggcgcgctcctccgcgccgccgtcctcggcgacctccaccacctcgctaggatggcggcggaggtggacgcggcggcgcctggcggcggcgagggtgccggcggagtccgatcgcggtgcggccgcggggcgctgcacctggccgcggccaacggccgcacgcacgtctgccgcttcctgctcgagggcctcggcctccccgtcgacgcgctctccgcctcaggtgcgcccccctcccggccggcggccgccgctcgttcctcgcacgtctcgtctatgctcgcggagcgcctgatttcgtgcttcgtgttcgacgccgcggcgcacgcaggtgagacgccgctgctgctggcggccacgttcgggcacacctcaacggcggcctacctcctggaccgcggcgccgacccgtccacgccggaccccaacggcggcgacaccccgctccactgggccgcctacaacggggatcgcgagctggcgaagctgctgctgctcaggggagccgacgtgggcgcggcgaacccccgcggcacggcgctgcatgtcgccgctgcacgggggcacgccgccgtcgtcagcgtcttgctgaaccacggcgctgatgtacgcggacgcgcccaacaagattgccaatatcgtcttcacaccgttggtttcttcacttttggggggatcattggaatgcatgaagttgctcattcagcatgtagtcgtaccgggtccattggattcatcaagtgcttggtggaatctggggcagatccaaacattccagacgaacttgataggttaccaatagaaattgctgcaatccatgccgaacgggaagtcattgaggttctattgccattgacccaccaagtacctactcttctagattggagtgttggtgggatcatcagatatgtaaaatatcctgcttacaaggaatgggcaagaaatgcatcatgtaaaaggaaggatgaactcaaactacaaggcaactcctctttcaacaacgaggactacgatgctgcaatactgctatacagcatggtaacaacttttgctcattcccgatttttcatgctcatgtttggttgcaaatgttttttcagttcaaaaggtgcaaaatactgctttgcaatgaagttcgacaacaccgacgcaaagttatattcaaacaggagtgcttgctggttaaaccttggcataggcgatgaggcactctcagatgctcagatctgcagcaagatgcaaccggactgggcgaaaggctattaccgtcaaggaatggccttctctttgctacaggtgaccatcatgtaccatccatgttca

SEQ ID NO: 11060 - DNA, 603 bp, Oryza sativa
  Clone ID: TFbOSC12692j.C1.o1.hg
gtcgactctagaggatcccctggtgggcccacctgccatgtcacagaggcgcgccttacccgtgtctccggagagtggagtggagaagaagaactgaagaagccgttcgttctggagcgcgccgccatccgctcgaacctttcccctctttgccttgcgcaccaaattgagcaggagaagagccgcggccggtgtggatttttgtgttggtcggtcgcgaggatcgatggcggcgggggaaggagacgtggggatggaggtggagacgaaggcgccagcgatgccgccgccgccgccggcgtcgtcgaggagtttgttctctgttgcaaatttgcaaggcagacagaaccatcaaaggttttagctgggcaaagcagagtcgacgttgacgcggccaggaagaagaagcaagctcgcgcgaagaacggcgacacgcctgagcctgacgccgccggcggtgcccgtgcccgggcgtctcggcgagcgaaacggggaccgggcagctaccgcggcgtgcggcagcgccggtggggcaagtgggtctcggagatccgcgagcccaaccgcgggaagcggcactggctgggcaccttcggcagcgcc

SEQ ID NO: 11061 - DNA, 486 bp, Oryza sativa
  Clone ID: TFbOSC900276j.C1.o6.gm
atggtggggggagaggtcatgtgcgaggcggcggcgccgaggtacaggggggtgaggaagcggccgtgggggaggttcgcggcggagatccgggacccggcgaacgggcgcgcaaccaacttcccgctcgtctcctccctcccgctcccgtcgccccactaccacctccccgggaaggcggcggcggcggcgccgccggtggccggccccgcgtgcagcgcgagctccaccgtcgagtcctcgagcgggcctcgcgggcccagaccggcggccacggcggcggcggtgccccggaggcgggtcccgcggcccgcgccaccggcgcccgacgccggctgccacagcgactgcgcctcgtcggcctccgtcgtggacgacgccgacgacgcctccaccgttcggtcccgcgtggcggcgttcgacctcaacctcccgccgccgctggaccgggaccacgtcgacctgtgcacggacctgcggctctga

SEQ ID NO: 11062 - DNA, 3375 bp, Oryza sativa
  Clone ID: TFbOSC401273j.C1.o2.fg
atggcgaggtaccccgctccgacgagctctcgtgcaatcggagcccccatccagcccacggagcctcacgcgccactgccgaacaccgggggagaaggagcaccaccaccagcacgcaccatgccaccgccatcctctcaggccgcgacctccactcctcccgccgccgcgacgccactgcagcggccgccggcgcaagccaccgctcagccgtcgacacagagatactacgtcggcgtgcagcgagacaagggcacgggcaaatgggcggcatgcgtggtcgacccgtccaacccgaccaagcaccgcctcgtgggcgccttcccggacgagcacgcggcggcgctggcgcacgaccgcctcgacctcgcgttccgcggcggcggccaccgcggcgccggcgacaacttccgcccggcgttccacgccgtggagctggagttcctcaggctgtgcgcggccacctcgtcgccgggctcccactgcggcctcgtcgccggcggcgacaagtacgacgagaagtactccgaattcctgcgcaaaatctaccacggggtgatggacaactccccctcctacaagaaattcttcgacgtgatcctggatttcttcatcgctcgggcgagagagatcgggcgggaggccctcgaggacggcggggatatgctggtggagaggttcgtcgcgatgcacaagaacaaggccgtgacgccgaggtggcgtgcgtggtaccggagcgattctcgcaaggttcttcagattcctctgtccctccgagggggaggaggagagatcgatcactcaacccagaaggaagctaggatggattctgatagctgcaaaaggcggaagcatgaaagcggtcacgatagctcttcacgggtccagtcccagtcaagcatccttagtcgtaacagaattttgtgtcatcagttgcttgaacaatgcgatgacttgaagtatgggagctccacgaatgattacaaggcaatcagtatgaagcggcttgaacttatcagcatcctacaaaagctgcaagaagtacctatccagttgccatatgccagtccactcaagtcatcagaaacaaatcgccttgtgcaagatggaagaaactctagttgtcgtaatataattgacttggattcagacaatgatgaagattatacttttgctaatgtggacaatattggtgctaacacaacagttgttttagttgattctgatgacggggacagtgttgcatcctttgtagatgaaaaatcatctgattccaagcaaaatgcgaattatattgaagaaagcgttctgcctgagcagcatgcccaacaacaggaaatctccatgctggataatgaaaacatcagttctgaagcacaagcagttaagaaaggaaaggatagtatggacatcaacgatgttatttacaacaagagtggtcatgaggagataggggaagaggaagcacaagctgaaaatgtccagataaaagggaacttaaagaaagagatcatctctgttgcttctgatgaactagcttgtgaagttatgcgcagtcagtcaccaaccaatggaaattttgatcaatatgacaacagcagcccagttgatgagctggaaggactttggatggacatgtaccttgcaatggcatgttcaaagactgttggaagcgatcataacattgtcccatcagagaattcttgtgaacaagcagaggatgaatgccagcacgatttcctgatgaaagatgatttgggcattgtctgtcgtgtttgtggtctgatccagcaacgtattgaaaatatttttgagtaccagtggaaaaagcggaagcaatcgtacagagcacgtccctcagaacacagaaattctagtgatgcagatgcaattgacaaaacttcaggagctattctcgaagtggtccctgatgctctatgcctccaccctcaacattcacagcatatgaaacctcaccaagtggaaggtttcaatttcctggtcaagaacttggcagatgagaacaaccctggtggctgtattctggcacatgcaccaggttctgggaagacttttttgataattagttttgtccacagcttcctagccaaataccctgctggaaggccattgattattctcccaaagggaattctatcaacatggagaaccgaatttcttcattggcaagttgatgatattcctttgtatgacttctactcctccaaagctgacaaacggtctgaacaactcaaagttttgaacttgtgggaggagagcagaagtatcctgttgttgggctatcaacagtttgcatgcatagtttctgatcacacttctgatacagaagccatcatgtgccaggagaagttactgaaggtcccgagccttgtcattctagatgaaggacacactccaagaaacgaggaaacagacttgctcacttcactggaaaacatccgaactcctcgtaaagtagtcctctcaggaaccttgttccagaaccatgtgagggaggttttcaacattttgaaacttgtccgatccaaattcttgaagatggacaaatctcgtgctattgttaactgcatactaagcaaggtggacttgatggggaagagtgcacgatcaaagaatatctcagataaggacttctttgatttggttcaagaacaccttcagaaagatggaaatgacaagatgagagcggtgattatccaaaatcttcgtgagctaactgcagatgtgcttcactattaccaaggcaagcttttggatgagctacctggaattgtggactttacagtttttttcaatatgagtatgatgccacgggaagggaaggtactcgtgttcagccagtatgtgcgctctttgattttcttggaaaagctggtcagtagaatgaaaggatggaaatcagaggtacatattttcagggttactggtggctcaactcaggatcagcgtgagcaagcagtccatagattcaacaactcaccagatgctagagtcttctttggctccatcaaggcatgtggcgagggcatctccctcgttggcgcgtctcgtatagtgatcttggatgtccatgagaacccttcagtgatgcgccaggcgattggccgtgcctataggccaggacagtctaaaatggtgtattgctaccgcctcgtcgctgctgattcgcctgaggaggatgatcaccacaccgccttcaagaaagaacgagtgtcgaagctgtggttcgagtggaatgagctctgcagcagtgatgattttgagctcgcaacggtggatgtttcagatagcgaggacaggttccttgaaagctctgcattgaaacaagatatcaaagccctattaaaaaggtga

SEQ ID NO: 11063 - DNA, 3594 bp, Oryza sativa
  Clone ID: TFbOSC410066j.C1.o4.fg
atggcgaggtaccccgctccgacgagctctcgtgcaatcggagcccccatccagcccacggagcctcacgcgccactgccgaacaccgggggagaaggagcaccaccaccagcacgcaccatgccaccgccatcctctcaggccgcgacctccactcctcccgccgccgcgacgccactgcagcggccgccggcgcaagccaccgctcagccgtcgacacagagatactacgtcggcgtgcagcgagacaagggcacgggcaaatgggcggcatgcgtggtcgacccgtccaacccgaccaagcaccgcctcgtgggcgccttcccggacgagcacgcggcggcgctggcgcacgaccgcctcgacctcgcgttccgcggcggcggccaccgcggcgccggcgacaacttccgcccggcgttccacgccgtggagctggagttcctcaggctgtgcgcggccacctcgtcgccgggctcccactgcggcctcgtcgccggcggcgacaagtacgacgagaagtactccgaattcctgcgcaaaatctaccacggggtgatggacaactccccctcctacaagaaattcttcgacgtgatcctggatttcttcatcgctcgggcgagagagatcgggcgggaggccctcgaggacggcggggatatgctggtggagaggttcgtcgcgatgcacaagaacaaggccgtgacgccgaggtggcgtgcgtggtaccggagcgattctcgcaaggttcttcagattcctctgtccctccgagggggaggaggagagatcgatcactcaacccagaaggaagctaggatggattctgatagctgcaaaaggcggaagcatgaaagcggtcacgatagctcttcacgggtccagtcccagtcaagcatccttagtcgtaacagaattttgtgtcatcagttgcttgaacaatgcgatgacttgaagtatgggagctccacgaatgattacaaggcaatcagtatgaagcggcttgaacttatcagcatcctacaaaagctgcaagaagtacctatccagttgccatatgccagtccactcaagtcatcagaaacaaatcgccttgtgcaagatggaagaaactctagttgtcgtaatataattgacttggattcagacaatgatgaagattatacttttgctaatgtggacaatattggtgctaacacaacagttgttttagttgattctgatgacggggacagtgttgcatcctttgtagatgaaaaatcatctgattccaagcaaaatgcgaattatattgaagaaagcgttctgcctgagcagcatgcccaacaacaggaaatctccatgctggataatgaaaacatcagttctgaagcacaagcagttaagaaaggaaaggatagtatggacatcaacgatgttatttacaacaagagtggtcatgaggagataggggaagaggaagcacaagctgaaaatgtccagataaaagggaacttaaagaaagagatcatctctgttgcttctgatgaactagcttgtgaagttatgcgcagtcagtcaccaaccaatggaaattttgatcaatatgacaacagcagcccagttgatgagctggaaggactttggatggacatgtaccttgcaatggcatgttcaaagactgttggaagcgatcataacattgtcccatcagagaattcttgtgaacaagcagaggatgaatgccagcacgatttcctgatgaaagatgatttgggcattgtctgtcgtgtttgtggtctgatccagcaacgtattgaaaatatttttgagtaccagtggaaaaagcggaagcaatcgtacagagcacgtccctcagaacacagaaattctagtgatgcagatgcaattgacaaaacttcaggagctattctcgaagtggtccctgatgctctatgcctccaccctcaacattcacagcatatgaaacctcaccaagtggaaggtttcaatttcctggtcaagaacttggcagatgagaacaaccctggtggctgtattctggcacatgcaccaggttctgggaagacttttttgataattagttttgtccacagcttcctagccaaataccctgctggaaggccattgattattctcccaaagggaattctatcaacatggagaaccgaatttcttcattggcaagttgatgatattcctttgtatgacttctactcctccaaagctgacaaacggtctgaacaactcaaagttttgaacttgtgggaggagagcagaagtatcctgttgttgggctatcaacagtttgcatgcatagtttctgatcacacttctgatacagaagccatcatgtgccaggagaagttactgaaggtcccgagccttgtcattctagatgaaggacacactccaagaaacgaggaaacagacttgctcacttcactggaaaacatccgaactcctcgtaaagtagtcctctcaggaaccttgttccagaaccatgtgagggaggttttcaacattttgaaacttgtccgatccaaattcttgaagatggacaaatctcgtgctattgttaactgcatactaagcaaggtggacttgatggggaagagtgcacgatcaaagaatatctcagataaggacttctttgatttggttcaagaacaccttcagaaagatggaaatgacaagatgagagcggtgattatccaaaatcttcgtgagctaactgcagatgtgcttcactattaccaaggcaagcttttggatgagctacctggaattgtggactttacagtttttctcaatatgagtagcaaacaggaacatattattaagggcttggatggaataaataaatttgcgaaacgctcgagatgcaatgccgtttctcttcatccatgcttgaagaatgccaataaagctgatgcagatgatggaaatgtcaccaataggaagatcggttccatcatatccggaattgatatcaacgacggggtgaaggccaagtttgtacacaatctgttgtctctttcagaagccacgggagggaaggtactcgtgttcagccagtatgtgcgctctttgattttcttggaaaagctggtcagtagaatgaaaggatggaaatcagaggtacatattttcagggttactggtggctcaactcaggatcagcgtgagcaagcagtccatagattcaacaactcaccagatgctagagtcttctttggctccatcaaggcatgtggcgagggcatctccctcgttggcgcgtctcgtatagtgatcttggatgtccatgagaacccttcagtgatgcgccaggcgattggccgtgcctataggccaggacagtctaaaatggtgtattgctaccgcctcgtcgctgctgattcgcctgaggaggatgatcaccacaccgccttcaagaaagaacgagtgtcgaagctgtggttcgagtggaatgagctctgcagcagtgatgattttgagctcgcaacggtggatgtttcagatagcgaggacaggttccttgaaagctctgcattgaaacaagatatcaaagccctattaaaaaggtga

SEQ ID NO: 11064 - DNA, 834 bp, Oryza sativa
  Clone ID: TFbOSC900257j.C1.o13.fg
atgtctgagctggcttattcacccacacaggaggtgaaagtgaattccttgttttgcaatggcataacagaacggtcaagccgattctcaccctccatttggttagctcctgacatcacagagggctatcgcaaatgtcagcgtcaagtgttctggtattcttttctgaagctacacgtaactctagaagtatttcagcaagaagggtggaaagattcgttaccggttgattttccaaagcctagtgacaatgaaaattctgtggaagttgcacaccctaacataaagccattcagtgtgcacccgctgcccctgactaaaaattctgatgtacttctggaatcttcaaatgggtctgattctttaaaggaagagaaaaaccattactatccaggcaaggaaatcaagcgcagaaaacgacatagaagaaagcagtatgtggaccaagaaccatgcataatgagaggggtctacttcaaaaacatgaaatggcaagctgctataaaagttgacaagaaacaaatccacttaggtactgtcgggacacaggaggaagcagcccgactatatgatagggctgcttttatgtgtggaagggagccaaactttgaactttctgaggaagagaagaaagaactacagaattacacctggaaggacttcttggatatgactcgagacaccataaccagcaaaaaacaaaggaaagttggattaataaggcgcaataagacggactcgctggtaggacagagtgatggtgatactgagatgatcaatggtggcggctcatcgcactcggaagatggagatgctgagacctcagcatcttaa

SEQ ID NO: 11065 - DNA, 249 bp, Oryza sativa
  Clone ID: TFbOSC400795j.C1.o54.gm
atggcaatgatgcgtcgtggcgggctcacctccccagatcgtgcacgagatccacatcgcgcagtagctggcaggtgtgcgggtgcggatgtggtgccagaaaggaagttccgcggggtgaggaagcagccgtggaggaagtacggggcagagatccacatctcgcagcagagcgtgcgcatgtggcttggcgtgttcgacaccaccgaggaggccacgcgggataaaaccgggatcaaaactgcctaa

SEQ ID NO: 11066 - DNA, 684 bp, Oryza sativa
  Clone ID: TFbOSC400138j.C1.o12.fg
atggccggcgatggcaccggagacgacgacgacgtgcatgcacgggtgaagtacaagggcgtggcgaggacggcggacgggcggtggcgagggttcatcaccaacaagttcgggaggcggtacggcgtcggcgaccacggcacgccggaggaggcggcgctggcgcacgaccgcgccatcctcgccatcctgggcgcgcacgcttcgccggcggcgctcaacttccgcgccgcgttcagcgacacggagctccggttcctccgcgggccgcacgcgccgtcgcgccgcgccgcgggcgtcgtcgccgcggtcatgcgcggcgccgcgttcgacgccgcgctcgagcggttcgcggcgcgcgcctacgacgcgcacaccgacccggagctcgcgctcgacgtcgccgcgttccgcctcgccacccgcgacgccggcacgccgctggcgcagccggacgccgagagggcggcgttcgtggcggcggcgaggaacaaggtgcacgacgcggcgtggctgaggagctacctgcggcggcggcggctggtcggcgcgacgttcgaggacgagaacaggtggccgcccgtggtgccgccggcggtggccgacgtcggcgacggcttcgccggcaacgagctggtgtacctcccctatggcagctgccatgtggacgagatgatgatctga

SEQ ID NO: 11067 - DNA, 571 bp, Oryza sativa
  Clone ID: TFbOSC19001j.C1.o5.np
gctctcccgggcagccgcggcgaacgcctgtgggtcggcacgttcgacaccatcgaggaagacgcgcacgcgcacgacgctgccatgctcgccctgtgcggtgcctccgccagcctcaacttctccaactccgcctggctgctccacatcccgcgcgcccccgccccccgtcgtctccggccattagctgcccgacatgcagcgcgccgccagcgaggccgtcgccgagttccagcgccggggaagtaccgccacctccggcgacgctgcatcgaccgcccctccgccgacacccgttctccaaaccaaacaatgcgacttcatctctgtttcttcactagattgttggatgttaatgtcaaagcatatcagtagtagcatagcgaaaggatcgttgtgcctgcaaaaaaatcccatttcattttgcatggttacaaattcttacccttctcttttgctcgaatacattatattgcagatgaattccttcgtgttgtgtatttctagattacagagataaaccttatcaatactaactaacacaacaaactcaatccatacctatagttac

SEQ ID NO: 11068 - DNA, 939 bp, Oryza sativa
  Clone ID: TFbOSC900259j.C1.o16.fg
atggtggccttccggaggatccggatctcctactccgacccggacgccaccgactccgactccgactcggactccgccgacgccggcgaccacgatatcagcagccgaagcagcaggaccaacgccgccgcacgccggaaggtgatcgtcatctcgctgtccaggaagaagggaagatcgttatcgcagtccggtcgtcattatcgtcgtcgtcgttccgaaattccggcggccgcggcgaaggcggtggaggcggaagattggccgtcgtcgagcgacgggatgcgtcgtggcgccgtagcggcggcgaggtcggcgtcggcggccgccaagaagggttcccgcggcggcgtgtaccagcgccagcccgggcggtgggcggtggacttccgggacagccagctcaaggtccggcaatggctcggcacgttcccctccgaggaggaggccagggccgcctacgacgccttcgaggtgcaggtccgcgcctccctgtcccgcggcggcgccggcgcctcctcccccgccgtcgccatcgcgccgtcacctgcccgcgtcaagatccaactaccggcgccgcggcgtgcatctggccgccggaagaagacgcagacgacggcgacggtgacgacaacgacgacgacggaatcattatcgcaagtgacggcctcatcagcgtccccgtcgtccaaggaggcgccgccgccgtcgtcgtcagcttctgccgcgacgccgccgccgctgaatccgccgccgttcgtcgtcgatacattcctgggggaggatgaccacctcgccgccgacgaggatgaccgcttcggcttcggcctcgccgatcttgggcacctcccgctgccgttcttggatgacaacgacatggacttcaagctcagcgacagcgacgatctctccttcctcttcgatatcggcttcatgtga

SEQ ID NO: 11069 - DNA, 333 bp, Oryza sativa
  Clone ID: TFbOSC1021j.C1.o1.fg
ctggaggaatatgagaaggagaggtcggagatggagggtgtgtcgagggaggagtacctggcctccctccgccgccggagcagcggtttctccaggggtgtctccaagtacagaggcgttgccaggcatcaccacaatgggcggtgggaggcacggatagggcgggtcctggggaacaagtacctctacctgggtactttcgatattttgtacaatctatcacaaaactacagatttaagaacttgttttacaaaaatacagattcagtggcttcgtttatcacaaaactacagttttgtgatagattgtacaaactacctgtagttttgtga

SEQ ID NO: 11070 - DNA, 543 bp, Oryza sativa
  Clone ID: TFbOSC400824j.C1.o4.fg
atgtcagcgtgccacgtcaacccccctctccccctcttttcttcctttctcccatctctctctctcactcttctctcgcaggccggccggcgaagcagagacgcggagcggcggtggcggcaggcgggcacgcgcgcggcggctggcggaggtggtggccccctagcagcgggcatggttgtcgtcggcgccctttcccgacgccggccgtactgcgcagcgctcgcccacgccgcgccgccgcggtggggcatggtggtgaggcgggcgacgcgacgcccaatccgacgcgggccgcggtcgcgcagctcgcagtactgcggcgtcaagttctaccgccgcaccgggcgatgggaatcgcacatatggacgtacgatctagcggcgatcaagttccgcggcgtggagggctggaggccgacatcaatttcagcttggaggattatgggggatgatctgaagcaggtgagaacaagtttaacgagatcattgtggatgagcaatctgaccaaggaggagttcgtccacgtgctccggcggtag

SEQ ID NO: 11071 - DNA, 471 bp, Oryza sativa
  Clone ID: TFbOSC411132j.C1.o6.fg
atggatgtgaacggcatcatcactgtcctcatcacgtacgagctattggttagaagagtatcccaccgcccacactacccagatatcgccggcacaacgttccatcctcgcgtcgctggccatgccgcccgttgcctcctcctccgactacggccaccgctcaccagtgctggccggaatggacagccacggtgctcgtccctgcaatacccaaacggcctagtgcctccttcgcactcggatctggtggccccagtcctcatcaccgctggactgatcgatgcaatgaaggggattggaaaggaggagaacggatgttgcagtagtcagggatcagagcccgggaagaagacgcagatctggctgaggaccttcgagtcaccgaagatggctgctgtggcgaactatgtggcgtcactccgcctccacggattggagccgaggctcaacttcctggcactcatcatctga

SEQ ID NO: 11072 - DNA, 731 bp, Oryza sativa
  Clone ID: TFbOSC1032j.C1.o1.hg
ttctcatttcaacaaacgtacctctttttacagatactcaagaggaggcagccaaggcctatgatcttgctgcaattgaataccgaggtgccaatgcggtaaccaacttcgacatcagctgctacctggaccagccacagttactggcacagctgcaacaggaaccacagttactggcacaactgcaacaagagctacaggtggtgccagcattacatgaagagcctcaagatgatgaccgaagtgagaatgcagtccaagagctcagttccagtgaagcaaatacatcaagtgacaacaatgagccacttgcagccgatgacagcgctgaatgcatgaatgaaccccttccaattgttgatggcattgaagaaagcctctggagcccttgcttggattatgaattggatacaatgcctggggcttacttcagcaactcgatgaatttcagtgaatggttcaatgatgaggctttcgaaggcggcatggagtacctatttgaagggtgctccagtataactgaaggcggcaacagcatggataactcaggtgtgacagaatacaatttgtttgaggaatgcaatatgttggagaaggacatttcagattttttagacaaggacatttcagattttttagataaggacatttcaatttcagatagggagcgaatatctcctcaagcaaacaatatctcctgccctcaaaaaatgatcagtgtgtgcaactga

SEQ ID NO: 11073 - DNA, 959 bp, Oryza sativa
  Clone ID: TFbOSC1342j.C1.o1.gp
ttttaacagcgacgctaaataataataatagtagtagtagaggtaattcacattacaagttcttataacacgctaataatattacaagacataataataataataatgctactactactgtttacaacctgtaagatcagcagtagaaggtaataacagacttaaagagcaatggacgccacggccggagtaaccgaccaagtgaccggcccaccggagacgcacgccggacacaaaaacgccggctgccggtagcatcggcgtctccggttgaggaagaacaccaaccaaccctagcatctacagaggaaacaagtccggagagagatcgatctacgtacacaaacgaaccaaaccaaaaggattagggactataaaactgctaatccatgcccgtccgtgcggtgcaaaatgtctaaaatcccatctgcacggcggcggcggcggcgacgattaggctaacgacggcgtgagtactagccaagaagtggtggtggtgttaattggcggcgaggagggagtcccagtcgatctcgtaggacgggtacttggtgagggcgaaggcggcggcctcgtcccacggcgcctcgctgaagtcgagctgctgcatctccggcacggtcgccggcgtctcggccgtggtggcggcggaggacggcgacagggagggcgacgagtcggcggactccaggcaggacgacgcgtcgtcggaggacggcgacgagcagttgctggtgggcgcggaggatgttgcggcggcggaggcggagacagaggacttcttggcgttcttggcggcggcgatgttctggcagagcgtctggagcttggcgtcgacggaggcgtggagcgggccgcgggaggcgcgttgtcggggaagttgagccgcccgcgtcgccgcggaggcggtacgccgcctggttgtaggccagcgccgcctcctcggctgtgttgaaggt

SEQ ID NO: 11074 - DNA, 307 bp, Oryza sativa
  Clone ID: TFbOSC31818j.C1.o1.np
ataaaaaaataaactcaaacggacgaaatatgtggcatgtggaactttccaaagctctaccaaaaaacttctctcctcgagaacacaatcttgcaagcggaatttggaggttttaatatcgccgaacccggtgaagttggggagaatcggatgtaactttttatgtacatgtccgtggatatattatttgcctgattctgagtccggcggcgccagccatgctggtaccctcctcctgccatgtcggttcgcgtgtgccatggtggcaggaggacggcgccagagaggctagcgccggtaccgcgcc

SEQ ID NO: 11075 - DNA, 1140 bp, Oryza sativa
  Clone ID: TFbOSC29687j.C1.o13.gm
atggtgggcccatgtggacctctacttctaggggaaggacccctgggcggcgagtccaccgacgccggctaccgcggctcgttccacggcacgtgggagttcgccagcgccggcaagctcggcctcgaccgcccccgcgtcctggtcaccacggcggatcactactggttcgtggagagggcacgctcgtacgcggaggggatcaagaagtgcgagtgggacggcgagctggagttccacgagaccgagggcgagggccattcccagacagagtcccacaggcgcactcctcacctcctcatcggccggcgccgccgccggcgtgccctgtcggcgccgccgcggggccaagccgtcgtcgcctcctcgctgcggggccaagccgccgccgccgtcgggaccaatcgcctcctcgcccagtcgccacatcgccgccgtcggagcaaccaacgccggctctgccgcgccccatcgcctcctcgcgccgtcacgcgccacatcaccgccgccgggccaagccaacgccgccgccgcggcgccccatcgcctcctcgcctgccgagccctctggcttgccacatcgccgccgcaggggcaaggcgacgccgccgccgggccaagccaacgtcgccgccttcttcgttgtctgacttaccaaaaaaatgtgaaaggtcgacggccgctcctctaccacccggcaaggtcgacggccgcgacgatgtccgctcacccccgcttcgccgcccctctggcctgctcgagcggtcgccggcgagcgcgatagatgtgcgcggggcggtgggtgtgcgaggtccgcgtgctggggcgccgcggctgcaggctctggctcggcagttcgacggcgccgacaccgtcacgcgcgcgcacgacgccgccatgcccgctctccgcggccgtgcagcgtgcctcaacttctccaactccgcgtggctgctcgcctacgccgcgctgtacgcggcgctcctgtcggggggcggcgccgaccatgcccgccgccgctgccggagctcgcctgctgcgccgcccacccgcgccgtccgctgtccaggaaggagagaggggaaaggaaaggagagaggagtgaggctgacatggggcccgtatatatttgtcacgtaa

SEQ ID NO: 11076 - DNA, 1140 bp, Oryza sativa; identical to SEQ ID NO: 11075
  Clone ID: TFbOSC400151j.C1.o86.gm

SEQ ID NO: 11077 - DNA, 429 bp, Oryza sativa
  Clone ID: TFbOSC401865j.C1.o18.fg
atggccgcgcgcgcgcacgacgttgccgcgctcgccatcaagggccgcgccgcgcacctcaacttcccggacctcgcccacgagctgccgcgcccggccaccgcggcgcccaaggacgtccaggccgcagccgcgctcgccgccgccgccgacttcccggcctcctccgccaatgcgggcgccagcaataaccccgacggatcggacgacgcgagcgccgggtccgcctcgccgcccccgccgccggacgccgctgacgacgcgctgttcgacctccccgacctcctcctcgacctcagatacggcccgcccagctcgggcctctcgtgcgcgtcgtcttgggaagacgaagtgggcttaatctccggcgccggtgccgccgccgccggcgtgttccgcctggaggagccacttctgtgggagtactaa

SEQ ID NO: 11078 - DNA, 762 bp, Oryza sativa
  Clone ID: TFbOSC100569j.C1.o2.fg
atggccgcctgcgcctacgacgtcgccgcgcgcgccatgcgcggcaccagggcgcgcaccaacttccccgtccccgccgccgccggcttcccggggggaggcggcggcgggtgctggccgtgggttaacatcccgccgcagggcgcggcggcggcggcgtcgcaccagcagccgctcaacacgctcctcctccacaacctcctcatgagctcctccccccacggctgcctcctcctgcaccacgccggccacggccacggccacgcccattcccattcccactcccacagccgcgcacacaaccccagtactcgcccacccacctccgcgccgccgccgcctccacctgccgccgcctcatccgccacgaccgcgccggccaccacgacaggcgccgcagcgacgtccgcgccgggagcggacgacgacgcgtggggcttcctcctgcgacgtgagccgccggaggcggggctcctgcaagacgtcctgcacgggttctacccgaccaggcggccgcacgacgacgcggggccggcgccgaagctggagcggccgtacgaggcgacgtcgtcgtaccgcgtgtcctccccctggggcgccgtcgaggactgcgacgacggcgacggcgacggcgacgacgactaccgcgggttcccgatgatgccgcaggggctcctcgaggacgtgatccagtgcccgccctacatggaggtcttggcggcgccgtcggccgccgtcggccgcgtcagccgcaggggctga

SEQ ID NO: 11079 - DNA, 471 bp, Oryza sativa
  Clone ID: TFbOSC401894j.C1.o11.fg
atggccgccgtcgcctacgacgtggcggcgcgcgcgctgcgtgggcccgacgcggcgctcaacttccccgatctggccgcctcgcgcaccgcgccacccgcgtccagctcagcggacgacatccgcgcagcggctgccgccgcggccgcctcgctgcagcacgaccgtgccggcggcggcattgcccctgccgcctctggatcagcgcaccagcagcgcggcgggagcagtgccgccgcgcgcaccacggcgggcagcggcggcgcgcagcaggaaggcagcagcggcgccggcgccgggagccaccagtatttcttggacgaggaggccctcttcgagacgccgcagttcctgcggaacatggccgccgggatgatgatgagccccccgaggctcagccccagctcctccgacgattcgccggacccgtcggaggccgggggcagcctctggagctaccgtgacccatag

SEQ ID NO: 11080 - DNA, 493 bp, Oryza sativa
  Clone ID: TFbOSC12713j.C1.o1.gm
cgccgtcgacgccgccctcgcctacgacaaggccgccgcgtccatcctcggtccccgcgcggtcctcaacttcccggcattcagccctcctgccgccgccatcgccgcgccggagcaatgcgaacccccgttctgttctcctgccaccaccgccgccgccactgcgccggagcaacgccaaaccccgggctgttctcctgcagccgtcgccggcagcggcggcggcgcagtgttcgaggagcgtgacgtgaagccggtggtgttgccgttgccgttgccggccatactccaggatggcggcggcacggaggcaatggcgcagcattgggattgggagtgggacgcgtcttggcctgagctggagatgttcgagtgtctggatgacatcgccatgtacctcgacgtcgacgctgtgatgacgactcgggattgcaaggttgaggagctcgacgccgacatcgtcgactcgccgctgtggacactgtcggactga

SEQ ID NO: 11081 - DNA, 726 bp, Oryza sativa
  Clone ID: TFbOSC900118j.C1.o25.fg
atgggtacaaaccctagcctgcacgagctggcggcgggggcggcgccgcggggacgcgtggtgcgtatcctcgtgcgcgacgccgacgccaccgactcgtcctccagcgaggacgaggcggttgcggtggcgcagcctcggccgcggcggaggggtaaggtgggtggtggtggtggtggtggtgggggcgtgaagcgccgcgtgatggaggcgggggcgggggaggcgaggccgaccgcgcggttccgcggcgtgcggcagcggccgtgggggaggttcgcggcggagatccgcgaccctcacctccgccgccgcctgtggctcggcaccttcgacaccgccgaggaggccgccgccgcatacgacgccgccagcgtccgcctccgcggttccagcgccgccaccaacttcgcctccgtccgctgctactcgctgccgccggagctacccaagccaactatttcaccgcctgaagcagctgtgaggccaatcaccttgccaattgggacagctaagccgacccttcttccacgggtgaaggaggaaggtgagagctgtggcggtcgggtcaaggaggaggccagtagctgtgaggtccaggtgcttgctccggagccaatgtggacgatgatttcaggcaagcgtaagaagcgatcgggctgtggaacccgtgtccgtgccttccatgctgtgtccgcctgtgtggaagaagttggcggggcctga

SEQ ID NO: 11082 - DNA, 1497 bp, Oryza sativa
  Clone ID: TFbOSC400325j.C1.o3.fg
atggacatggacacctcgcaccactatccatggctcaacttctccctcgcccaccactgtgaaatggaggaggaggagaggggcgcggcggccgagctggccgcgatagccggggcggctccgccgccgaaactggaggacttcctcggcggcggctgcaacgggggatcaagcggtggcgcttgcccgccggtccagacgacggcgccgacggccgccgagctgtacgagtcggagctcaagtttctcgccgccggcttccagctgagcggcgcggctggggcggcgccgccggtgcccgcgctgttgccggcggctgctctagagcagaccgacgagacgaagcagctggccttgccgccgcaggccgcggtggcgccgccgccggagcagaagaaggcggtggactcgttcgggcagagaacgtctatctaccgcggcgtcacacggcatcggtggaccggaaggtacgaggcgcatctgtgggataacagctgccggcgtgagggccagagccgcaagggacgccaaggtggctatgataaggaggagaaagcggcgagggcgtatgatcttgccgcgttgaagtactggggtcctagcaccacaaccaactttccggttgccgagtacgaaaaggagcttgaggagatgaagcatatgacacgccaggagtttgtagcttcacttaggaggaagagcagtggattctctcgtggtgcttctatatacaggggtgttacaagcctagctagccatgtttggcctcttgcacgtaagtctcaggtcaaaaacatctactttgaccaagatctgattgttgcttgcttccttctttcaggcactgaggaggaagctgcagaagcttatgacatcgcggcgatcaagttccgtggcctgaatgctgtcaccaactttgagatcggccggtataacgtggagagcataatcagtagcaaccttccaatcgggagcatggccggcaaccggagcaccaaggccggcctagagctcgctccgtcgagctccgccgacgccatcgccgccaccgaagcgaaccacaccggcgtcgcgccaccgtcgacgcttgcgttcacagctcttccaatgaagtatgatcaggcagattacctgtcatacctcgcattgcagcatcaccagcaaggaaaccttcaggggctaggcttcggtctctacagctcaggtgtaaacctggatttcgcaaatgccaatggcaatggagccatgtcaaattgctacaccaatgtctcattacatgagcagcagcagcaacatcagcaccagcatcagcaggagcagcagcaagatcaacaggatgatcagtcacaaagctccaacaacagctgcggctccattccgtttgcaacacccatagctttcagtgggtcatatgaaagctccatgacagcagcaggcacctttggatactacccaaatgttgcagcctttcagacaccaatctttgggatggaatga

SEQ ID NO: 11083 - DNA, 993 bp, Oryza sativa
  Clone ID: TFbOSC401715j.C1.o5.gm
atggcgacggcgcgcggcacagcaggcggcagcggcgcagcgcggggcgcaaggcgcgggctcgcggcgcgaggcgacgagacggcgcgcggcgcggcagcggcgatgggacgcgcgcggcggcgggacgtcgatggcgacggcgacagcgccgtcctagcccgtctctcccttgtgccgcaccagttcccaccccacgatgagaacgtgccccgcgagcccagcagccgtcgtctccgtgtgcgtctcgctggagatgcaccgtttcgcaccaccatggtgccgagggtggagcgcggcggcggcgggttccatctccccaacagcgagcgggaggactcgctgttcatccgcgcgctcatctccgtcgtgtccggtgacaccacggtgccgacgctgctgccggagccgacgatggcgaccgtggttgccggtgcggctaccgacgaggaggatgagggggagtgcaccacgggcgcggtggccagcggcggcgtgacgggcggcgtgggcaagaggaggccgcggaggcggagcggcggcgaggggagcaggtacaggggcgtgcggcgtcggccgtgggggaagtgggcggcggagatccgcgacccgcgccgcgccgtctgcaagtggctcggcacgttcgacaccgccgaggacgccgcgcgcgcctacgacgtcgccgcgctcgagttccgcggccagcgcgccaagctcaacttcccggcgtccacggccgcgcagcagccacgtccactcctccatcacaacctccgtgagaactgcggctcgaacgcgtcgtcgccggtgcacgcgccagagcacgcgaggacggcggcggcggcgaaggaccaggagatctgggacggcctacgggagatcatgatgctcgacgacggcagcttctgcgtccagcgcgacggcatggcggcgagcctgtacgccacggcatcgtctatcccgtgcggccacgttgccgtggccgccgtctag

SEQ ID NO: 11084 - DNA, 855 bp, Oryza sativa
  Clone ID: TFbOSC418226j.C1.o6.fg
atggaagcagacgcgagccatacacccaccacctcctcctccgtctccgtctccttctcctcctcgtcgctgtccacttcctcctccacctcctccctcgtcgacaatggcgcgcaagaccggcccaagagctccaagcccaaacacgccgccaagaagcgcaagagagcggccgcggaggaacctgccaatgccgcccacggcgcaggggaggataccagcagctgcagcaccgacgacaacgcggcggcgagcggcaaggcgcaggcgggcggcggcggcggcggcgtcgacagcagcagcacctgcaccgccgcctcggcgccgaggagcggcttcaagcacccgtcgtaccgcggcgtgcgccgccggagctgggggaagtgggtgtcggagatccgggagccccgcaagaagtcgcgcatctggctgggtaccttccccaccgcggagatggcggcgcgcgcccacgacgtggccgcgctcgccatcaagggccggaacgcgcacctcaacttcccggacagcgcccacgagctgccccgcccggagtccacctccccggcagacatccaggccgccgccgccaaggctgccgccgaggtgcggtgcgaggaggagtcgtcgccgtcgtcgtcgcccaccgccgagcaacccgaggaggaagccgcctgccctgacacggtgcacgccgacggcggccaggacaatgctctcttcgacctacccgaccttcttctcgacctacgggacgggctctggtggtcgccggtgtggccggcggcactggcggccgaggagtacgacggcggcgacgccgtcgtgctcaatgagccactcttgtgggccgagtag

SEQ ID NO: 11085 - DNA, 1335 bp, Oryza sativa
  Clone ID: TFbOSC400851j.C1.o68.fg
atggccccttccaagcagcagcagatgctcctcaagaaggtgatggcgaagaagcccaagacgaagaggctatccgggtttggccttaaaccctctgctgctttctccaggccccatgtgccgtcggcggcggcctccctgcagccaagccgtcgcgtccgcgtcgtgttcgaggaccctgacgcgacggactccgactctgacgacgacgaggacgccggcgccgcctcaaagaagcgctactttgagctcttcattggcaagccagcttcgtcgacgaagcaggcctctccggcgtccaccgtcgctgcctacgccaacatcggcaaggttgggagcacctgctaccgtggtgtgcgcctccggaagtggggcaagtgggcggcggagatccgcaaccccttcaccggccatagggagtggcttggcacctttgacactgctgatgcggcctccgccgcctaccagtctgcctcccgcaacttcgccgaagagaagcgccgccgtggtgtggcctcctctgcctcacctgctagttcggcgacccctactccgactgcgtcctcgtcgtcctcgacttctgccgcgccattcgcccacccttcgccgtcgtctgtgctcgaagccaccaagccagctccaaagccagagtcgccgccgctgccggagcaagctgcaactcccctcctggtggaggctaccaacgagaccgccgagctgccggatgacccagagttctacaaggatatactgcgcggtctacagctgccggacattgacccgatggatttccgagctgggctggatgctctggatatctccgatgtgccggcttacatgaatggcgaacaagacgtactcttcactgaggacatgctgcttggagacttcgctgaagaagatgacctcgacctcgacgacatcggtgatgacttctgcgaggatttcccagagatacccagcggctacgacttcggccgtggtgatatgttccggcaggactcgcacgcatcggcacacttgggacggggtacggcacagctggaagccacgctgcgaaggtggagtgagatccggatctacactaatcctgctcgagttttgacaggatctatgcttcgtgttgccgatcaggagtatactactgctactatccctctggctattgccgcttacggcgaagacaaaacatcaaaatcgcaaacgtgtccatatactactactgctggtgacaagtccgtcctcctgcgagaagatccaaagctgccgcgtctgaccgaccagctgccggtcgacatggtgagctccgcccccgatttctcaacgttttcctga

SEQ ID NO: 11086 - DNA, 675 bp, Oryza sativa
  Clone ID: TFbOSC900408j.C1.o14.fg
atggacgtttctgctgcgctcagcagcgactactcgtcggggacgccgtcgccggtggcggccgacgccgacgacggctcctccgcctacatgacggtgtcgtcggcgccgcccaagcggcgagcggggcggaccaagttcaaggagacgcggcaccccgtgttcaagggcgtgcgccggaggaaccccgggaggtgggtgtgcgaggtgcgcgagccgcacggcaagcagcggatatggctcgggacgttcgagacagcagagatggcggcgcgcgcgcacgacgtcgccgcgctcgcgctccgcggccgcgccgcctgcctcaacttcgccgactcgccgaggcgcctccgcgtcccgcccatcggcgcaagccacgacgacatacggagggcggcggctgaggcggccgaggcattccggccgccaccagatgagagcaatgcggccaccgaggtggcagccgccgcatcgggcgccactaattcgaacgccgaacagttcgcctcccacccgtactacgaggtcatggacgatgggctggacttggggatgcagggctatctcgacatggcgcaagggatgctcattgacccgcctccaatggccggtgatcctgccgtaggtagcggcgaagacgacaacgatggcgaggtccagctatggagctactga

SEQ ID NO: 11087 - DNA, 577 bp, Oryza sativa
  Clone ID: TFbOSC900408j.C1.o23.gp
ccccaagtccagcccatcgtccatgacctcgtagtacgggtgggaggcgaactgttcggcgttcgaattagtggcgcccgatgcggcggctgccacctcggtggccgcattgctctcatctggtggcggccggaatgcctcggccgcctcagccgccgccctccgtatgtcgtcgtggcttgcgccgatgggcgggacgcggaggcgcctcggcgagtcggcgaagttgaggcaggcggcgcggccgcggagcgcgagcgcggcgacgtcgtgcgcgcgcgccgccatctctgctgtctcgaacgtcccgagccatatccgctgcttgccgtgcggctcgcgcacctcgcacacccacctcccggggttcctccggcgcacgcccttgaacacggggtgccgcgtctccttgaacttggtccgccccgctcgccgcttgggcggcgccgacgacaccgtcatgtaggcggaggagccgtcgtcggcgtcggccgccaccggcgacggcgtccccgacgagtagtcgctgctgagcgcagcagaaacgtccatgcctaaacacgagtaagcgagcgag

SEQ ID NO: 11088 - DNA, 600 bp, Oryza sativa
  Clone ID: TFbOSC102044j.C1.o3.fg
atgcgtcgcggcggcgcggcggaggaggacgcggaggcggcgaggttccgcggggtgcggaagcggccgtgggggaggtacgcggcggagatccgcgacccggcgaagaaggcgcgggtgtggctggggacctacgactccgccgaggacgccgcgcgcgcctacgacgcggcggcgcgggcgctgcgcggggccaaggccaagaccaacttccccctctccctcccccacgcccaaccccagctccaccaccaccaccaccaccacctcacctaccccgccgccgctgttgtcgccgctaggccggccactagcagcctcagctccaccgtcgagtcgttcggcacccggccgcggccggtgctcccgccgcggccgcccccgccgccgccgatccccgacggtgactgccgcagcgactgcgggtcgtcggcgtcggtggtggacgacgactgcgcggacgccgccgcctcgccctcgtgccggctcccgttccagttcgacctcaacctgcctcctggtggaggcggcggcggcggcggcggctttggctgtgcctacgacgacgaggagctgaggctgacggcgctgcggctctga

SEQ ID NO: 11089 - DNA, 768 bp, Oryza sativa
  Clone ID: TFbOSC400075j.C1.o16.fg
atgtgtggaggagcactgatcccgaacgactatggcgacaagccgccgccgccgccgtcggagtcgtcggagtgggacgccacaacgaagatgaagaagaagaagaagcgtggtggcggcggcgacgacgactgggaggccgccttccgggagttcatcgctggcgacgacgacgacgacgacggcggcgtttccatgttcccttctggtgcagggacgatggagacgaccacagaggtggcgccggcggcggcggtggtggagaggccgcggcggcggcgaagggtgaggcggagctacccgtaccgcggcgtccggcagcggccgtgggggcggtgggcgtcggagatccgcgaccccgtcaagggcgcccgcgtctggctcggcaccttcgacaccgccgtcgaggccgcgcgcgcctacgacgccgaggcgcgccgcatccacggccacaaggcaaggaccaacttcccgcccgacgagcctccgctgccggcgccatcgcaggcgccgttctgcttcctgctcgacgacgacgacgacgacgacggcgtggcccgtggaaacagcccggcgtcgtcgtcggcgccggacagagcctccgcttgcacgacgtcgtcgacggtggcgtccggcgagcgaggcgatgagctcatactgctggagtgctgctccgacgacgtgatggacagcctcctcgccggcttcgacgtgtccagcgaaccacgcaggttttgggaatggttaattagcagcgcgcacgcctga

SEQ ID NO: 11090 - DNA, 1094 bp, Oryza sativa
  Clone ID: TFbOSC400766j.C1.o23.gp
tttttaagaacaaaataacgtaaatttctcattaatcagagattgatgatcaatatgttacatcgaacaacaaaatgttttctttttcttttcttgtttttttccttctttctttaaaggaactgtaacaccgggagtagtagccttttcctcatacctatctccccgtgcaaaaaggacacgatctatgtacacctagttgatcaatcctggcaattaaacggacgattaacctcttactattacacgtcgctctagacttttctacgagggatttgtgggggggtcttgtcgtcgtcatcgggcgctgcaacctacgcctcctcgatcggcggcggcaggttcaggtcgagccccacgccgacggccggcgaggcgtccaccacggatgacgacgagccggtgtcgctctgctcgtccaggcgagctacctccttcttgacgctgacgacggccggccggcgaggcaccggtgccgcgacggccacggtcaccgcgaccctggggtcgaggaacaggaacggctgggcggccaccatggccgacatcccgaggctcagatcgagcgaaggcgaggcgggcacctgggccttggccgcggccgccaccggggcggcggcgggcgtgtcccgggaggacgactcgaccgtgctgctggtcgggctgacgacggccagcgccgccgccttgggcagcggcggcggcggggcgtggtggtgggcgtgcgcgaaggcgacggggaagttggtcttggccttgggcccgcggaagtggagcgcggcgctgtcgtaggcgcgcgccgcggcctcggcggtgtcgaaggtgccgagccacacccgcgccttcctggccgggtcgcggatctccgccgcgtacctgccccacgggcgcttcctcacgccgcggaacctgggctccatgccggctcctccgccctccgccacggcgacggcgacggcctcggcggcgttcctgggagccatgtccgttcttgttcgggtcgagcaccacgagcagagcgagctaaggcgggcgagagcgccaagtgttcgaccggtggatggtgggtggttggtttggcgccggtggtgcgt

SEQ ID NO: 11091 - DNA, 711 bp, Oryza sativa
  Clone ID: TFbOSC416364j.C1.o3.fg
atggcgccgagaacgtcggacaagactatgtcaccggcggccgcggccaccggactcgcgcttggcgtgggcggtgtcgccggagccgccgccgtgggcaccggccagcacttccgtggcgtgaggaagcggccgtggggccgttacgcggcggagatccgcgacccggccaagaagagccgcgtgtggctcggcacgttcgacacggccgaggaggccgcgcgcgcctacgacgccgcggcgcgcgagtaccgcggtgccaaggccaagaccaacttcccctaccctaacggcgcgcccgccgccggtgtgaacagcggcagcagcaacagcagcaccgtcgagtcgttcggcagcgacgtgcaggcgcccatgaaggccatgccgatcccgccgtcgctcgagctcgacctgttccaccgcgccgcagcggccgcggccgccggcgcaggcggcatgcgtttccctttcgagggctaccccgtatcgcacccttactacttctttggacaagcggccgccgccgccgccgcctctggttgccgcatgctcaagattgcgccggcgccggtcaccgtggccgccttggcacagagcgactccgactcctcgtcgatcgtggatctggcaccatcaccgcccgccgcgttggcgaagaaagccatcgcttttgatcttgatctgaactgtccgccgccgatggaggtctag

SEQ ID NO: 11092 - DNA, 753 bp, Oryza sativa
  Clone ID: TFbOSC900129j.C1.o28.fg
atgtgtggaggagcactgatcccgaacgactatggcgacaagccgccgccgccgccgtcggagtcgtcggagtgggacgccacaacgaagatgaagaagaagaagaagcgtggtggcggcggcgacgacgactgggaggccgccttccgggagttcatcgctggcgacgacgacgacgacgacggcggcgtttccatgttcccttctggtgcagggacgatggagacgaccacagaggtggcgccggcggcggcggtggtggagaggccgcggcggcggcgaagggtgaggcggagctacccgtaccgcggcgtccggcagcggccgtgggggcggtgggcgtcggagatccgcgaccccgtcaagggcgcccgcgtctggctcggcaccttcgacaccgccgtcgaggccgcgcgcgcctacgacgccgaggcgcgccgcatccacggccacaaggcaaggaccaacttcccgcccgacgagcctccgctgccggcgccatcgcaggcgccgttctgcttcctgctcgacgacgacgacgacgacgacggcgtggcccgtggaaacagcccggcgtcgtcgtcggcgccggacagagcctccgcttgcacgacgtcgtcgacggtggcgtccggcgagcgaggcgatgagctcatactgctggagtgctgctccgacgacgtgatggacagcctcctcgccggcttcgacgtgtccagcgaaccacgcagtgttttgggaatggttaattag

SEQ ID NO: 11093 - DNA, 1401 bp, Oryza sativa
  Clone ID: TFbOSC400220j.C1.o29.fg
atggacgctccgagcggcgagagcggcggcggcggcggcggcggtggtggcaggaggtggaaggggaagggggtgacgcccatacagccgcggcggcagctggggacggttttggaggactcgtcggcggcattgctgcggccgctcaagaagattgggcggagccccgaccgcctcctccgctccgcatcgtcgctctccacgtcctcgtcggctccgccttcgcctcgctcttcttcggcttccgatgctccagtccgcgtcatctcgtcgtcgccgtcgtcgccctcgccaccgtcggcgcgacacatcttccccttcgcgtacgaggcctccacgacgacggtgggtgggagcccaaggctccacccgctgtcgtggcagcaatccagcatgtcccagcccgcgtcgccacagcaacagcagcagcagccgttgcagcaccagcagatgatatcgttcggcgcgtcgcctccgtgctcgacgacgcagttcgtcgtcccggagaacgcgcagcagcagcagatgctgctgcggtactggagcgaggcgctgaacctgagcccgcgcggtggccccggtggcgtgccaccgtggctgtaccagcagctgctccgggtcccgccaccgccgcagaagctttaccgcggcgtgcggcagaggcactgggggaagtgggtcgcggagatccgcctgccacggaaccgcacgcggctgtggcttggcaccttcgacaccgccgaggacgccgccatggcgtacgaccgcgaggccttcaagctccgcggcgagaacgcgcggctcaactttccggaccggttccttgggaagggccgcgccggcgggaaaggccgcaccagcgtaagctcctcggccgctgccgccgcgtcgtgctcgtcgtcgtcgctatcgccaccggagacacctgacgacgcaaacacgcagcaacaagctcctcagcagcgagaacagcgggacacggcaggagtgtccatggagaagaaacaaccacagcctccagctccaacctctcgtcaagaagggtgctctggcggcgacgcagctgcgccgtacccggccgaaatgcttcacgcgccggcggcgtgcggcggcatgtgggttgctcccgacgagtcatggttcagcacgtggggccctggcagctccttctgggacgactacgacatggacagcgctcgcggcctcttcctccaccctcgcttcaccggtgacgaaactagcatggatcattccggcacgcaagcaaccgtgccggcagtggcagcaacagcggcagggatgagcatgccatgcgatgatgttccggtaacctcttcttcttcagatctccctccccaagggacacctcagactcctaccttcatgtggaaggaggactaa

SEQ ID NO: 11094 - DNA, 577 bp, Oryza sativa
  Clone ID: TFbOSC20641j.C1.o1.hg
cgacaccgccgaggccgccgccgccgcctacgacgacgcctgcctccgcctccgcggccccggcgccgccctcaacctcccctcccgccgctgcgtcgctcccgctccgcctccaccgcctcctccgccgccgccgacggccgaggagaagaagctgctgctgttcccgccgccgctgcctccgaggaagaaggcgatgctattcccgctgccgctgccgccgaggaagaagccgctgctgtacccgccgccgctgccgccgaagaagaagccgctaccaccaccatcaccaccgccacagccgccgctgccggagaaggagaacaccccgctcccgccgctgctgctgcctccaaagaagaagccgcttccgccgccgtcaccgacagcggcagcgaaggaggagcccatcgagctcgagcatgcggcgccgccgccgcctttcgtgccccggccggtgtggcccctcctggccagcggcggcggcgggaagcggaagaagcagtcgggctgcggcggccgcatccccgccctcaacaccgccgccgccgccgtcgaggagaccggccgcgcctga

SEQ ID NO: 11095 - DNA, 4422 bp, Oryza sativa
  Clone ID: TFbOSC407093j.C1.o8.fg
atggatccggaggagagagtagcggaggcgatgaaaggcttgctggtggagtactcccagcagtcggcgcgcctcgccgtgcaggtacgggggaacgagtaccgccgcgccgccgccgcgggcggcggcggcggatttctgctgtcgcccggggagagggagaggttgagggccggttccgggttggagctcgtgattgtgcccgtcatggagggggatcaggtggtgtcgtcgtcggcgtcggcggaggttttggtttcgccgttggtggagggcgaggttcgcgtcgtccccgccgtggagcggcggcgctggcgtcgtcaggcggcggcggaggagtgggaggagattgacccggagacgaagtatcgtggggtgagggtgaggtttgggacgaggtatgtcgccgagatccacaacccgacgggggccgggcggctgtggctggggacgttcgacacggcggagcagggggcgtgggcgtacgacgcggcggcgcgggtgctgcgcggggaggcggcggcgaccaacttcggcgatcccgcgcagacgccgtcgccgctttcggcggagatgcggtccatgctagcgttcttcgaccgagctcgagctcgccgcgagcgtgtggtggaggaacgtggggcggcggcggcagaggcggaggcgagcgaggctcctgctcctgctcctctcctgttgctgcctgcgccgccgccttcgtctgatgtgtctccggtgacggtgcaggtggcagcgcctccgtcgtcatctgatgcagctcctgtgccagcgacgctgttatctgatgcatctccggtgattgtgcaggtgcccgtgccgccgtcatctgatgcagctccggtgccagcgccgacgttatctgatgcatctccggtgccggtgcaggtgcccgcgccgccgtcatctgatgttgctctggtgccggtgccggtgcaggtgccagctccgacgtcatctggatctgatgaagctgcatttgttggtggacggggacgcggcgccggtgccggtgttggtggcggccgtggacttgggcgcggtggcggtggcgggcgtgggcgcggaggcaaacgcgctccgacgacggcggtgaccgtggttgctccaccgccgccggtgcccacacctgctgcaggtgcagcagccccgacgctggcgcctgcatcagcagctgcacatgcacctgcgctgtcggtggagccggatgctctcgtttctccagcgtcaatcgcgcccgcttatgctgcgccggcgccggctccagcaccggcggctcttgaagcgctcgcgccgccgccacctgctgcacctgcatccctctccgcaagcggcggagagcgcggatgtgttgccatcgcgaacgctgcggtcgccggccgcggccgtgggcgtgggagcggagccaaacgcgctccgacggcggtgaccgtgggtgctccaccgccgcaggcgcgcacacctgctgcagctccggcgaaggcgttcgtatcagcacctgcacctgcaccgagttctgtgatctcgccggtactcgcagccagcgcctctgctgcagctgcatttgcaccggcgccagcgccggcggcagctgaagtgatcccgccgccgccattgcctgctgcggcaagcacagctgctgcacctgcagctgaaaggaaaaggaagctcctgactgcctcaagcctctcctcaagcggtggagagcgcggacgtggacgtgcacgcggccgcggacgtgttgccgatgccgccattgccggtggcagccgtgggcgtgggcgcggatgcggactaactccagcggtggtgaccgtgggtgctccaccgccgccttctgcagctccagcaccggcgcctgcatcagcaccatcactggagccgaatgacattattgcgccggtcgtgtcatccacactcgcgccaggcgcctctgctgcagctgcagctgcaccggcggtggcaccgccggcggcggcgcttgaagcgatcttgatcccgatgccgccgcctgcagccgcagccgcagctgctgcacctgtacccaagaagaggaaggtccggacagcctcaaccctctccggaagtggtggaccaggacgaggacgcgggcgtgttgccgaggcaacctttgtcggtcgtggccgtggagtttggagtgtgcgcgggcgcggacgcggacgcattccgactgaggtgaccgtgggtactccatcgccgtcggcgcccacacctgcaccagcatcagcaactgcaccgttaatacagtcaaatgttgtgatttcaccggtgccgcccacacttgctgcctctggcgtagctgcatggccaccggtgccggcgatacctgagctcacaaccgcagcagcggcgcctttaccggaaaagccggtgctgacagcccatgacgttgtcatggcaacactcttccccaacggtgtcttctcctacactgccgggtcatcacatgcgccgccaccgccggtggctagcggttccttcttccaggaggtgatccctcccggcggtgtgccgacaaactacgccatacatgaggctccggactttgacccaaacgtcttcttcgccgatgtgcccgacggggagcaggacgagctcgtgttgctgagcttgacatcgacgctccttgacattgacaactcattgactctggttgccgacgatgcagcctcgtcggctcaggcagccgttgacgtcgcatcatcgtcagctcaggctgccatcgatgtcccttcctcgtcggttctggctgtcgtcgacatcccctcctcatcggctcaggctgccattgacgttcccgcctcattggctcaggctgccactgatgttgcatcctcgtcgacccaaggtgcatttgttggtggaaggggaagcgggcgcggcgccagtgtcggtgttggtggtgggcgtggacttctccgcggtgtcggtaccggacatgggcgcggtggcggtggtgggcgtgggcgcggaggcaaatgcgctccgacggcggtgaccgtggttgctccaccgctgccggtgcccacacctgctgtgcatgcacctgcgccgccggtggagccgaatgctgtcatttctccgccgtcatccgcactcgcgcccgcttatgctgtaccggcaccggctccatcgctggcggctcttgaagcgctcgcaccaccgcctgctacacccgcaactctctctgcaagcagcagagagcacggacttggacggggacgcggatgtgttgccatcgccaacgctgccggtcgtggccatgggcgtgggtccgaaaccaaatgcgctccgacggtggtgatcgtgggtgctccaccgccgccggcgcccatacctgctgccactccggcgaaggcacttgtatcagcacctgcacctgcaccgatctcgacggtgtcgtccacactcgcagccagcgcttctgctgcagccgcatttgcaccggcgccggtggcagctgaagcgatcccgccgccaccgccgccactgcctgcagcggcaaccgcagttgctgcacctgcacccgataggaaaaggaagctccagacagcctcaaccctcttcgcaagcggtggagagcgcggccgtggacgtgcacgtggtcgcggacgtgttgccgatgccgccgttgcgggtggaaaccgtgggcgtgggcgtggatgcggacttacttcggcggtggtgaccgcaggtgctccactgccaccttctgcagctccagtgccggtgcctgcatcagcaccaacaatggagccgaatgccactatttcgccggggtcatccacactcgcgccaggcgcctctgctgctgcaccggcggtggcaccgccgacggcggtgcctgaagccatcctggtcccgatgccgccgcctgcagttgcagccgcagctgctgcacctgtacccaagaagaggaagctccaaacagcctcaaccctctccaaaagcggtggaccggaacgcggacgcgggcgtgttgctgaggcaacctttgctagtcgtggccgtggagtttggaatgggcgcgggcgcggacgcggacgcattccgactgcggtgaccgtgggtactccatcgccgtcggcacccacacctgctacagaaccggcattggtgcctgcatctgcatcagcactagcaactgcaccgttaatgcaaccaaatgttgtgatttcgccggtgccttctacactcgctgcctctggcgcagctgcaccgccaccggttccagcaaaacttgagctcgcaaccgcagcagctacgactttaccggaaaagccggttctgacagcccatgaagttgtcatggcaactctcttccccaacggtgtcttctcctacatcgccatcgcatgcgccaccgccaccgccggcggctag

SEQ ID NO: 11096 - DNA, 1491 bp, Oryza sativa
  Clone ID: TFbOSC900368j.C1.o22.gm
atgagcttccaggacctgctccgcgacatggaggccggcgtgctgcagccggcggcgccgccggcgcaggaggtggcgcacggcgtgttccagctcaacaccaaggtggaggccctccggtacatggccggcgcgctcggcacgcccagggacacgccctccctccgcggccgcctccgcggcacgcgcgccgggatcaagcggctggcgacgagcacgtcccaggcgctcaggcaggccgccgccgccgccgacgacgacgagtcggtatcctcctgctccaagctggccatggacttcgaggccgccgtgaacgagtaccagaagatcgagcgacgcattgcggcggtcgagcggcaagaaaccgccgccgccgctcgccgctcgccgccgccaccaactccgggcttcaatcacataaacaacaatggcgatcacacattccccgaacagaagcagacgcagctcgccgtgctacgagacatcaacctgctcgacagcgagatcgagctccacgaagccatcatcgcggagagggagcaggggatactggaggtgcagcaggagatcgccgacatccacgagatcttcagggacctcgcggtgctcgtccacgaccagggtgagtgcatcgagatcgtcaccgccaacatcgagatgaccgaggcggcgacgagccaggcggaggtgcagatctccaaagccgcggggattcgaggggagaaggaggagctcctgaccggcgcaggaaccgaggacaactcgccgtcgaaatgcttgctgctggctgttcttggattgtttctcttcatagttggacgccgtaagctctacagctcgggctgtccatcaaaacgtgggattactgacaaccagaccaagaatacggcggcgccggcgccggagaagaagtacaagggcgtgcggctgcggcaatgggggaagtgggtggcggagatccggctgcccaacagccgcgagagggtgtggctgggatcctacgacacgccggagaaggcggcgcgggcattcgacgctgccttcgtcttcctccgcggcgccggagccgccgacgccgcggggctcaacttccccgactcgccgctgccagttgtcgcgcgcactagagatctgcgcgaggtgtatgccttcgcggtctcgcatgccaacaggccgccgccggtggctggagaaacggctgccacggctctggctgcgatggcggcgctggagcacaatgaggtcagggaaaatattgcgccgtcgtcgccgctgtcggcagtgcaggtggcggcgccgccagctgggagctttgattggtcgcagctgatggcgaactcgccgccgctctactcgccaatagtgataggaagccatgcgtacgacgacctggcggtgtggcccacgacgcagccggtggaggaattcagtgaggaggataacgaaaatgaaggtgctacgagtgatgagctttggagcttcgatgtctga

SEQ ID NO: 11097 - DNA, 948 bp, Oryza sativa
  Clone ID: TFbOSC400585j.C1.o9.fg
atggagctcaacttccaagtgcaacctccagtgttccagctgcaagactactgctactactacagccaagaggtggcggcggcggcgtcgccggcggcgaagccgacgaagccgcgggggaggaagaagggcagcacgagccacagcaagttcgtcggcgtccggcagcggccgtcggggcggtgggtggcggagatcaaggacacgacgcagaagatccgcatgtggctcggcaccttcgagaccgccgacgccgccgcgcgcgcctacgacgaggccgcgcgcctcctccgcggcgccgaggcgcgcaccaacttcgcgccacgcatctcgccggactgcccgctcgccgtccgcatccgcggaatcctccaccacaagaagctcaagaaggccaggtccgccgccgcggccacggccggctcccccggcgccgcatccaagaagaggtccaccacggcggcggcggcggcggccactccgacgatcacaaccacaagcaatagcaatagcgatggtgcgggtagtgcttgtggtggctcgagcagcagcagcagcagcacggacagctgcgacggcgccgtgaagcaaggcggcggcggcggcggcgcaccaacggacgccagcgaggtgtaccggccggacttcgtccacgcgggcgccgaggagttcgattcttggatgttcgacacggcgttcggcccgttcccagagctggacagcttcgccgccgtcgacgccgtcacgccaccgccagcaacggcgtcgccggaggagtcaagcgccggcacgccgccggtcgagatggcggagttcgagcggataaaggtggagcggcggatctcggcgtccctgtacgccatgaacggcctgcaggagtacttcgacaaggtgttcgacgcgtccgcctgcgacccgttctgggatttctcgccactgtgccattag

SEQ ID NO: 11098 - DNA, 438 bp, Oryza sativa
  Clone ID: TFbOSC102007j.C1.o2.fg
atgagcaccaccaacagctcatcctctgtctctgtcccagccatggacgcccatggacaggaggaggaggaggagccgatgcaggtgcagcaacagcaggcgttccgcggggtgcgcaagcggccatggggcaagtttgcggcggagatccgcgactcgacgcgcaacggcgtgcgcgtgtggctgggcacgttcgacagcgcggaggaggcggcgctggcctacgaccaggcggcgttcgccatgcgcgggtcggcggcggtgctcaacttccccatggagcaggtgaggcgttccatggacatgtccctcctgcaggaaggggcgtcgccggtggtggcgctgaagcggcggcactccatgcgagcggcagcagcggggcggcggcgcaagagcgctgcacctgaccggcggatcaggaaggcggaggaggggtga

SEQ ID NO: 11099 - DNA, 501 bp, Oryza sativa
  Clone ID: TFbOSC401268j.C1.o16.fg
atggacgcccatggacaggaggaggaggaggagccgatgcaggtgcagcaacagcaggcgttccgcggggtgcgcaagcggccatggggcaagtttgcggcggagatccgcgactcgacgcgcaacggcgtgcgcgtgtggctgggcacgttcgacagcgcggaggaggcggcgctggcctacgaccaggcggcgttcgccatgcgcgggtcggcggcggtgctcaacttccccatggagcaggtgaggcgttccatggacatgtccctcctgcaggaaggggcgtcgccggtggtggcgctgaagcggcggcactccatgcgagcggcagcagcggggcggcggcgcaagagcgctgcacctgcaccggcggatcaggaaggcggaggaggggtgatggagctggaggacctgggacctgactacctggaggagctgctagccgcctctcagcccatcgatatcacctgctgcacaagcccaagccaccactccatctga

SEQ ID NO: 11100 - DNA, 894 bp, Oryza sativa
  Clone ID: TFbOSC410211j.C1.o10.fg
atggcgacgacagtggattggtgtggccgtggcagcaatcttcctgctgcgatgtatgacatggtggtggatagcaaggagctaatgggcgcgcttgctccgtccatggtgtccttctcctacccgtgttccgagcagagcgcgagctcgcttcttgctggcgccaactacctgactcccgcgcaggtgctccatgtccaggcgcagctacagcgcctgcgccgcccgggcgcggcgagcggctgcctcgccgcggcgccgccgctgccgatgaagcggcatggcgcggtggcggtggcggcggcggcggcggcgcgggcgccggtcaagctgtaccgcggcgtcaggcagcggcattggggcaagtgggtggcggagatccgcctgccgcgcaaccgcacccgcctctggctgggcaccttcgacaccgccgaggaggccgcgctggcgtacgacagcgccgcgttccgcctccgcggcgagtccgcgaggctcaacttccccgagctccgccgcggcggcgcccacctcggcccgccgctccacgccgcggtcgacgccaagctccacgccatctgccacgggatggacctgccccaaccccaaccccaaacccagagcaatgcgacgacgacgacgatgtcgacgacggcgacgaacaccccaagccccttcttctcctcggagagcccggtggtcaagagcgagcccgtctgctccgcctccgagagctcttcctcggccgacggcgacgtgtcatcgacgggctcctccgacgtcgtcccggagatgcagctgctcgacttctcggaggcgccatgggacgagtccgagagcttcctgctgcacaagtacccgtcgctggagatcgactgggacgcgatcctttcctga

SEQ ID NO: 11101 - DNA, 1200 bp, Oryza sativa
  Clone ID: TFbOSC21837j.C1.o4.fg
atggagacgtacggtttggtgaaggatgagctgcttcacggcatcggaggagggcaggggcgcctgtactgcgaggttaagccgacagcagcgccggcggtgatcacagctgccggtggcggcgctaagagcgtgaagagaaggaagagagagccatcggcggcggcgatgtcggctgtgacagtggccggcaatggcaaagaggccggcggtagcaatgcggctaacaagagaagctcaaggtttaggggtgtgagcaggcaccgttggacaggcagatttgaggcacacctgtgggacaaagggacatggaacccaacgcagaagaagaaagggaaacaagtttatctcggggcgtacaacgaggaagatgcggcagcgagagcttacgatctggcggcgctcaagtactggggacctaccacctacacaaacttccctgtcgctgactatgaaaaagagctgaaactgatgcagggtgtatccaaggaggagtacctagcctcaataagaaggaagagcaatggcttctctcgtggagtttccaagtacagaggcgttgcacggcaccaccacaacggcaggtgggaggcccggatcggcagggtgttcggcaacaagtacctctacctgggcacctactccacccaggaggaggccgcccgcgcctacgacatcgccgccatcgagtaccgcggcatcaacgccgtcaccaacttcgatctcagcacctacatccgctggctcaagcccccctcctcctcctccgccgccggcacgccccaccaccacggcggtggcatggtcgtcggcgccgaccgcgtgctcgccccggcgcagagctacccgatcagcgccgccgccgacgacgacgtggccggctgctggcggccgttgccgtcgccgtcgtcgtcgacgaccacggcgctcagcctgctgctccggtcgtcgatgttccaggagctcgtggcgcggcagcccgtcgtggaaggcgacgacggacagttggcggtggtgtcgggcgacgacgccgacgccgacgccgactccgacgtgaaggagccgccgccggagagcgagtacggcgaagtgttcgccagcgacgaggcggcggcggcggcggcgtacgggtgctccatgtacgagctggacgacagcttcgccctcatcgatgactcggtgtggaactgcttgatctga

SEQ ID NO: 11102 - DNA, 1806 bp, Oryza sativa
  Clone ID: TFbOSC401520j.C1.o13.fg
atggtgaagagtgggcaggaggcggcgccggggagcggcggcaatgcggcggcggctgcggcgaggcagggcggaggaggaggagggagagggaggcagtacaagggggtgaggatgcggagctgggggtcgtgggtgtcggagatcagggcgcccaaccagaagacgcggatatggctcgggtcctactccaccgccgaggcggcggcgcgcgcctacgacgccgcgctgctctgcctcaagggctccgccgccgacctcaacttcccggtgcacctccccttccacatccccgccgccgcgatgtcccccaagtccatccagcgcgtcgccgccgccgccgccgccaatgccaccagccccctccagcaccacagcggcgccccctccttcgccaccgccaccggcggctacaaccccgcggccgcgcccaccacgccgccgtgcagctacggcgacatgtcgtcgtgctcggccgtcagctcgccggagaccgccaactactacggcgccgaccacgacatggtggcgcgcgaggacgacgtggactacgccgcgctcgccgacatcgacgccttcttccagtcgcccaagtgcatggactactccatgatggacccatgcagcacgttcttctcgccggcgccggagtccctcgccgccgagtgggaggacgaagcctcgcatccgaacccgagaggccgagacagcctcgcctttgccctactcgtctccttccttccttccgccgccgccgccgccgccgcgagggccatggggtacaccaaggagcagctcctcgcgcgactccaggagctcaacattgaattctcgtgctacgatcacccggttgtgttgacggtggaggaacaggccaaacatgttgggcatttaggaggtgctttgagtaaaaatttgctactgaaggacaaaaagcataggctgtacgttgtttctgcccttgctggcaccaaagttgacatgaaaattttatcacagcgtcttggtttgggaaaaggtggtctgcggatggctcctgaggaaaatttgcttgaagtgcttcaggtacccttaggctgtgttactccatttgcactacttaatgagtctgcaagtttttttcatggttatgctattgcctttttaactgattcatataactgtgtatttgcaagcagtgctgtctcactactactggaccaaggtttcaagtcaaaacagagctgctacttccatccactgacaaatgatgtgacaatcgctctcagctcaagcaatctggacaagtttctcatgtccattgggaggcaaccagcttatgtagacttagaggcttcaccagttgtaggcaaggataatcctcctgatctagcagattttgtaccatcaggtgtcccaaattctgcagaaccaattgagaaggtcacacctacaaatgttcctcgtcaaaatgatgtgcccaaagagaaaacatgtcttcctgaagtgaaggctaagcctaaagttcagaacaagggtgcagaaaagacgcagagcaagatacctacaaacggagctaatgttgagaaatttgtaaatgatgtatttgacatcatgtccccgttgttcctttctgaggtatcaaagaaactgaatgttaagcaggaagaactttcttctatatttgatggctttaaagaacaagccactattgatttggagagtgtaacgacgagtctgaagaatgcagcatacaccgctggatttgaggctggcttcgagactatgctcaattcaggtttaaaaggacaggcttctcggaagtaa

SEQ ID NO: 11103 - DNA, 1214 bp, Oryza sativa
  Clone ID: TFbOSC403248j.C1.o1.fg
atggccaccatgaacaactggctggccttctccctctccccgcaggatcagctcccgccgtctcagaccaactccactctcatctccgccgccgccaccaccaccaccgccggcgactcctccaccggcgacgtctgcttcaacatcccccaagattggagcatgaggggatcggagctctcggcgctcgtcgccgagccgaagctggaggacttcctcggcggcatctccttctcggagcagcagcatcatcacggcggcaagggcggcgtgatcccgagcagcgccgccgcttgctacgcgagctccggcagcagcgtcggctacctgtaccctcctccaagctcatcctcgctccagttcgccgactccgtcatggtggccacctcctcgcccgtcgtcgcccacgacggcgtcagcggcggcggcgaggaagtccgtcgacacgttcggccagagaacatcgatctaccgcggcgtgacaagatttgtaggatttatcattatgtcattattatgtgggacatgattgttgtgattaacaaagttgtaatatcttttggtttggttataggcatagatggacagggaggtggttatgacaaagaggaaaaagctgctagagcttatgatttggctgctctcaaatactggggcccgacgacgacgacaaattttccggtaaataactatgaaaaggagctggaggagatgaagcacatgacaaggcaggagttcgtagcctctttgagaaggaagagcagtggtttctccagaggtgcatccatttaccgtggagtaactaggcatcaccagcatgggagatggcaagcaaggataggaagagttgcagggaacaaggacctctacttgggcaccttcagcacgcaggaggaggcggcggaggcgtacgacatcgcggcgatcaagttccgggggctcaacgccgtcaccaacttcgacatgagccgctacgacgtcaagagcatcctcgacagcgctgccctccccgtcggcaccgccgccaagcgcctcaaggacgccgaggccgccgccgcctacgacgtcggccgcatcgcctcgcacctcggcggcgacggcgcctacgccgcgcattacggccaccaccaccactcggccgccgccgcctggccgaccatcgcgttccaggcggcggcggcgccgccgccgcacgccgccgggctttaccaccc

SEQ ID NO: 11104 - DNA, 708 bp, Oryza sativa
  Clone ID: TFbOSC400993j.C1.o33.fg
atggcgcccagagcagctacggtggagaaggttgctgtggcgccacccaccgggcttggtcttggcgtcggcggaggtgtcggagccgggggtcctcactacaggggcgtccgcaagcgcccgtgggggcgttacgcagcggagatccgtgaccctgccaagaagagccgggtgtggctcggtacctacgacacggcagaggaggccgcccgcgcctacgacgccgccgctcgagagttccggggtgccaaggcaaaaacaaactttccgtttgcatcacagtcgatggtcggctgtggcggcagccccagcagcaatagcacggtagacaccggtggcggcggggttcagacgcctatgcgggccatgcctctgccgccgactctggacttggatttgttccaccgcgcggctgctgtgactgcagtcgccggcaccggcgttcgctttcctttcagaggatatcccgttgcacgtccagcaacgcatccttactttttctatgagcaggctgcagcggctgccgcagctgaggctggataccgtatgatgaagcttgcaccgccggtcaccgtggcggcggttgcacaaagtgactccgactcctcgtcggtggttgatctcgcgccgtcacctccagcggttacggcgaacaaggcggcagctttcgatctggatctgaaccggccgccgccggtagagaactag

SEQ ID NO: 11105 - DNA, 1090 bp, Oryza sativa
  Clone ID: TFbOSC400993j.C1.o38.gp
aaacgtcaatcaaactcagtgtgcacagatatttttgtgactttctgaataatttcttcatactaatataaaggaatacatacactccacggtttagtccatctcatcgccggcatgatctgttctaattaacagatcccaagatgaatttcgccctcggcagaaaaactatttacaaggctcttccgtctctcacaggctactaaacaaaaacacagaggaccaaaacatcggagagaaatatccatcaaagaagaaaataagagagaaactacaaagtcgtcagctaacccatcctgagctagttctctaccggcggcggccggttcagatccagatcgaaagctgccgccttgttcgccgtaaccgctggaggtgacggcgcgagatcaaccaccgacgaggagtcggagtcactttgtgcaaccgccgccacggtgaccggcggtgcaagcttcatcatacggtatccagcctcagctgcggcagccgctgcagcctgctcatagaaaaagtaaggatgcgttgctggacgtgcaacgggatatcctctgaaaggaaagcgaacgccggtgccggcgactgcagtcacagcagccgcgcggtggaacaaatccaagtccagagtcggcggcagaggcatggcccgcataggcgtctgaaccccgccgccaccggtgtctaccgtgctattgctgctggggctgccgccacagccgaccatcgactgtgatgcaaacggaaagtttgtttttgccttggcaccccggaactctcgagcggcggcgtcgtaggcgcgggcggcctcctctgccgtgtcgtaggtaccgagccacacccggctcttcttggcagggtcacggatctccgctgcgtaacgcccccacgggcgcttgcggacgcccctgtagtgaggacccccggctccgacacctccgccgacgccaagaccaagcccggtgggtggcgccacagcaaccttctccaccgtagctgctctgggcgccatgggtgcagcaggtttacaagtggcgggcgcggatctctggtaaaccgggtgggtgttttgggaggttgggtttgggtgtgt

SEQ ID NO: 11106 - DNA, 870 bp, Oryza sativa
  Clone ID: TFbOSC422332j.C1.o15.fg
atggccatggcgaaggagctccaagaaacctcctcgtcttcgtcctcctcggctgcctccacgtcctcctgctcctccgccgtcacggacgcgtggtcgtcgccggccagacccaatgctgtggccggggggaagaggaagaaggaggtggtaggagaggctgatgaggctgcaggcggcggcgcaggagaggaggaagaggaggaggcggaggcggcggcggcggggaagtcgtcggcggcgacgaagaagaggaagcggagcagcgacgggaagcacccggtgtaccgcggcgtgcggatgcgggcgtgggggaagtgggtgtcggagatccgcgagccgcggaagaagtcgcgcatctggctcggcacgttccccaccgccgacatggccgcgcgcgcccacgacgtcgccgcgctcgccatcaagggccgcgccgcgcacctcaacttcccggacctcgccggcgtcctcccgcgcgccgcctccgcctcgcccaaggacgtccaggccgccgccgcattggccgccgcgttcaccacgtccccgtcctcgtcgccctcctcctccttgtcggccgacgacgtcgcgccatgcgtcgtccacgccgacgccgacgagcagcctgccgctgccgccaagaacgacgacgacgacggctcaaccaccgcgccggtggcggcggcggcggcggcggcggcggcggatgagcagcagctgttcgacctgccggacttgctgttcgacatccaggacgggccgttcgggttcccggcgatgtgggcgccgctcgccgacgtcgacgaggtcaatgcggagctccggcttgaggagccattgctttgggacttgggagtaacagatgcttaa

SEQ ID NO: 11107 - DNA, 1134 bp, Oryza sativa
  Clone ID: TFbOSC400789j.C1.o4.gm
atggcgggcggcggcgggcaggcggccggaggtgccgcgcgcggcaggggccggcgggggcgcgcgtggcggcggccggcggggaagcttctggcggcggccgtgccctctcagcggtccatgtgctgtaccggcgacgaggtggcgggacccggagagcagcggcggcggccgctcgacgccgacgccggcggcgacaagggcgcggtggcgacgacgtcgtcgtcgttgttggcggcgccgatgctgtcgcggcggaggcaggcggaggagatggcggcgatggtgtcggcgctggcgagtgtcgtggccggcggcggcggcacgtcgttgccggcgaagaggccagccgagagagagcccgaggagggcgccgccgtggagggggtgtggtggtcgtactgcagtgagctcgccgccgccgccgccgcgccgtcgccggcggctccatttccggccggctacgtgccatcgccggggcaacactcgcctgcgtcggcggcggccggcgacgaggaggagctcccgtcgccgtcctcggccgactccagcggcggcacggcgaggaagcggtacagaggggtgcggcagcggccgtgggggaagtgggcggcggagatccgggacccgcacaaggcggcgcgcgtgtggctcggcaccttcgacaccgccgaggacgccgcccgcgcctacgacggcgccgccctccgcttccgcggcagccgcgccaagctcaacttccccgagcacgccaccctcccaccgccgccgacgacgacgacggccgccgctcaccggtgcccgccaccgccgcggacggacgcgctgctggagtcgcaggagctctctcccggcgccggcggcggtgacccgtactctcagtacgcgaggttcttgcagggctccggcggcgacggtggcgaggcggcggcgcggcccggcggtggcgcctcgcaaagaacgccacccgccactacactgctctacagcttcgagggagacgctgcttccgccgcctgcctctggcagccggagagcggcggcggcgggatggggtggccggcgacttcgccggcggcgtggttggagtacggtttctacccgccgccggagcggcgcgacacggacacgtag

SEQ ID NO: 11108 - DNA, 504 bp, Oryza sativa
  Clone ID: TFbOSC4060j.C1.o1.fg
atggacgactcgtcgttcggttccgagccgaccacgtcctcctcgggcggggaggcgccggcctccccgccgtccaccgcgtcgtcgtcctcagacggcgccggcggcaagaagaagcggccgcgcaaggacgggcaccacccgacgtaccgcggggtgcgcatgcggagctggggcaagtgggtgtcggagatcagggagccgcggaagaagtcgcgcatctggctgggcaccttcgccaccgccgagatggccgcgcgcgcgcacgacgttgccgcgctcgccatcaagggccgggccgcgcacctcaactttccggacctcgcccacgagctgccgcgcccggccaccgcggcgcccaaggacgtccaggccgcagccgcgctcgccgccgccgccgcttcccggcctcctccgccaatgcgggcgccagcaataaccccgacggatcggacgacgcgagcgccggtccgcctcgccgcccccgccgccggacgccgctga

SEQ ID NO: 11109 - DNA, 654 bp, Oryza sativa
  Clone ID: TFbOSC418226j.C1.o2.fg
atggacgactcccacgacctggcctccccgacctcccctgacacggcgtcctcgtcgtcttcgtctacgtcgacatcatcgtcctccgccaccgtcgccccgaagaagcggccgcgcaacgacggccggcacccgacgtaccgcggcgtgcgcatgcggagctgggggaagtgggtgtccgagatcagggagccccgcaagaagtcgcgcatctggctgggcacgttcgccaccgcggagatggccgcgcgcgcgcacgacgtggccgcgctcgccatcaagggccgcaccgcgcacctcaacttcccggacctcgcgcacctgctcccgcgcccggccaccgcggcgcccaaggacgtgcaggcggcggcgctgctcgccgccgccgcagccgacttcccctccgtctccgtcgacgccaatgccaagagccccgacacctgctccgtcgccagcgccgcctcgccgcagccgccaccgccggacgccgaagcggaccctgacagcacgctgttcgacctcccggacctgctcctggacctgagatacgagacgtcctcgagcctctcgtgcggggcgtcgtgggccgtcgatgacgacgtggccggcggcgtcgtgttccgcctcgaggagcccatgctgtgggattactga

SEQ ID NO: 11110 - DNA, 861 bp, Oryza sativa
  Clone ID: TFbOSC900314j.C1.o20.fg
atggcggcgatggtgtcggcgctggcgagtgtcgtggccggcggcggcggcacgtcgttgccggcgaagaggccagccgagagagagcccgaggagggcgccgccgtggagggggtgtggtggtcgtactgcagtgagctcgccgccgccgccgccgcgccgtcgccggcggctccatttccggccggctacgtgccatcgccggggcaacactcgcctgcgtcggcggcggccggcgacgaggaggagctcccgtcgccgtcctcggccgactccagcggcggcacggcgaggaagcggtacagaggggtgcggcagcggccgtgggggaagtgggcggcggagatccgggacccgcacaaggcggcgcgcgtgtggctcggcaccttcgacaccgccgaggacgccgcccgcgcctacgacggcgccgccctccgcttccgcggcagccgcgccaagctcaacttccccgagcacgccaccctcccaccgccgccgacgacgacgacggccgccgctcaccggtgcccgccaccgccgcggacggacgcgctgctggagtcgcaggagctctctcccggcgccggcggcggtgacccgtactctcagtacgcgaggttcttgcagggctccggcggcgacggtggcgaggcggcggcgcggcccggcggtggcgcctcgcaaagaacgccacccgccactacactgctctacagcttcgagggagacgctgcttccgccgcctgcctctggcagccggagagcggcggcggcgggatggggtggccggcgacttcgccggcggcgtggttggagtacggtttctacccgccgccggagcggcgcgacacggacacgtag

SEQ ID NO: 11111 - DNA, 597 bp, Oryza sativa
  Clone ID: TFbOSC900007j.C1.o7.fg
atgtgtgggggagcgatcatcgccgacttcgtcccgcccgccggcgcccgccgcgccgctgcctccgacatctccgacaacgccgtcctctccgctgccggtgccggtgacgagtcgttcgcggcggccaaggcgccggcgccggggaggaagacggcgtaccgcggcatccggcgccggccgtggggacgctgggcggcggagatccgcgacccgaggaagggcgcccgcgtctggctcggcacctacgccaccgccgaggaggccgcccgcgcctacgacgtcgcggcgcgcgacatccgcggcgccaaggccaagctcaacttccccccgaccatcggcgccgccgccgcgccaccgccgcccaagaagcgacgcaaagccgccgccgcggcgaaccaccaccaccaccaccaccagcaggagagctcaggctcctcgtcggcgtcgtcgctgcctcccaccccgccgccggccgccgagcaccagctccgcgagtgcatgtccgggctggaggcgttcttgggcctcgaggaggaggaggacgacggcggcgccggtgagccatgggacgccgtcgacatgatgctcgagtag

SEQ ID NO: 11112 - DNA, 957 bp, Oryza sativa
  Clone ID: TFbOSC404155j.C1.o16.fg
atgacggcgcgaagcatgttgcggaaccacccggaggcgtcggtgctcgacaccatccggcagcacctgctggaggagccgcgcggcggcggcggtggcgaggcggcggaggcgagcttcgggagcctggtggccgacatgtggagcgactcgctgccgttccgcgacgacgacgccgacgacatggtggtgttcggcgcgatgcgggacgcgttctcgtgcgggtggctgcccgacggcgtgttcgcggaggtgaagccggagcccctgctctcgccggactcgtcgtcgtacgacgggtcctcttgctgcttcggcttcgcggacgtgtcggagccggtgacgccgagcgacgcggcgtcgggggcggcagaagcggcggccgcggcggcggcggcgacggcggagcacgggaaggaggaggaggccgcggctgcggtggcgagggggaagcactacaggggggtgaggcagcggccgtggggcaagttcgcggcggagatccgggaccccgccaagaacggcgcgcgcgtgtggctcggcacgttcgacaccgccgaggacgccgccctggcgtacgaccgcgccgcctaccgcatgcgtggctcccgcgcgctcctcaacttcccgctccgcatcggctcggagatcgcagccgccgccgccgccgcagcggcagcggcagccggcgacaagcggccgtcgccggagccggcgacctcggagtcgtccttctcctcctcatcctcctgcaccaccaccaccacctcctcctcaacctcctcctccggctccccgaaacggagaaagagaggcgaggccgcggccgcgtccatgtccatgcccctggtgcccccgccttcccagctgaactggccggtgcaggcatggtaccccgccgccgcaccggtcgagcaggtggcgatcaccccgcgcgtggagcagctcgtcatctaa

SEQ ID NO: 11113 - DNA, 591 bp, Oryza sativa
  Clone ID: TFbOSC24031j.C1.o2.fg
atggcggcgctcttcgaggccgcggagacggcggccatcgtggctgcgctgacgcgcgtcattgccgacggcgggcgtggaggcagcggcgccggcgtgccgccgcccgcgccatcgttggtggtgccgccgctggcgggaacgggcggcgggcggcgcgtcgacgttgcgcgggaggaggagatggtcggcgtcgtctccgcgggagatcacaccggcgaggcaagcgtggccgcggcggcgcccgtggggcaagtggccggcgtagatcagggacccgaggaagcggcgcgcgtctggctgggcaccttccgcaccgccgaggacgcggcgcgcgcctacgacgccgccgcgctacgcttccgcgggcgccgcgccaagctcaacttccccgaggaggtgtcccgcccgtggcagggtcacgatgtcgatcacatgtcctgctcgccgccgtcgatctcgaacgctcgctttctgggttcgtggaccttcggaccgccgcagccgccatcgcggtccgtcgcggcggcggcgacgactctgcttggtgggagccatggaggcaacggagcagagaacgggagggaatag

SEQ ID NO: 11114 - DNA, 323 bp, Oryza sativa
  Clone ID: TFbOSC404155j.C1.o19.gp
ggcctcgcctctctttctccgtttcggggagccggaggaggaggttgaggaggaggtggtggtggtggtgcaggaggatgaggaggagaaggacgactccgaggtcgccggctccggcgacggccgcttgtcgccggctgccgctgccgctgcggcggcggcggcggctgcgatctccgagccgatgcggagcgggaagttgaggagcgcgcgggagccacgcatgcggtaggcggcgcggtcgtacgccagggcggcgtcctcggcggtgtcgaacgtgccgagccacacgcgcgcgccgttcttggcggggtcccggatct

SEQ ID NO: 11115 - DNA, 972 bp, Oryza sativa
  Clone ID: TFbOSC900036j.C1.o3.fg
atgtgtggaggaggccccgacaatcaccacgccatcaccgtcgccgccgacctgccgccgccgccgccgtcggtggtggcggtggagatggcgccgccgcgcggccaccgccccgggaaggaggtggagtacaatgaggaggaggaggacgacgacgacgagtacgacggccgtgagttcgaggaggagttcctcaggttcagcatgatggtggatgaggaagacgacgacggcgacgacgacgacgaggtggaggtggagatcatcgccgtcgtctcgccgccgcaccggcctctcgtcggagctagaggtactacatcagctgttgaatctgtcacaaaccttcaggcaagaacatcacctctcccaaatccggtggtgcctcagaccggcactaaagccagcaagcgcggcgacagcggggcaaaggcgaagccggcggcggcgaagaagaggaggagcaagcacgggttcctgggcgtccaccagcgcacgtatgggcgatggtcggccgagatccgggacaatgtcatcaagggctcccgcttctggatcggcaccttcgacaccgcgctcgacgccgccctcgcctacgacgccgtctcccgcaggctctacggcctcaacgccaagaccaacttccccgctgccgccggcgaagacgacctccctccgccgccgccgccggcgaagccctgcagctccaccaagcggccaaagaaatgcaacaccagtggcgatcttggcgccgccgcggcgccgccgcaagccgtggatactccggcggcggcagcagctggcgtggagctgacaagcctactgtgcagcgtggcggcgcaggcgcaggaggtgagcgacgggtgggagttcatccaggagctcctcctcctcggcggcggcgtttcgccgctggactacctcaacggccaggagctcgccggcgccgccgtcggcgatctctggagcttctga

SEQ ID NO: 11116 - DNA, 1179 bp, Oryza sativa
  Clone ID: TFbOSC407093j.C1.o2.fg
atggggaggccggtgaagcagaagacgacgacgtggctggtcgagcttctcagggagtactgccagcgcgcggcggcgcaggcgaccgcggggaacggggcggtggcggcggctgcggcggtggagggggagatcaacaccgacgggttggcggcgctggccgtggaggcggagggttttgcggccgcaaacggggagggctgggtggcgccggccgtcgagggagagggagagggtttcgtcggggcgccggttgtggagggggaggaaggtttgacggcggagcttctggtggcggcggagaggaagtaccggggggcgaggaagaggccgtgggggaagtacgcggcggagatccgcatccgcaacacgatgggggtgaaggagagggtgtggctgggcacgttcggcaccgccgaggaggccgcctgggcgtacgacaccgcggcgacggtgatccacggggacaaggcgacgaccaacttcccccgcgcgccgctgcggccggcgaccacgccggtgatgcgttccatgctcgtcttcttcgggatcgcccacctggtgcgctccctcgttccaagggctcgtggcccacgtggacgcggtggtggtgcccgtggacgcggcagaagccgacgccgtcgcgcggcggcggcggcggcgccatcagccccggcaagcgaggctcctcctcctcctcctccctcgtcggcgctggttcctgagcccgagctacaagttcaaggcggccgtggagagcgcgggcgcgggcgtggacgtggacgcggtggcggtcgcggcggccgccgcggccgcgggcgcacgccggcgagggtggtcgccgaggattctccgatgctgcaggcgactacacccgctgcagctccggcgccggcaccggcgctggcacctgcaccggccaatcaagccatcttccagccgatgatcatccctcccggcggcgtcgtggtggctcctgatgacttcctgctgtcggccatctccgacgacgagcccgtgctgccgcacaagaagccgaagctcctcggtgtctacaccccgccggacagccctgatcagttcgtcatggagttcttcgcggatctcggcgacggcgacgacatcctcagctcctcgttctggcaggatccggccggcgacggcgaggacacacagtaa

SEQ ID NO: 11117 - DNA, 537 bp, Oryza sativa
  Clone ID: TFbOSC400825j.C1.o36.fg
atggcgcggccgcagcagcggtatcgcggcgtgcggcagcgccactggggctcatgggtctccgagatccgccaccctctcctgaagacgaggatctggctgggcacgttcgagacggcggaggacgcggcacgcgcgtacgacgaggcggcgcggatcatgtgcggcccgcgcgtgcgcaccaacttcccccacgacgtcgccgacgaggccgcgccgccgccgccgccgcacagcgccgccgcagcctcctcgtcgttcctctccgcggcgctcgtcgccaagctccaccgcttcaacctcgcctccgtccaggctgcgcagcgcggcaacagcaacgacgacgactccaccacctcctcctccgccgccgcgtcgtcgcgcgccgtgattccgtcccttcccgccgccgccggcgcattgggcaatgcggcggcgacggcggagtggagcggcgggttcctcgaggagcagtacgtggaccagatgatcgaggagctcctcgactccaacttctccatggagatctcctgctga

SEQ ID NO: 11118 - DNA, 966 bp, Oryza sativa
  Clone ID: TFbOSC900006j.C1.o4.fg
atggatcgccaatggcgttgcctcgctgctgcggcttctactagtggtaatagtaagcttcctccgctgccgatggcgctgggcggcgccgtggagtacgggcagctcgtccatggcgcggcggcgcccgtggcgccgttcttcgtggacgccgagcagcagagcctgtcgccggcgacggccatggttcttggcgccgggtggtataactataaccttgtcacgccgtcgcaggcggcgcagctgcaccaccggctgcgacgggcggtgggcgcggcgccgtgctcgatgaagcggtgcggtggcatggcggcggcggcggcggggcggcttgcgctggtggggccggcgccggtgcaggcgaagctgtaccgcggcgtgcggcagcggcactgggggaaatgggtggcggagatccggctgccgcggaaccggacgcggctgtggctgggcacgtacgacaccgccgaggacgccgcgctcgcctacgacggtgccgcgttccggctgcgcggcgacgccgcccgcctcaacttccccgagctccggcgcggagggcggcaccacgcgccggcgctcagcgcgtccgtcgacgccaagatcctccaagccaccaccaccaccacggcggacaccgccgccgccgcagcaccggcgtcgacgaacaccacgccgccgccgtcgccgcgcgtcgtcaagaccgagccgggctgctgctccgtctccgaagcctccacgacgacgacggccgacgccgccgacgtctcgtccacagggtcttccccatccccgacctcatcgaatcaggccgccaccgccacgccgccggcgccgcggccgccgccgccgttgccggagacgattcagcagctggacttcacggaggcgccatgggacgaggccgacggcttcgcgctgcgccggtatccgtcgtgggagatcgactgggacgccatcctctcctga

SEQ ID NO: 11119 - DNA, 744 bp, Oryza sativa
  Clone ID: TFbOSC418226j.C1.o5.fg
atggagcaagagcaagtgatgtcccaggagagcaatagctgcacctgcagcagcagcagcaacgacgcgagctcggccgcctgcagctcgctcaacgcgtcgtcgccgagctccgtggactccgggagcgccggcggcggcggcggcggcaagaagcggccgcgcagtgatcacctgaagcacccgacataccgcggcgtgcgcatgcggagctggggcaagtgggtgtcggagattcgggagccccggaagaagtcgcgcatctggctcggcacgttcgacaccgccgagatggccgcgcgcgcgcacgacgtcgcggcgctcgccatcaagggccgcaccgtgcacctcaacttcccggacctcgcgcacctgctcccgcgcgccgcctcggcctcgcccaaggatgtccaggccgccgccgcgctcgccgcggccacggcttcgcccgcgcccgcgctctcgcccacgccatgccacgacgtcgacgccgctgccgatgacgagcccgagccggcggagcctgagcaggcgacggcgccggtttgcatcgttgagaacgggacactgcagcaggacggcggcactggactagactacacgtatttcaccatgccagatgctcttctagagttcgggttcacgttgccgccgccgccgccgccgtattattgcggttcgccgtgggatgacgatgctgacgatttcttctttggtgagccactggtgctctgggaacactga

SEQ ID NO: 11120 - DNA, 666 bp, Oryza sativa
  Clone ID: TFbOSC401961j.C1.o10.fg
atggagcaacacagccactgctggtactacggcggcggcatggctgtcaccgcagccgccggtgccggcgcggcgtcgtcgacatcctcggaatcgcagccgtctggctacgactacgagacggcggggagcgccgaggtgtcggcgcccggcggcggtgcgggccgcgagagggcggcgagaaaggaggagggcggggcgggggcggcggcggcggcggcgggcttcatcggcgtgcggaagcggccgtgggggaggttcgcggcggagatcagggactccacgcggaacggcgtgcgggtgtggctcggcacgttcgagacggccgaggccgccgcgatggcctacgaccaggccgcgctctcggcgcggggcgcggccgcggcgctcaacttccccgtggaacgcgtgcgcgagtcgctccgcgcgctcgcgctcggcgcggccggaggctcgcccgtgctggcgctgaaggggcggcactccaagcgaaagcggcggaagagatcagagctggccggtgccacggcgacggcgaacaagacgacgacgacgacgtccgccacgaccggcggggagcacaagcagatcgtcctcgagctggaggacctcggcgccgactacctagaggagctcctctggatgtccgagcaaactagccattga

SEQ ID NO: 11121 - DNA, 900 bp, Oryza sativa
  Clone ID: TFbOSC421444j.C1.o10.fg
atggcgttctcggagccgccgaagccggcgagccagccgtcgccgccgtcgtcgccgatgagcgagcggccgccgtcggggcgcagcaggcggcgcgcgcaggagccagggaggttcctcggcgtgcggcggcggccgtgggggaggtacgctgccgagatacgcgacccgaccaccaaggagcggcactggctgggcacgttcgacacggcgcaggaggcggcgctggcgtacgaccgcgccgcgctgtccatgaagggcgcccaggcgcgcaccaacttcgtctacacccacgccgcctacaactacccgccgttcctcgcgccgttccacgcgccgcagtacgccgctgccgccgccgcgccgtcctcggtgcagtacggcggcggcgtgggcgcggcgccgcacattggctcgtacggtcaccaccaccaccaccaccaccaccacggacatggcgcggcgtcgggcgcgtcgtcggtgggcgagtgctcgacgatgccggtgatggtcccggttgatccccaccgctccagcatgtcgtcgtcgctgctggacatggacaggaacggccacgacttcctcttctccggcgccgacgacaactccgggtacctgagcagcgtggtgccggagagctgcctccggccgaggggcggcggcgccgcggccgatcatcaggacatgcggcgctactccgacgccgacgcctacggcatgatggggctccgggaggacgtcgacgacctcgcgcagatggtcgccggcttctggggcggcggcgacgcggcggaccagctcggcgcctgcgggttcccggcgagcggcggcgccgccgacatggtcgcctcgtcgcagggctccgactcctactctccattcagcttcctctcccattga

SEQ ID NO: 11122 - DNA, 660 bp, Oryza sativa
  Clone ID: TFbOSC401894j.C1.o9.fg
atggagtgggcgtactacggcagtgggtactcctcgtcggggacgccgtcgccggtgggcggcgacggggacgaggactcgtacatgacggtgtcgtcggcgccgcccaagcggcgggcggggaggaccaagttcaaggagacgaggcacccggtgtacaagggcgtgcgcagcaggaaccccgggaggtgggtctgcgaggtgcgcgagccgcacggcaagcagaggatctggctcggcaccttcgagaccgccgagatggcggcgcgcgcgcacgacgtcgcggcgatggcgctgcgcggccgcgccgcctgcctcaacttcgccgactcgccgcgcaggctccgcgtgccgccgctgggggccgggcacgaggagatacgccgcgccgcggtcgaggccgccgagctgttccgcccggcgcccgggcagcacaatgcggctgccgaggcggcggccgctgtcgctgcgcaggcaaccgcggcgagcgcggagctctttgccgacttcccttgctacccgatggacggactggaattcgaaatgcaggggtacctcgacatggcacagggaatgctcatcgagccgccgccattggcagggcaatcgacgtgggccgaggaggactacgactgcgaggtcaatctatggagctactga

SEQ ID NO: 11123 - DNA, 1122 bp, Oryza sativa
  Clone ID: TFbOSC401369j.C1.o98.fg
atggaggaggggtttgtggctctcaagaggacggagcatgtcgaggtgacgtccttggcggtggcggtcgaggcgacgccgtcggcgaaggggggaaaggggaaggttgtggtgggtggtggtggcgccggcggcggcgttgggccgacgagggtgagggtgttctgtgatgacttcgacgcgacggactcgtcgagcgatgaggatgaggaggaggtgaccgcgcggcggagggtgaagcgctacgtgcaggagattcggttacagcgcgcggcggcggtggccgtgccgccggtgaaggtgaagggcgaggaggtgttcccggccgcggtgtcggcgaagatggcggaggccgcgaaggcgagggtggtgttggcggctgggaggaagaggaaggccggcggggtggacggcgccgagccgcggttccgcggcgtgcggaggcggccgtgggggaagtacgcggcggagatccgcgacccgtggaggcgggtgcgggtgtggctcggcacgttcgacaccgccgaggaggccgccaaggtgtacgacacggcggccatccagctacgcggccgcgacgccaccaccaacttcaaccagtccggggactcggcaagcctcgacgtcccacccgaggtcgccgagcgcgtcccgcagccgccgggggcgtccaagaacgcctccccggccacctcctacgactccggcgaggaatcccacgccgcggcggcctccccaacctccgtcctccgttccttccctccctccgccgtcgtcgcgaccgccgacacggccaacaagaagcagccgccgccgccgcctctcgtcgtccgcgagaccgacgagtcggtcgacgtcttcggctgctccttctccgacgacggcggcttcgccggcgagctcccacctctctacaccgacttcgacctcctcgccgacttcccggagcccccgctggacttcttgtccaacctccccgtggagcccttctccctggctcccttctccagcaacaatgggtcaccggacctccacctcgacgacgccccatcgccggcggcggcacaagtggacgacttcttccaagacatcaccgacctgttccagatccccgtcgtctag

SEQ ID NO: 11124 - DNA, 1260 bp, Oryza sativa
  Clone ID: TFbOSC400957j.C1.o1.fg
atggcgaccaccacctggtgctgtggttgctgctgctcctgcctcgccaccgctcgaagccgctcctcggtgctaaactccggggacgccggaggcggcggtggcggtggcggtggcggaggattattccggttcgacctcctcgcgagcagccccgacgacgacgagtgctccggggagcagcatcagttgccggccgcctcggggatcgtgacgcgtcagctcctcccgcctccgcctcccgcggcgccgtcgccggcgccggcgtggcagccgccgcgccgcgcggcggaggatgccgccctcgcgcagcggccggtggtcgcgaagaagacgcggcgcgggccgaggtcgcggagctcgcagtacaggggcgtcaccttctacaggaggaccggccgctgggagtcgcacatatgggcttacgatcgcgctgcgatcaagttccggggactggaggctgacatcaacttcaacctgagcgactacgaggacgatctgaagcagatgaggaactggaccaaggaggagttcgtgcacatactccggcgacagagcacgggattcgcgagggggagctccaagttccgcggcgtcacgctgcacaagtgcggccgctgggaggcacgcatgggccaacttcttggcaagaagtacatataccttgggctctttgacaccgaagttgaagctgcaagagcatatgacagggcagctattcgcttcaatgggagggaagctgttaccaacttcgagcctgcatcctacaatgtggatgctttaccagacgccggaaatgaggcaattgttgatggcgatcttgatttggatttgcggatttcgcaacctaatgcgcgtgactccaaaagcgatgtcgccacaactggcctccagttaacttgtgattcccctgaatcttcaaatattacagtccaccagccaatgggctcgtctccccaatggactgtgcatcaccaaagcacaccactgccccctcagcatcaacgtttgtacccatctcattgtcttggcttcctcccgaacctacaggagaggccaatggacagaaggcctgagctgggtcccatgccgttcccaacacaggcttggcaaatgcaggccccttctcacttgccattgctccacgctgcagcatcatcaggattctctgccggcgccggcgccggcgtcgccgccgccacccgccggcagccgccgttcccggcggatcaccccttctacttcccgccaaccgcctga

SEQ ID NO: 11125 - DNA, 1086 bp, Oryza sativa
  Clone ID: TFbOSC900118j.C1.o3.fg
atggcgaccaccacctggtgctgtggttgctgctgctcctgcctcgccaccgctcgaagccgctcctcggtgctaaactccggggacgccggaggcggcggtggcggtggcggtggcggaggattattccggttcgacctcctcgcgagcagccccgacgacgacgagtgctccggggagcagcatcagttgccggccgcctcggggatcgtgacgcgtcagctcctcccgcctccgcctcccgcggcgccgtcgccggcgccggcgtggcagccgccgcgccgcgcggcggaggatgccgccctcgcgcagcggccggtggtcgcgaagaagacgcggcgcgggccgaggtcgcggagctcgcagtacaggggcgtcaccttctacaggaggaccggccgctgggagtcgcacatatgggcttacgatcgcgctgcgatcaagttccggggactggaggctgacatcaacttcaacctgagcgactacgaggacgatctgaagcagatgaggaactggaccaaggaggagttcgtgcacatactccggcgacagagcacgggattcgcgagggggagctccaagttccgcggcgtcacgctgcacaagtgcggccgctgggaggcacgcatgggccaacttcttggcaagaagtacatataccttgggctctttgacaccgaagttgaagctgcaagagcatatgacagggcagctattcgcttcaatgggagggaagctgttaccaacttcgagcctgcatcctacaatgtggatgctttaccagacgccggaaatgaggcaattgttgatggcgatcttgatttggatttgcggatttcgcaacctaatgcgcgtgactccaaaagcgatgtcgccacaactggcctccagttaacttgtgattcccctgaatcttcaaatattacagtccaccagccaatgggctcgtctccccaatggactgtgcatcaccaaagcacaccactgccccctcagcatcaacgtttgtacccatctcattgtcttggcttcctcccgaacctacaggtattattatcaacaccccttgcttaccaattctaa

SEQ ID NO: 11126 - DNA, 2079 bp, Oryza sativa
  Clone ID: TFbOSC400032j.C1.o34.fg
atggccaccatgaacaactggctggccttctccctctccccgcaggatcagctcccgccgtctcagaccaactccactctcatctccgccgccgccaccaccaccaccgccggcgactcctccaccggcgacgtctgcttcaacatcccccaagattggagcatgaggggatcggagctctcggcgctcgtcgccgagccgaagctggaggacttcctcggcggcatctccttctcggagcagcagcatcatcacggcggcaagggcggcgtgatcccgagcagcgccgccgcttgctacgcgagctccggcagcagcgtcggctacctgtaccctcctccaagctcatcctcgctccagttcgccgactccgtcatggtggccacctcctcgcccgtcgtcgcccacgacggcgtcagcggcggcggcatggtgagcgccgccgccgccgcggcggccagtggcaacggcggcattggcctgtccatgatcaagaactggctccggagccagccggcgccgcagccggcgcaggcgctgtctctgtccatgaacatggcggggacgacgacggcgcagggcggcggcgccatggcgctcctcgccggcgcaggggagcgaggccggacgacgcccgcgtcagagagcctgtccacgtcggcgcacggagcgacgacggcgacgatggctggtggtcgcaaggagattaacgaggaaggcagcggcagcgccggcgccgtggttgccgtcggctcggagtcaggcggcagcggcgccgtggtggaggccggcgcggcggcggcggcggcgaggaagtccgtcgacacgttcggccagagaacatcgatctaccgcggcgtgacaaggcatagatggacagggaggtatgaggctcatctttgggacaacagctgcagaagagagggccaaactcgcaagggtcgtcaaggtggttatgacaaagaggaaaaagctgctagagcttatgatttggctgctctcaaatactggggcccgacgacgacgacaaattttccggtaaataactatgaaaaggagctggaggagatgaagcacatgacaaggcaggagttcgtagcctctttgagaaggaagagcagtggtttctccagaggtgcatccatttaccgtggagtaactaggcatcaccagcatgggagatggcaagcaaggataggaagagttgcagggaacaaggacctctacttgggcaccttcagcacgcaggaggaggcggcggaggcgtacgacatcgcggcgatcaagttccgggggctcaacgccgtcaccaacttcgacatgagccgctacgacgtcaagagcatcctcgacagcgctgccctccccgtcggcaccgccgccaagcgcctcaaggacgccgaggccgccgccgcctacgacgtcggccgcatcgcctcgcacctcggcggcgacggcgcctacgccgcgcattacggccaccaccaccactcggccgccgccgcctggccgaccatcgcgttccaggcggcggcggcgccgccgccgcacgccgccgggctttaccacccgtacgcgcagccgctgcgtgggtggtgcaagcaggagcaggaccacgccgtgatcgcggcggcgcacagcctgcaggatctccaccacctcaacctcggcgccgccgccgccgcgcatgacttcttctcgcaggcgatgcagcagcagcacggcctcggcagcatcgacaacgcgtcgctcgagcacagcaccggctccaactccgtcgtctacaacggcgacaatggcggcggaggcggcggctacatcatggcgccgatgagcgccgtgtcggccacggccaccgcggtggcgagcagccacgatcacggcggcgacggcgggaagcaggtgcagatggggtacgacagctacctcgtcggcgcagacgcctacggcggcggcggcgccgggaggatgccatcctgggcgatgacgccggcgtcggcgccggccgccacgagcagcagcgacatgaccggagtctgccatggcgcacagctcttcagcgtctggaacgacacataa

SEQ ID NO: 11127 - DNA, 357 bp, Oryza sativa
  Clone ID: TFbOSC18348j.C1.o1.fg
atggagaatttgagttgtttgatcagctcgccattgccaatgccaatgccggagtacgagctggcggcgtgcagtccggcgtcgccgtcgtcgtcggcctcgtcgacgtcgacgccaccgtcgcctgggggagaggcggcggcgaggtgcggcgagaagcgcgggaggggcggcggtgggggtaggcacccgacgtaccgcggcgtgcggatgcgggcgtgggggaagtgggtgtcggagatcagggagcctctcaagaagtcgcgcatttggctcggcacgttccctacgcccgagatggtagcgcacgcgcatgaactcttcgctctagttgtcaatatgattatatcactatga

SEQ ID NO: 11128 - DNA, 735 bp, Oryza sativa
  Clone ID: TFbOSC401762j.C1.o9.fg
atggcgttgtcggagccggacctcgcggcggagacggaggcgatcgtgtcggcgctcacgcacgtcgtcgcgtacggcggcggcggcccgccgccgagcgaggagaccgccgcgtccgcggtgacaaggacagcgccgtggcgcgcggacggcgcgcggcagggggcggtgccggcggcgaggaagtacaggggggtgaggcggcggccgtgggggaagtgggcggcggagatcagggacccgcacagggcggcgcgggtgtggctcgggacgttcgccaccgccgaggacgcggcgcgcgcctacgacgccgcggcgctccgcttccgcggggggcgcgccaggctcaacttccccgaggacgccgccgcggccgacgagcgacgcgccacggacgccgcggccgccgcggcggcggcgtcgtcggcgcccgccgcgctgctggagtcgcagccgggcgacgtcgcggactgcctcgactactccaggatcctggcgggggcgccggagcggccgacgagctccaccgtcccggacgggttcttcggcggcggcgggaacggccgcttcttgcactcgtggagcattggcacgtcgccgtcgccgtcgggctcgggctcgggcggagccggcggtggcggtggcggtggcggtggcggcgcccctgttcgtcctctgtttcatggcggtaacggctgggagcaacgcggtgacagtgcatacaacggtttctag

SEQ ID NO: 11129 - DNA, 744 bp, Oryza sativa
  Clone ID: TFbOSC401286j.C1.o8.fg
atgccggagctggaggtgtgtagccctgcgtcgtcgggtggggcgtcgccgccggagtcgccggtggaggggaggaggggaggaggaggaggggagaagagggggagatcaggggatggcgggaggcacccgtcgtaccgcggcgtgcggatgcgggcgtgggggaagtgggtgtcggagatcagggagccccggaagaagtcgcgcatctggctcggcacgttcccgacgccggagatggccgcgcgcgcccacgacgccgccgcactcgtcgtcaagggccccgccgccgtcctcaacttcccggacatggccgcctcgctcccgcgcccggcctccgcctccccgcgcgacgtccaggccgccgccgcccgcgccgccgccatggagcccccccagccgccgccgtcgtcgctcaccgtgcaggccgactccgccgccgccgcattcctgacgcccaagaacggcggtgtcagcggcgccggcgcggcggacgacgagctcgaggcgatcgtcgagctgccgcggctcgacgagctggacgccgccgagctcgtgttcggcgccgcgttccaggacacggcggcggaacacccgtggtgcgaccccgtctggatcgacggcggctacgcggcggccgccgcggcggcggcggcggccgcggcgcacgacgacctgttcggcctcgacgccgaccaccatggatgggcccagtcggttggtgccctcttatggaacctgtga

SEQ ID NO: 11130 - DNA, 411 bp, Oryza sativa
  Clone ID: TFbOSC419098j.C1.o8.fg
atggacggcgacggcggcggcggatgggacgatcagggcaacggcggcggcgagacgaccaagtaccgtggcgtgcgtcgccggccttctggcaagttcgcggcggagatccgtgactccagcaggcagagcgtccgcgtctggctgggaaccttcgacaccgccgaggaggctgcgcgggcttacgaccgcgccgcctacgccatgcgcggccacctcgccgtcctcaacttccctgctgaggcgcgcaactacgtgcggggatcaggctcgtcgtcctcgtcccgacagcatcagcagcggcaggtgatcgagctggagtgcctagacgaccaagtgctgcaagagatgctcaagggtggcgacgatcagtacaggtcagcagctgggagcaagaggaataactactag

SEQ ID NO: 11131 - DNA, 651 bp, Oryza sativa
  Clone ID: TFbOSC401153j.C1.o10.fg
atgtgtggcggcgcgatcatttccgacttcatcccgcagcgggaagcccaccgcgcggccaccggcagcaagcgtgccctctgcgcctccgacttctggccgtcggcgtcgcaggaagccgccgacttcgaccacctcaccgccccctgcaccttcacccccgaccaagcggcagaggagccgaccaagaagcgggagcggaagacgctgtaccgtggcatcaggcggcggccgtgggggaagtgggcggcggagatccgcgacccggcgaagggcgcgcgcgtctggctcggcaccttcgccaccgccgaggcggcggcccgcgcctacgaccgcgccgcccgccgcatccgcggggccaaggccaaggtcaacttccccaacgaggacccgccactcgacgacccggccgccgacggccacagccacggcggcgccgccatcccgtgcagggagttcatggactacgacgccgtcatggcgggcttcttccaccagccctacgtcgtcgccgacggcgtgccggccgtgccggcggaggaggcgcccacggtggcgtacgtgcaccaccacctgccgccgcagccgcagcaggacgcggggctggagctctggagctttgataacatccacacggccgtgccgatgtga

SEQ ID NO: 11132 - DNA, 1920 bp, Oryza sativa
  Clone ID: TFbOSC401980j.C1.o10.fg
atgacgaacagcaacaatggcaatggcggcacgaacgcggcggcgagtggatggctgggcttctcgctgtcgcctcacatggcctcctccaccatggacgaacaccaccacgtgcaccaccaccaacagcaacagcagcagcagcagcagcagcagcatcaccagcagcagcaacatggtttgttcttcccttcggtgaccaccgccgccgccgccgccgcgtatgggctcgccggcgacgtcgtggccgccaccaatgggtactactcccagctcgcctccatgccgctcaagtccgacggctcgctctgcatcatggaggctctccggagaaccgatcaagatcatcacgggcccaagcttgaggacttcctcggcgcggcgcagccggcgatggcgctgagcctggacaacacctccagcttctactacggcggaggcggcgccgccgccgccgggcacggccaacacggctacctccaggcgtgcgacctgtacggcggcccggccgcgccgtcgctcgtgaccgccgccgacgaggaggcggccgcggccgcggccgccatggcgagctgggtggccgcgcgcggcgccgccaccgcgtacgccacgggcgccgccgacgcgaacgccgccgagaacgtcctcccctccgccaccgccgcgcagcacctgcaccacccgctcgccctgtccatgagctccggctccctctccagctgcatcaccgccggcgagtacggcatggcggccgtggcagccgccgacggtggccgcaagcgcggcggcgccggcggcggcgggcagaagcagccggtgcaccaccgcaagtccatcgacacgttcggtcagaggacgtcgcagtacagaggcgtcaccaggcataggtggactgggcgatatgaggcgcacctgtgggacaacagctgcaagaaggaaggccagaccaggaaagggaggcaaggtgggtatgacatggaggagaaagcggcgagagcgtatgacctggcggcgctcaagtattggggcccttccacacacatcaacttcccgctggaggactaccaggaggagctggaggagatgaagaacatgacaaggcaggagtatgtggctcacttaaggaggaaaagtagcggtttctcacggggagcttccatgtaccgtggtgtcacaaggcatcatcagcacggacggtggcaggcacgcatcggccgagtctccggcaacaaggacctctacctcggcactttcagcacgcaggaggaggcggcggaggcgtacgacgtggcggcgatcaagttccgggggctcaacgccgtcaccaacttcgacatcacccgctacgacgtcgacaagatcatggccagcaacaccctcctccccgccgacctcgcccgccgcaacgccgccaccaccacctccaaggacgaccactccgccgccggcgccggcgccattgtctcggtgcactccgccgccgacatcgccgtcgccgacaccctctggaaggccaccactgccccgaggcagcagcagcagcaccacgacgacgtcgtgctgtccggcgccgaccaggccgcattctccgtcctccacgacctcgtcgccgtcgacgccgcggcggcgcaccagcagcagcagcagcagcagcacatgtccatgtcggcggcgtcgtcgctggtgacgagcctgagcaactcgcgcgaggggagccccgaccgcggcggcggcctctccatgctcttcgccaagccgtcgcccgccgtggcggcgtcggcgcagcagcaggcgtcgaccaagctcatggcggcgccgctgccgctcggctcctgggtctcctcgccgccggcgtctgccaggccgcccgccgtctccatcgcccacatgcccctcttcgccgcctggaccgacgcctaa

SEQ ID NO: 11133 - DNA, 1140 bp, Oryza sativa
  Clone ID: TFbOSC401446j.C1.o16.fg
atggcgaagcctcgcaagaactccaccactaccaacaccagcagcagcggtgtcgccgccgccgccgccgcggcggcggtgaagccgaagcgcacgcggaagagcgtcccccgcgagtccccctcccagcgcagctccgtctaccgcggcgtcacccggcaccggtggacggggcggttcgaggcgcacctgtgggacaagaacagctggaacgagtcccagaacaagaagggcaagcaagtttacctcggggcgtatgacgacgaggaggcagcggcgagggcgtacgatctggcggcattgaagtactggggacccgacaccatcctcaacttcccgttgtctgcatatgaaggtgagttgaaagaaatggaggggcaatcaagggaagagtatattggatccctaaggaggaaaagcagtgggttctcaagaggagtatcgaagtaccgaggcgttgcaagacaccatcacaatgggagatgggaggcccggattggccgtgtttttggcaacaagtacctctatctcggtacttacgcgacgcaggaggaggcggcaatggcgtacgacatggcggccatcgagtatcggggcctgaacgccgtcaccaacttcgacctcagccggtacatcaagtggctccggcccggcgccgacggcgcgggcgctccccagaatcctcaccccatgctgggtgctctgtcggcgcaggatctcccggcgatcgacctcgacgccatggcgtcgtcgttccagcacgacggccatggcgccgcggcggcggcggcacagctgatcccggcaagacattcgctcggccacacgccgacaacgtcggcgctcagcctgctgctgcagtcgcccaagttcaaggagatgatcgagcggacgtcggcggcggagaccaccaccaccagcagcacaaccacctcctcctcgtccccgtcgccgccgcaggcgaccaaggacgacggcgcctcgccgcagtgcagcttcccggaggacatccagacctacttcggctgcgccgccgaggacggcgccgccggcgcgggatacgccgacgtggacggcctgttcttcggcgacctcgccgcgtacgcgtcgccggcgttccacttcgagctggacttgtga

SEQ ID NO: 11134 - DNA, 624 bp, Oryza sativa
  Clone ID: TFbOSC21386j.C1.o4.fg
atgtcgtcgtcgtcttcggcgacgacgacgaagtataggggagtgcggctgcgcaagtgggggaagtgggtgtcggagatccggctgcccaacagccgcgagaggatatggctgggatcctacgacacgcccgaggaggcggcgcgggcgttcgacgccgcgttcgtctgcctccgcggcggcggcgaggccgccgggaacgggatcaacttccccggctcgccccctgccgtggcgcgcaccagcgacccgcaggaggtgtacgcggccgcggtgtcgcatgccaacaaccggccgccgccgccgccgtcggcccgagcaacgtcgtctgcacttccatgggaggaagctccggtggtggcggctcaggaggcggcggcggacatggcgcccgacgtggtggtgctgccatcgtcgccggtgaatgtgctggcagcagctgggagcttcgaatattggtcgcaacaaccactctactcgccgacggcagcaagcctcgatttgcagaggtggatgacggcggcggcggcggccgaggaatcaataatggaggatgacgacgacgaaggaacaagtgatggtctttggagtttccactactcaccgactcgttccaagtggtaa

SEQ ID NO: 11135 - DNA, 531 bp, Oryza sativa
  Clone ID: TFbOSC416986j.C1.o7.np
ggggaggggtggcgccggcggagagaggtggttcgcgtggctacggcgctacggaggtggagaggggaaatggagcggagtgaggcgcggagtgtggcggacggcggaggcagcaagtcacgcaagtgctgcccgctgcggcggtcgcggaaggggtgcatgaaggggaagggcgggccggagaaccagcgttgccccttccgcggcgtccggcagcgcacctggggcaagtgggtggccgagatccgcgagcccaaccgcggcgcccgcctctggctcggcaccttcaacaccgccctcgacgccgcccgcgcctacgactccgccgccagggccctctacggcgactgcgcccgcctcaacctactcctcgccggaatatgttgttgacaattaatacacacattcatgtatatgcatgtggtgtatgtgcgcatcgcatctgtaatactcctacgtgtcatgtgatatactctttccatctctaaatatttaacgccgttaatttctttaatatatttaaccgttcat

SEQ ID NO: 11136 - DNA, 1215 bp, Oryza sativa
  Clone ID: TFbOSC900118j.C1.o39.gp
ttactgcaataattttctactatattttattctaatcgaagaacatgtctatatctcacatcaaaggtcttatttagatgcaacatactaattccacaacaccttatcgaagcctaccatactgcatcacatatatcagcaaccataccgtatatacacatcataaccttaccaaatcaggtcacatgcagagtcatcttcacatcataagttcaatactaaccaaaattacacaataccaagtttccaatgatgctatgcataacaataaagctgctaacgatagtaattacggataattggaccctcaggccccgccaacttcttccacacaggcggacacagcatggaaggcacggacacgggttccacagcccgatcgcttcttacgcttgcctgaaatcatcgtccacattggctccggagcaagcacctggacctcacagctactggcctcctccttgacccgaccgccacagctctcaccttcctccttcacccgtggaagaagggtcggcttagctgtcccaattggcaaggtgattggcctcacagctgcttcaggcggtgaaatagttggcttgggtagctccggcggcagcgagtagcagcggacggaggcgaagttggtggcggcgctggaaccgcggaggcggacgctggcggcgtcgtatgcggcggcggcctcctcggcggtgtcgaaggtgccgagccacaggcggcggcggaggtgagggtcgcggatctccgccgcgaacctcccccacggccgctgccgcacgccgcggaaccgcgcggtcggcctcgcctcccccgcccccgcctccatcacgcggcgcttcacgcccccaccaccaccaccaccaccacccaccttacccctccgccgcggccgaggctgcgccaccgcaaccgcctcgtcctcgctggaggacgagtcggtggcgtcggcgtcgcgcacgaggatacgcaccacgcgtccccgcggcgccgcccccgccgccagctcgtgcaggctagggtttgtacccatgcctcgggaaacccacctcaatccatacagggtgttcgatcgatgtggctacgcgtagcctccgcgccccgccatgggagcgtggggggtggaaggcgaggtgggggggctagggtttagggttagggtttggttccgatcgatgcggcggcgtgcggcggggtggggttgcaatggaagcg

SEQ ID NO: 11137 - DNA, 699 bp, Oryza sativa
  Clone ID: TFbOSC900129j.C1.o30.fg
atgcgccgccgcgtctcctcctcctcctcctcctcctcgtcctcgtcgccggcgaggcatcacaaggcgcggcgcagcaggaggaagctcgccgtcgacgaggactgggaggccgccttccgcgagttcctctcccgcgaccacgacgacgacgacgacgaccacgacggtcagcatgtcgttgttgcgccgttgatccgtggtagtgacaagtgcgtccacggccacgaggtggtggcgtcgacggtcggcggtggcgcaagcggcggacgacgacgagccgacgacgacgacggcgagcggcggcggcggcggcggagggagaagcggagctacccgtaccgcggcatccggcagcggccgtgggggaggtgggcgtcggagatccgcgaccccgtcaagggcatccgcgtctggctcggcaccttcgacaccgccgagggcgccgcgcgcgcctacgacgacgaggttcgccgcatctacggcggcaacgccaagaccaacttccccccatcgccgcccacgccgccgccgccggagaagccagcggcggagaggagcccctcgacgacgccgacgacgaccacggaggactccggcgactcgcgcatactcatcgagtgctgctccgacgacctgatggacagcctcctcgccgccttcgacatgaccaccggcgacatgcgcttctggagctaa

SEQ ID NO: 11138 - DNA, 2217 bp, Oryza sativa
  Clone ID: TFbOSC31530j.C1.o6.fg
atgaagaacggggcgaggaaagacgcgggcggcggcggcggcggagtgttcgtcccgtgcgtcgacatcaagtcgttcgtgctctcgctcgccttcctcacggtgttcgtcgcattgtggcagctccagccgtacggctcgttgctcaccgcggcgcgctccaccgcctctgtctcggcctcgccatgttccctcatcgccacgcccgccgccgccgccgcgagcgcaggcgtcatccggtcggagaactccaccgccgacacggccaagaccgcgccggccgccgttgctagcgcagtccccgcgcggttggctagggcggcgaggccggcgcgggtggaggaccccaacaagcgtgagctccggccgtacggcagcgcggcggcgctgttcgttcagatgggcgcgtaccgcggcgggccgcggacgttcgccatcgtgggattagcgtccaagcccacccatgtgttcagcaacccctacttcaaatgcgagtggctgcccaaccccaccgccggcaacccgtcgccgcgccccgtccgcaccaaggcgtacaagatgctcccggactgggggtacggccgcgtctacaccgtcgtcgtcgtcaactgcaccttcccatccaaccccaacgccgacaacgccggcggcaagctgctcgtccacgcctactactccaccacctcccgccgctacgagcgcttcgtggcgctcgaggaggccccgggctcgtacgacgagtcccgcttcagcccgccgttcccgtacgactacctctactgcggctcgtcgctgtacggcaacctcagcgccagccgcatgcgggagtgggtggcctaccacgcgcacttcttcgggccgaggtcgcacttcgtcttccacgacgccggcggcatcagcccggaggtgaaggcggtgctggatccgtgggtccgcgccggccggctcacggtgcaggacatccgggcgcaggcggagtacgacggctactactacaaccagttcttggtggtgaacgactgcctgcaccggtacaggcacgccgccaattggaccttcttcttcgacgtcgatgagtacatttacctgcccaatgggcagacgctcgaccaggtgctcggcaagctctcgggatactcgcagttcaccatcgagcagaatcccatgtccagcaagctctgcgtgcaggatccaagcaaggattactcaagggaatggggttttgagaagcttgtcttccgcaattcaattaccaaagttaggcgagatcgcaaatatgcgatccaggcccgaaacgcatactctgccggcgtacacatgtcacagaatgtctacgggaggacaacccataagacagaaagcctgatcagatactaccactatcacaattcgatcaatgtcatgggagagccttgtcgggaatttgtgccggtgccggtcaatggtagtaagttgatgttcgaggggatcccttacgtatacgatgataacatgaagcgtttggctgggcagatcaagcgggaggagctcggcggccttgaagaggaggagggcgagccagtcgtcggcgaggcggcgctgggcggaggtgccgggggcggcagagtcgagggcggagtcgatgtgggagaagagggtgtgggagatggcgatgtggatgaggaagaggagggagagcgggaggacgaaggtggcggcgatgcgggcgaagagagggcggtcggcgacgatgatgatgagcttcgtcggcgacggctggagggagagaggggagcgggaggagggcgaccggcgctgacctcgccggcgagccgccgccgtcgctgcccgaggccagatccggcaagcccaggccggatctggccacctcgccgccactccgacgacgacgaccctgcggtgttctaccttcgcggccggtcggcgcggctcaacttccccgaggagatctccttgctggcttcgccgtcagagggtggcggcgcaggcgagccccgcgagcccgacggcggcacgctgtccgcggcctcgatccggaagaaggccatcgaggtcggctcccatgtcgacgcgctccagaccggcatgatggtcgcgccgacccaccaccgcgagcagcagaagcaccaccaccacccgcacctgcaaccgcacggcgaggagcaacaccaccacgaggattggattagttctaagtatgaagacattcatacttaa

SEQ ID NO: 11139 - DNA, 549 bp, Oryza sativa
  Clone ID: TFbOSC989j.C1.o1.fg
atggccaagcgacgcagcaacggcgagaccgccgccgcgagcagcgacgactgtagcgccggcgtctgcggcggcggcggcggcggtgaggttgagccgaggcggcggcagaagcggccgcggaggagcgccccgcgggattgcccctcccagcgcagctccgcgttccgcggcgtcacacggtgcgcaccggtggacgggcggttcgaggcgcatctctgggacaagaacacctggaacgagtcgcagagcaagaagggcagacaaggggcttacgacggcgaggaagcggcggcgcgcgcctacgacctcgccgcattgaagtactggggccacgacaccgtcctcaacttccctctgtcaacatatgacgaggaattgaaggaaatggaggggcagtccagggaagagtacatcggatcgctccgaggaagagcagtggcttctcaagaggggtgtccaagtacagaggagttgcaaggcatcatcacaacggcaaatgggaggctcggattgggcgtgtgttcggcaacaaatacctctacctag

SEQ ID NO: 11140 - DNA, 651 bp, Oryza sativa
  Clone ID: TFbOSC900306j.C1.o12.fg
atggccaccgtgcaacccgccgcctcggaccccgcgcctcctcctcctccggagacggaggagcagccggccgcggcggggggcgaggagatcgcggcgctcgacgagcagctggccgtcgcggacggcggcggggatgatgggaaagcggctgcggcggcggagggaggaggaggaggaggaggagggaagctggtggcggagaccatgcgcaagtacgccgcgccgcggtcgtcgcggtaccacggcgtcacgaggttgaagtggagcggcaagttcgaggcgcacctctgggacaacagcagccaggtcgagggccgcaagcgcaaggggaagcatggaagctatgttactgaagagaatgctgcaagggcacatgaccttgcagcccttaaatattggggtgcagggccaaacaccaaacttaacttcaatgtttctgattatgagaaagaaatcgagaggatgaagaccatgtcccaagatgaatttgtggtgtacataagaaggcagagcagctgtttctcaagaggaacttcatcatataggggtgtaacaaggcgaaaggatggtagatggcaagcacggattggtaggattggagaaagtagagacaccaaagacatctatcttggtacctttggtgagtga

SEQ ID NO: 11141 - DNA, 1095 bp, Oryza sativa
  Clone ID: TFbOSC401190j.C1.o4.fg
atgtgcggcggtgcaatcctcgccgatttcaccccggcgagggtgccccggcggctgaccgccgccgagctcctgccggtgaccccgactccccccgccgccgagaggagaaccacccggaagcgcaagtccgacgtcgacttcgaggcggagttcgagcttttcgaggacgacgacgacgacgatgagttcgagctttccgacgatggcgacgagagtttggccgtgtcatgtgtgtcgtcccccaagtcgaaggcagtaccttcgttttcttgtacgatgagatggagaaatcttgcctgctttcttgaaggattttcacctgacggcaacctgaactttacacgatttcttctcctgctgttgatttcatcgatcgccggcggcagtttcgtcggatgtctcctcgagctccaggccgcggcggcgcgtggcggcggcggcggccggtcgtcggaaggcgagcaagaagagcaagtacaggggcgtcggcgccggccgtcggggaggttcgcggcggagatcagggaccccaagaaggggcggcgcgtgtggctcggcacgtacggcagcgccgaggaggccgccatggcctacgaccgcgaggcccgccgcatccgcggcaagggcgcgaggctcaacttcccccgcgacggcgatggctcccctcgccggagtaacgaccggccctgctggaccatcgacctcaacctccccgcggcggccgtctccggtgacgacgacgacgccatggccgtcgacgccgcagacgcagacgcaggcagtgctggccgtgcagcagcctatgcagatcaagaagcactgagcgcggcaaagtgcaagatcaagcagtgtcctcgcgacgaacagatggcgagcgccacacctgagctcatggaggaggacgcgagcagcagcagaaacatggtgcccctgtccatggcgctgcagctgcagtatgcggcgatgatcgccgaatgcgaccgcgagatggaggagatcgccgccgtggagagggacctcgagaggcgcaggaggcaggtgttcgagcgcagaggccacctggtcaggcaggcctctcttctgctcgactga

SEQ ID NO: 11142 - DNA, 528 bp, Oryza sativa
  Clone ID: TFbOSC30077j.C1.o2.fg
atggcggacgcggcggagcagcatcaccggcaggaagagactgcggcggcgacgacgacgccgcagcagatgatgatgcggcggcggcgggcgcgcgcgtcgagcgagtacctgggcgtgcggcggcggccgtgggggcggtacgcggcggagatccgcaacccgtacaccaaggagcgccactggctcggcaccttcgacaccgccgaggaggccgccgtcgcctacgacctctccgccatctccatctccggcgccgccgccgcgcgcaccaacttcctctaccccgacatgcaccaccaccacccttcgccgccgcagcacgcgctgtctccggcagtgccaccgccgccaccgccgccgccgccgtcgccgctgtacgatgatgattacctgtcgccggcggcggcggaggaggaagtggaggccggcgacgacgagtcgctgacgatcgcgaccatcctgcagagcttccagtatcagcagagcgtcccaccggcgtcatcgggttccatgttttattattag

SEQ ID NO: 11143 - DNA, 879 bp, Oryza sativa
  Clone ID: TFbOSC405965j.C1.o10.fg
atgatgaacttctcctcgtacttctactcgtcgtcggcggcggcggcgggtggtggtggtggtggtggggagaagaagtcgtcgtcgtcgtcggcgtcgaagaagaagcagcagcaggcggcggcggcggagggagggaataaccagacgaggtaccttggggtgaggaggaggccgtgggggaggtacgcggcggagatcagggacccggcgacgaaggagaggcactggctggggacgttcgacacggcggaggaggccgccgtcgcctacgaccgcgccgcgaggtcgctccgcggcgcccgcgcgcgcaccaacttcgcctacccggacctccccccgggctcctccgtcaccccctacctctcccccgacctctccgccgacgcctccgatcagctgctccagccgttctacgccaatccctccgccgccgccgcgctgcccactccggcggcggtgatggccggaggaggaggagtcgaattcggcggcgagtacatgtacggcggcggcgtcgacatgtcgtcgctgatggacgacattgcggccatgcccgacgacctcccgcccagcgtgacgggcggcggcggcggcttcgccagcagcgacgaatactccagcggcggcggcgggatggtcgacgacgtctccatgtactgcggcggcaatggcggagggtcgtcgtggtgcgacgcctccgacttcgcctcgtactcgtcctcctcgccggcggcggcggcggcggcaggctcgcacgggatgtacttcgaggaggggtacgtgcacagcccgctcttctcgccgatgccggccgtcgacgacgccggcgccgacgggttccagctcggcggctcgtcgtcgtcctactactactga

SEQ ID NO: 11144 - DNA, 132 bp, Oryza sativa
  Clone ID: TFbOSC417134j.C1.o8.gm
atgcggaagtcgaagcagccgcagccgcagccgtcgccggagatccggtaccggggcgtgcggaagcggccgtcggggaggtacgccgccgagataccgggacccggcgaagaagaccccgattctggctgg

SEQ ID NO: 11145 - DNA, 1185 bp, Oryza sativa
  Clone ID: TFbOSC900225j.C1.o16.fg
atggacagcacgagctgtctcttggacgacgcgagcagcggcgcgtccacgggcaagaaggcggcggcggcggcggcgtcgaaggcgctgcagcgcgtgggcagcggcgccagcgcggtgatggacgcggccgagcctggcgccgaggcggactcgggcggcgagcggcgcggcggcggcggcgggaagctgccgtcgtccaagtacaagggcgtggtgccgcaaccgaacgggcggtggggcgcgcagatatacgagcggcaccagcgggtgtggctcggcacgttcaccggcgaggcggaggcggcgcgcgcctacgacgtggcggcgcagcggttccgcggccgcgacgccgtcaccaacttccgcccgctcgccgagtccgacccggaggccgccgtcgagctccgcttcctcgcgtcccgctccaaggccgaggtcgtcgacatgctccgcaagcacacctacctcgaggagctcacgcagaacaagcgcgccttcgccgccatctccccgccgccccccaagcaccccgcctcctctccgacgtcctcctccgccgcgcgcgagcacctgttcgacaagacggtgacgcccagcgacgtcgggaagctgaaccggctggtgatccccaagcagcacgccgagaagcacttcccgctccagctccctccccctaccacaacctcctccgtcgccgccgccgccgacgccgccgccggcggcggcgattgcaagggcgtcctcctcaacttcgaggacgccgccgggaaggtgtggaaattccggtactcctactggaacagcagccagagctacgtgctcaccaaggggtggagccgcttcgtcaaggagaaggggctccacgccggcgacgccgtcggcttctaccgcgccgccggtaagaacgcgcagctcttcatcgactgcaaggtccgggcaaaacccaccaccgccgccgccgccgccgccttcctcagcgcggtggccgccgccgccgcgccgccacccgccgtgaaggctatcaggctgttcggtgtcgacctgctcacggcggcggcgccggagctgcaggacgccggcggcgccgccatgaccaagagcaagagagccatggacgccatggctgagtcacaagcacacgtggtttttaagaagcaatgcatagagcttgcgctaacctag

SEQ ID NO: 11146 - DNA, 990 bp, Oryza sativa
  Clone ID: TFbOSC101030j.C1.o16.fg
atgtgcggcggagcgatccttgcggagctcataccgagcgcgccggcggcgaggcgcgtcacggcgggccacgtctggccgggcgacgccaacaaggccaagaagaagggcgcgcgcgccgacgacttcgaggccgcgttccgcgacttcgacaacgactccgatgacgaggagatgatggtggaggaggcggaggaggaggaggcgacctccgagcacaagccgttcgtcttccgcgccaagaaggcggcggcggcggcgtcgagcaggcgcaggaagccggcgcagtacaggggcgtgcggcgccggccgtgggggaagtgggcggcggagatccgcgaccccgtcaagggcatccgcgtctggctcggcaccttcaccaacgccgaggccgccgcgctcgcctacgacgacgccgcgcgcgccatccgcggggacagggccaagctcaacttcccttccgctaccacccctgacacccgcaagcgcggccgcgccaccgccgccgccgccccggccgtcaaggcgaccccggtcatcaacctcgtcgaggaggaggacgaggaggaggtcgccgccgccatggcgtccatcaagtacgagcccgagaccagcgagagctccgagtcgaacgccctcccggacttctcctggcagggcatgtcggcctccgacgagttcgccgtcgccgcggcggcgctgtcgctcgacagcgacgacgacctcgccaagaagcgtccgaggaccgagccggaggacaccaccgactccggctccggcgacgacaccgacgcgctgttcgacgcgctgctgttcgccgaccagtacaaccacttcaacggcggcgcctacgagtccctggacagcctgttcagcgccgacgccgtgcagaccaccgccgccgccgccgccgccgaccagggcatggggctctggagcttcgacgacggctgctgcctcgtcgacgtcgaggccagcttgtccttctag

SEQ ID NO: 11147 - DNA, 1216 bp, Oryza sativa
  Clone ID: TFbOSC101030j.C1.o28.gp
tttttgcatcaaaggcacagccaaaaagatcttttacgagaacgagaagcctcacataatttttcattaccgaaaggaaccaggacgaacacatgcttgcttggcaaaaccactcttctatgtacatgacatggtacaagatcgagtcacagggtcgccggagacgacggctagagcctagaaggacaagctggcctcgacgtcgacgaggcagcagccgtcgtcgaagctccagagccccatgccctggtcggcggcggcggcggcggcggtggtctgcacggcgtcggcgctgaacaggctgtccagggactcgtaggcgccgccgttgaagtggttgtactggtcggcgaacagcagcgcgtcgaacagcgcgtcggtgtcgtcgccggagccggagtcggtggtgtcctccggctcggtcctcggacgcttcttggcgaggtcgtcgtcgctgtcgagcgacagcgccgccgcggcgacggcgaactcgtcggaggccgacatgccctgccaggagaagtccgggagggcgttcgactcggagctctcgctggtctcgggctcgtacttgatggacgccatggcggcggcgacctcctcctcgtcctcctcctcgacgaggttgatgaccggggtcgccttgacggccggggcggcggcggcggtggcgcggccgcgcttgcgggtgtcaggggtggtagcggaagggaagttgagcttggccctgtccccgcggatggcgcgcgcggcgtcgtcgtaggcgagcgcggcggcctcggcgttggtgaaggtgccgagccagacgcggatgcccttgacggggtcgcggatctccgccgcccacttcccccacggccggcgccgcacgcccctgtactgcgccggcttcctgcgcctgctcgacgccgccgccgccgccttcttggcgcggaagacgaacggcttgtgctcggaggtcgcctcctcctcctccgcctcctccaccatcatctcctcgtcatcggagtcgttgtcgaagtcgcggaacgcggcctcgaagtcgtcggcgcgcgcgcccttcttcttggccttgttggcgtcgcccggccagacgtggcccgccgtgacgcgcctcgccgccggcgcgctcggtatgagctccgcaaggatcgctccgccgcacatctttggttgctgcttttcttttgcttttgggtgttgggttgtgaacttg

SEQ ID NO: 11148 - DNA, 2124 bp, Oryza sativa
  Clone ID: TFbOSC17489j.C1.o1.fg
gttacaacatcaagcatgatagagcacatgaaaaaccttctcaaaataccaggatcaaaggtcctgtttggtggtgaacctctggagaaccattctatcccagaaatatatggtgccttcaaaccaactgctgtatttgttcctctatcggaaatccttaaaagtggcaattttgagcttgtgacaagggagatctttggtcctttccaggtggttacagagtattctgatgatgagcttgaattagtattagaagcctgtgaaaggatgaacgctcatctgacggctgcagttgtttcaaacgaccctttattcctgcaggaagtacttgggcgatcagttaacgggacaacatatgccggcatccgagcaaggacaactggtgctccacagaaccactggtttgggcctgctggtgatccaagaggtgcagggatcggaactccagaagccattaaactcgtttgcgatccaaacttcaatggctctaattggatcggcattcctgtccatgacacgaactctggtgagcccagacataatgagaactctgtccatggcgcgctcagactgcagatgagacccctgtatgacaccgcaaaatatgctgacaataaacaggtgacaaactctgtcgccagccaatgcaaccagtacataaacacacctgcagtcattcagatagctacatgctacattggaggccaagaaccaagttacatcatgatggtgaagaatgagattgaaaactactcaggatcatctccagcaatgatcatcaatgcgctggaaggcggcgccgaggcgggcccggttgtcaggaggagaaggagggagccgtctttgctcgcaccgatcaatggtgatggtgacaccaatggtggtggcattggcaagtcgtccttgtcaggcatcactgtcaagaggagctctaggtttcgtggagttagcagattcagagcttgtagagatgacaagaagatgttgtcatgtaggcatcggtggacaggtcgtttcgaagcacatttgtgggacaagaactcgtggaatcctacacagaggaagaagggcaagcaggtctatcttggagcatatgatgaggaggaggcagcagcaagggcttatgaccttgctgctctcaagtactggggaccaactacctatacaaattttccggtaatggactatgaaaaggagttgaagataatggagaatcttactaaggaagagtatcttgcatctctaaggaggaagagcagtggcttctcaagaggtgtgtccaagtacagaggggttgcgaggcatcatcaaaatggaagatgggaagcaagaattgggcgtgttttcggaaacaagtacctctacctaggaacctacagtgagtacaagaacagtgcttatactctattctacattgtgaattggtattccaatgcatccaaaacttcacatcttaacatcggcccatctgccattcttcctaaatctttttctccaggcactcaagaagaggctgcccgtgcctacgacatcgccgcgatcgagtacaaaggcgtaaacgccgtcacgaacttcgacctcagatcatacatcacatggctgaagccaacccctgctcatgttgccatgaaccctgcagaagctcttgcaatgcagatccctgtagatcacttcctcccaatggaaacccagatgatgatgctccctcagagcaatcctttcacctcatatcacaatgcacaatcactgggtggtggtgacggtggcagtagcagtactaataatcaagaagcctccatgataatctctcccagtggctcatctagaaagagatcatcatccactgctcttagccttcttctgaaatcgtcgatgttcaggcagctggttgagaagaattcagatgcaggtgaagaaaatggaggtgagatgagagagccgggtgcccatccaggagaaggatatgaataccacaacttcttccagggagatgctgctccggacatggacatgtgtgatctgctttcatcaggaaatgtgcatgctgcaagtggtagtgctggatttgaagaggacatcgcatgttatagtggttttggaagcatgcagtcgctgcagcaatag

SEQ ID NO: 11149 - DNA, 2022 bp, Oryza sativa
  Clone ID: TFbOSC417300j.C1.o3.gp
ttttaacaacgacgctaaataataataatagtagtagtagaggtaattcacattacaagttcttataacacgctaataatattacaagacataataataataataatgctactactactgtttacaacctgtaagatcagcagtagaaggtaataacagactttagaagagcaatggacgccacggccggagtaaccgaccagtgaccggccaccggagacgcacgccggacacaaaaacgccggctgccggtagcatcggcgtctccggttgaggaagaacaccaaccaaccctagcatctacagaggaaacaagtccggagagagatcgatctacgtacacaaacgaaccaaaccaaaaggattagggactataaaactgctaatccatgcccgtccgtgcggtgcagaatgtctaaaatcccatctgcacggcggcggcggcggcgacgattaggctaacgacggcgtgagtactagccaagaagtggtggtggtgttaattggcggcgaggagggagtcccagtcgatctcgtaggacgggtacttggtgagggcgaaggcggcggcctcgtcccacggcgcctcgctgaagtcgagctgctgcatctccggcacggtcgccggcgtctcggccgtggtggcggcggaggacggcgacagggagggcgacgagtcggcggactccaggcaggacgacgcgtcgtcggaggacggcgacgagcagttgctggtgggcgcggaggatgttgcggcggcggaggcggagacagaggacttcttggcgttcttggcggcggcgatgttctggcagagcgtctggagcttggcgtcgacggaggcgtggagcgggccgcgggaggcggcgttgtcggggaagttgagccgcgccgcgtcgccgcggaggcggtacgccgcctggtcgtaggcaagcgccgcctcctcggctgtgtcgaaggtgccgagccagagccgcgtgcggttccgcgggaggcggatctccgccacccacttcccccagtgccgctgccgcacgccgcggtacagcttctgcggccgcggcggcgtcgccgccgcccccgccgccgaagccgacgacgacgacgccttcatcggctgcgcgcgcgggccgagcgggccggcctgcgccgcctgccgctggaggtggaggcgggcctggatgtagtgcatctgggccgggctgagctctggctgctgggccagcccgccaccgtacgcgaacgcgtgcgggaaggagaatggcgaggtgggactaaactgggaacaaaccggaggcgagccggaggcatctcggataaaaggctcgagtgctctcatcagctcctcccctgacagatctatagctgcagccatctactcactcttttttttgggatttttttttctgatactaaaacagtagtaacaaagatttgcctggttccgaatccaaaatcaagaacaggcaggaaggagggagaaatcgacagccacagtaaaaaaacagatggctttttggtggtagatctagcaagtgaggtgtggaaaaagaacccctcttggctaccaacctaacactagaacacaaagaagatgaaagaaaaacagcagatctgggagccctggatctaaaaggccctgggtctctcgctctctgcaagcaacctaaccaagaaaccgtagaagaacaggtgggggagccagaggaggaagaagaagaagagggtttcgagaaaactttaccttgaagacgctcgaagtcgctcagatctaaagcttttcttacctcgctcgagctcacggtggctgtgggtgttcgtgggcttggagatggtggcggcggcggtgggaggatggctgtggatctgggtgtgtgtgtgggcgaaagtgggaatggtgggcggggaggtgtgagggacgccattggagctcttttatagcaaagctctccagctccaaagaccattaccggttaatcccctcccttaattagtaatttccctcgtcttatcgccccggat

SEQ ID NO: 11150 - DNA, 876 bp, Oryza sativa
  Clone ID: TFbOSC417300j.C1.o4.fg
atggctgcagctatagatctgtcaggggaggagctgatgagagcactcgagccttttatccgagatgcctccggctcgcctccggtttgttcccagtttagtcccacctcgccattctccttcccgcacgcgttcgcgtacggtggcgggctggcccagcagccagagctcagcccggcccagatgcactacatccaggcccgcctccacctccagcggcaggcggcgcaggccggcccgctcggcccgcgcgcgcagccgatgaaggcgtcgtcgtcgtcggcttcggcggcgggggcggcggcgacgccgccgcggccgcagaagctgtaccgcggcgtgcggcagcggcactgggggaagtgggtggcggagatccgcctcccgcggaaccgcacgcggctctggctcggcaccttcgacacagccgaggaggcggcgcttgcctacgaccaggcggcgtaccgcctccgcggcgacgcggcgcggctcaacttccccgacaacgccgcctcccgcggcccgctccacgcctccgtcgacgccaagctccagacgctctgccagaacatcgccgccgccaagaacgccaagaagtcctctgtctccgcctccgccgccgcaacatcctccgcgcccaccagcaactgctcgtcgccgtcctccgacgacgcgtcgtcctgcctggagtccgccgactcgtcgccctccctgtcgccgtcctccgccgccaccacggccgagacgccggcgaccgtgccggagatgcagcagctcgacttcagcgaggcgccgtgggacgaggccgccgccttcgccctcaccaagtacccgtcctacgagatcgactgggactccctcctcgccgccaattaa

SEQ ID NO: 11151 - DNA, 1464 bp, Oryza sativa
  Clone ID: TFbOSC400651j.C1.o26.fg
atggcgaagagatcgtctcctgatcccgcatcatcttctccatctgcatcatcctcgccgtcgtctccttcctcctcttcctccgaggattcctcttcgcccatgtcgatgccctgcaagaggagggcgaggccgaggacggacaagagcaccggcaaggccaagaggcccaagaaggagagcaaggaggtggttgatccttcttccaatggcggtggcggcggcggcggcggcaagaggagttctatctacaggggagtcaccaggcatcggtggactggcagatttgaggcccatctgtgggacaagaattgctccacttcacttcagaacaagaagaaagggaggcaaggggcttatgatagtgaagaggcagctgctcgtgcatatgaccttgcagctcttaagtactggggtcctgagacagtgctcaatttcccactggaggaatatgagaaggagaggtcggagatggagggtgtgtcgagggaggagtacctggcctccctccgccgccggagcagcggtttctccaggggtgtctccaagtacagaggcgttgccaggcatcaccacaatgggcggtgggaggcacggatagggcgggtcctggggaacaagtacctctacctgggtactttcgatattttgtacaatctatcacaaaactacagatttaagaacttgttttacaaaaatacagattcagtggcttcgtttatcacaaaactacagatcaaagaccatgagaccaagataccatcctatactcaagaggaggcagccaaggcctatgatcttgctgcaattgaataccgaggtgccaatgcggtaaccaacttcgacatcagctgctacctggaccagccacagttactggcacagctgcaacaggaaccacagttactggcacaactgcaacaagagctacaggtggtgccagcattacatgaagagcctcaagatgatgaccgaagtgagaatgcagtccaagagctcagttccagtgaagcaaatacatcaagtgacaacaatgagccacttgcagccgatgacagcgctgaatgcatgaatgaaccccttccaattgttgatggcattgaagaaagcctctggagcccttgcttggattatgaattggatacaatgcctggggcttacttcagcaactcgatgaatttcagtgaatggttcaatgatgaggctttcgaaggcggcatggagtacctatttgaagggtgctccagtataactgaaggcggcaacagcatggataactcaggtgtgacagaatacaatttgtttgaggaatgcaatatgttggagaaggacatttcagattttttagacaaggacatttcagattttttagataaggacatttcaatttcagatagggagcgaatatctcctcaagcaaacaatatctcctgccctcaaaaaatgatcagtgtgtgcaactga

SEQ ID NO: 11152 - DNA, 660 bp, Oryza sativa
  Clone ID: TFbOSC401719j.C1.o17.fg
atggacaccgaggacacgtcgtcggcttcgtcctcgtcggtgtcgccgccgtcgtcgccgggcggcgggcaccaccaccggctgccgccgaagcggcgggcggggcggaagaaattccgggagacgcggcacccggtgtaccgcggcgtgcgcgcgcgggcgggggggagcaggtgggtgtgcgaggtgcgcgagccgcaggcgcaggcgcgcatctggctcggcacctacccgacgccggagatggcggcgcgcgcgcacgacgtcgcggccatcgccctccgcggcgagcgcggcgccgagctcaacttcccggactccccctccacgctcccgcgcgcgcgcacggcgtcgcccgaggacatccgcctcgccgccgcgcaggccgccgagctgtaccgccgcccgccgccgccgctggcattgccggaggatccgcaggaaggcacgagcggcggcggcgccaccgccacctcggggcgtccggctgccgtgttcgtggacgaggacgccatcttcgacatgccggggctgatcgacgacatggcgagggggatgatgctgacgccgccggcgattgggagatctctcgacgactgggccgccatcgacgacgacgatgaccattaccacatggactacaagctatggatggactga

SEQ ID NO: 11153 - DNA, 594 bp, Oryza sativa
  Clone ID: TFbOSC101807j.C1.o6.fg
atggagaagaagtacaagggtgtgcggcggcggaagtgggggaagtgggtgtcggagatccggctgcccaatagccgcgaccgcatctggctgggctcctacgactcgccggagaaggcggcgcgggcgttcgacgccgccttcgtcacgctccgcggccacggcgccgccggcgccgacctcaacttcccggactcgccgccgtcgtgcgacgcccgcagcagcgacccgcggcaggtgcaggccgccgcgctctcccacgccaaccgcgcccacgtcacgccgcagcaggcggccgcggcgctcatgtcgccgccctcgctgtcgccgccgccggggttcgccaccggcagcgaggtggtggcgcccgccgtgcgcgccgacggcagcatcgactggcgcccggtcatggcgcacccgccgccgctgtactcgccgcccggctggggcggcggccatgcctacgacttcttgcagccgccgccgccgtcgccgccgttgccgtcgtgcgacgacgacatggtcgacgtcgtagatgagagcagcgcttcgctttggagctttgacacgcgagactcctacttccgatactaa

SEQ ID NO: 11154 - DNA, 1869 bp, Oryza sativa
  Clone ID: TFbOSC404117j.C1.o14.fg
atggcttctgcagataactggctaggcttctcgctctccggccaaggcaacccacagcatcaccagaacggctcgccgtctgccgccggcgacgccgccatcgacatctccggctcaggcgacttctatggtctgccaacgccggacgcacaccacatcggcatggcgggcgaagacgcgccctatggcgtcatggatgctttcaacagaggcacccatgaaacccaagattgggcgatgaggggtttggactacggcggcggctcctccgacctctcgatgctcgtcggctcgagcggcggcgggaggaggacggtggccggcgacggcgtcggcgaggcgccgaagctggagaacttcctcgacggcaactcattctccgacgtgcacggccaagccgccggcgggtacctctactccggaagcgctgtcggcggcgccggtggttacagtaacggcggatgcggcggcggaaccatagagctgtccatgatcaagacgtggctccggagcaaccagtcgcagcagcagccatcgccgccgcagcacgctgatcagggcatgagcaccgacgccagcgcgagcagctacgcgtgctccgacgtgctggtggggagctgcggcggcggcggcgccgggggcacggcgagctcgcatgggcagggcctggcgctgtcgatgagcacggggtcggtggccgccgccggagggggcggcgccgtcgtcgcggccgagagctcgtcgtcggagaacaagcgggtggattcgccgggcggcgccgtggacggcgccgtcccgaggaaatccatcgacaccttcgggcaaaggacgtctatataccgaggcatagatggacaggaagatatgaagctcatctgtgggataatagctgtaggagagaaggccaaagtcgcaaggggagacaggatgagtaattatgaaaaggagctagaggaaatgaaacacatgaccaggcaggagtacattgcacatcttagaaggaatagcagtggattttctcgtggtgcatccaaatatcgtggtgttactaggcatcatcagcatgggagatggcaggcaaggatagggcgagttgcaggcaacaaggatatctacctaggcaccttcagcaccgaggaggaggccgccgaggcgtacgacatcgccgccatcaagttccgcgggctcaacgccgtcaccaacttcgacatgagccggtacgacgtcaagagcatcctggacagcagcacgctgccggtcggcggcgcggcgcggcggctcaaggaggcggaggtcgccgccgccgccgcgggcggcggcgtgatcgtctcccacctggccgacggcggtgtgggtgggtactactacgggtgcggcccgaccatcgcgttcggcggcggcggccagcagccggcgccgctcgccgtgcactacccgtcgtacggccaggccagcgggtggtgcaagccggagcaggacgcggtgatcgcggccgggcactgcgcgacggacctccagcacctgcacctcgggagcggcggcgccgccgccacccacaacttcttccagcagccggcgtcaagctcggccgtctacggcaacggcggcggcggcggcggcaacgcgttcatgatgccgatgggcgccgtggtggccgccgccgatcacggcgggcagagcagcgcctacggcggtggcgacgagagcgggaggctcgtcgtggggtacgacggcgtcgtcgacccgtacgcggccatgagaagcgcgtacgagctctcgcagggctcgtcgtcgtcgtcggtgagcgtcgcgaaggcggcgaacgggtacccggacaactggagctcgccgttcaacggcatgggatga

SEQ ID NO: 11155 - DNA, 1029 bp, Oryza sativa
  Clone ID: TFbOSC401545j.C1.o27.fg
atggtggaagttatcgtggagaagaaggcgcgaaggattgtgagggggaggtggcatgtggaggcgagcaacgaagcggcggcggcggcgccggctgttgccgcgcccgcgcccagggttgttcgggttctctgcagagaccacgacgccacggactcctccggcgacgacgatggcgaggacgacgcgccgcggcgtgctcgcctcctcgtgcacgagatccacgtcgcgcggcagccggtggccatgtcgccagcggcggcgagctccagccagagacgtcgtgtcggcccgatgaagaggacggaatcggcggtggatgcgacgatggacgcgacggcggcggcgccggagaggaagttccgcggggtgaggaagcggccgtgggggaagtacggggcggagatccgcgtgtcgcagcagagcgcgcgcgtgtggctcggcacgttcgacaccgccgaggaggccgcgcgggtgtacgaccacgccgccctccgcctgcgcgggccgtccgccacgaccaacttccccatgacgccagcggcgccgtcgcctcctccctcgcgcgccacctacgccggcgcggcgtccgggtacgacgagtccagcgacgagtcgcagctcgtcggctcgccggtctccgtgctccgcccaatgccggcgcgcgcaacggccaagaaagaggccaaggaagaagacgactccgcccccgatatcctcggcatctccgccggcgacggcttaatctccccgttcacctgcgacgtcctgaatttcccaccgcccgacgaggacatgttcggcggcggcatctccttcggcgagccgacaccgccacccatggtgttcgacgacgactgcatggcgcgcctcggccacgcccccaacgacgacgagcacccggtgacgagctcgtccttcctcgacggcgatctcggcgacctgccgtcgtggacggaggtggacggcttcttcagcgacgtcggcggcgacgacctgttcgccgccgagccgttcccggcgctctga

SEQ ID NO: 11156 - DNA, 808 bp, Oryza sativa
  Clone ID: TFbOSC401249j.C1.o62.gp
tttgattttgaaactcaagagggccattccttgtcaattatcgcgtaaagaatagtggtacagactattgtcgagtcgaatacaagcatctaattgggaaaagatgacgagcagtagaatcgtcttctccggttgcttcgattcggtgtggattcctatcagagccgcaggtccgtgcacaggtcgacgtggtcccggtccagcggcggcgggaggttgaggtcgaacgccgccacgcgggaccgaacggtggaggcgtcgtcggcgtcgtccacgacggaggccgacgaggcgcagtcgctgtggcagccggcgtcgggcgccggtggcgcgggccgcgggacccgcctccggggcaccgccgccgccgtggccgccggtctgggcccgcgaggcccgctcgaggactcgacggtggagctcgcgctgcacgcggggccggccaccggcggcgccgccgccgccgccttcccggggaggtggtagtggggcgacgggagcgggagggaggagacgagcgggaagttggttctggcgagcgggccgcggaggttccgcgcggcgacgtcgtaggcccgcgccgcggcctcggcggagtcgtaggtgccgagccacacgcgcgcccgcttcgccgggtcccggatctccgccgcgaacctcccccacggccgcttcctcacccccctgtacctcggcgccgccgcctcgcacatgacctctccccccaccatctccacaaatcaacaaacacctcctcggcgcggagctgcaacgcgagaaggcttgagctgatgaactgctgggttga

SEQ ID NO: 11157 - DNA, 573 bp, Oryza sativa
  Clone ID: TFbOSC401249j.C1.o42.fg
atggtggggggagaggtcatgtgcgaggcggcggcgccgaggtacaggggggtgaggaagcggccgtgggggaggttcgcggcggagatccgggacccggcgaagcgggcgcgcgtgtggctcggcacctacgactccgccgaggccgcggcgcgggcctacgacgtcgccgcgcggaacctccgcggcccgctcgccagaaccaacttcccgctcgtctcctccctcccgctcccgtcgccccactaccacctccccgggaaggcggcggcggcggcgccgccggtggccggccccgcgtgcagcgcgagctccaccgtcgagtcctcgagcgggcctcgcgggcccagaccggcggccacggcggcggcggtgccccggaggcgggtcccgcggcccgcgccaccggcgcccgacgccggctgccacagcgactgcgcctcgtcggcctccgtcgtggacgacgccgacgacgcctccaccgttcggtcccgcgtggcggcgttcgacctcaacctcccgccgccgctggaccgggaccacgtcgacctgtgcacggacctgcggctctga

SEQ ID NO: 11158 - DNA, 732 bp, Oryza sativa
  Clone ID: TFbOSC401517j.C1.o1.fg
atggatcatattggaattagcggcggcggcgagggcggggtggtgtctccggcgcagccgtcgtcgccggagcggcggtacaagggcgtgcggctgcggaagtgggggcggtgggtgtcggagatccggatgcccaacagccgggagaggatatggctgggctcgtacgagtccgccgagaaggcggcgcgggcgttcgacgccgccgccgtctgcctccgcggctcgcgcggcgccggctcgctcaacttcccggagtccccccctcccgacgtccgccgccgcttccccggcgcggctctcacggtcgagcagatccaggccgaggcggcgaggcacgccaaccgcccgtttccggcgaacaccgccgccgccggcgggtcgtcgtcgtcgtactcgatctcgcagcggcaagaagcagcagcccctgcgcggtcgacgagcaacgacgacacggccatgtcgtcagtgccctccaccgacggcggcgctgccgactacgacggcggtgatgatgtcattgactggtcattcatggacacgttgccggcgatgtcgtcgtcagcggctagtaccaatgctgatctggtcccggccatggatgatttcatgtacgggttcttgcacacaatgccgccatcgccatgcgaagacggtggggaggatgtgatgatcgacggcaattgcaacatggatcagacatttttctcagtagatctttggagattttga

SEQ ID NO: 11159 - DNA, 1590 bp, Oryza sativa
  Clone ID: TFbOSC410095j.C1.o16.fg
atggacatgaacagtggttggcttggcttctccttgtcttcttcctcggcgaggggttatggagacggctgtggtgagggaaatggaggtggagatggagatggctcgtgctcgtcgcctgttgcagcttcacctctcgtggctatgccgttgcactctgatggatctgtgcactatgatgctccagattggaggcatgcagaggccaaagaccccaagcttgaggacttcatgagcgtcagctacagcaacaaaagcagcagcaacctgtacggcagcagcagcagcagcagctgcggccacgccgaccagatcaaataccatcatgtccatgacgtccaagctttctcgacgccgtacttctacggccatggcggcagcggcgttggcatcgacatcaacatgaatgcgccaccggcaggctgcacaggcgtcctgccggaccaccgaccacctccgccgcagcaagaccatatcttcctgcctccccatggccagtacttcctgggcccaccgaacccaatggcgccggcgccgatgtacaacgccggcggcggcggcggcggcgtcgtcgacggatccatgtcgatctccggcatcaagtcgtggctccggcaggcaatgtacgtgccggaacggtcagcggcggcgctgtcgctctccgtgccggccgctcccccgagcgaggcgccgctgccgccggcggcgatgccggtggtccgcaagcccgctcagacgttcgggcagaggacgtcacagttccgtggcgtcaccagacatagatggactggaagatacgaggctcacttgtgggacaacacttgcaggaaggaaggccagaccaggaaaggaaggcaaggtggctatgacaaggaggagaaggctgcaagggcttatgatttggcagcactcaagtactggggtccaacaactcacataaattttccattgagcacttatgagaaggagctggaggagatgaagcacatgacaaggcaggagttcattgcccacttaagaaggcatcaccagcacgggagatggcaggcaaggattggaagggtcgcagggaacaaggacctgtatctcggcaccttcagcacgcaggaggaagcggcggaggcgtacgacatagcggcgatcaagttccgcggcctgaacgccgtgaccaacttcgacatcagcaagtacgacgtgaagcgcatctgctccagcacccacctcatcggcggcgacctcgcgtgccgccgctccccgacgcgcatgctaccaccggacgctccggccggcgccgccggcgtcgacgtcgtcgtggcgccgggcgaccaccagcagatcagcgccggtggcggcggcgcgtccgacaactcggacaccgcctccgacggccaccgcggcgcgcacctgctgcacggcctgcagtacgcgcacgccatgaagttcgaggccggcgagagcagcggcggcggcggcggagacggcgccaccaccaactggatggccgccgccgccgccgcggcgcgcccggtcgccggcatcccgaccaccgtgcaccaccagctcccggtgttcgcgctgtggaacgactga

SEQ ID NO: 11160 - DNA, 888 bp, Oryza sativa
  Clone ID: TFbOSC900276j.C1.o5.gp
tttgattttgaaactcaagagggccattccttgtcaattatcgcgtaaagaatagtggtacagactattgtcgagtcgaatacaagcatctaattgggaaaagatgacgagcagtagaatcgtcttctccggttgcttcgattcggtgtggattcctatcagagccgcaggtccgtgcacaggtcgacgtggtcccggtccagcggcggcgggaggttgaggtcgaacgccgccacgcgggaccgaacggtggaggcgtcgtcggcgtcgtccacgacggaggccgacgaggcgcagtcgctgtggcagccggcgtcgggcgccggtggcgcgggccgcgggacccgcctccggggcaccgccgccgccgtggccgccggtctgggcccgcgaggcccgctcgaggactcgacggtggagctcgcgctgcacgcggggccggccaccggcggcgccgccgccgccgccttcccggggaggtggtagtggggcgacgggagcgggagggaggagacgagcgggaagttggttctggcgagcgggccgcggaggttccgcgcggcgacgtcgtaggccgcgccgcggcctcggcggagtcgtaggtgccgagccacacgcgcgcccgttcgccgggtcccggatctccgccgcgaacctcccccacggccgcttcctcacccccctgtacctcggcgccgccgcctcgcacatgacctctccccccaccatctccacaaatcaacaaacacctcctcggcgcggcgctgcaacgcgagaaggcttgagctggtgcgctgctgggttgagctgagacgcggcggatttggctacggggagaagagggggtgaagggggtagaagaaggaggagggcgtcgcgtatgggagg

SEQ ID NO: 11161 - DNA, 3123 bp, Oryza sativa
  Clone ID: TFbOSC414535j.C1.o7.gm
atggaggacaaccggagcaaggacacggcgaccaagtaccgcggcgtgaggaggcggccgtggggcaagttcgcggcggagatccgcgacccggagcgcggcggggcgcgcgtctggctcggcaccttcgacaccgccgaggaggcggcgcgtgcctacgaccgcgcggcctacgcccagcgcggcgccgccgccgtgctcaacttcccggccgccgccgccgccggcaggggtggaggagccggcggcgccgcttccgggtcgtcgtcgtcgtcgtccgcgcagcgcggcaggggcgacaagatcgagttcgagtacctcgacgacaaggtgctcgacgatctcctcgacgacgagaagtaccgtgcgagcgcgcagagagggacgagacgggaaggccggcggggctgccggcgctggggaggacaggagccccgtcctcgccggtggcggcgactgcctctccccgcgcggagccacggaccccgtgtcgactgccccttccgatgcctcaccaccggcctccgtttgggtctcctccgacctctccgcgccctcagcagcgtgtcccgctccagcacccgcaactgcgctcctcctcgttgcctcttgaaaccatggagactcaccgcccatcctatccgcttcgcctcctccgccacggtcgagctcccccgtttccatcccctctactccatcaccgccgcttctttctacgacgacggtggcttgaagacctcagaggcgaaggagatgcccctctacgttcttggcgatcgtctggtcgaggtgtatatgcacatgaccaacgctaaggagttgtgggatgcactgaatactaaattcggtgctactgatgctagcaatgatctgtacatcatggagcagtttcatgactacaggatggctgacaaccgttctgtagtcgaacaggctcatgagatacaaatcatggctaatgccaatgttgtgcacaaggcccagaacaagtgcaaggggaaatacaaagctcaacagaccaccaacttcaagaagcagaagaagaagaacaacaaacctaatcaggatgagaggacttgctttgtgtgtggccaacctggtcatctggctaggaagtgtccacagcgcaaggggatgaaagcaccagcagggcagacttctaagtctgctaatgtgaccattggcaatactggagatggaagcgggtatggtaatttacctactgttgcacggggttccaccgtcctaatgggaaatgggtcacatgcttctgctcatggtgttggcacggtagatctgaagtttacttcgggaaagatcgtgcagctgaagaacgtgcagcatgtcccttctatcgacaggaatcttgttagtggctcctgtctgactagagacggatttaagttggtttttgagtctaataaagtagtcgtgtctaaacatggatattttattggtaaaggttatggtgaagctcctcgaaggagtaagagacaaaggatggctaagtcctttggtgatgatttcattgtgtacctcgtggatgacactcctaagtcaatttcagaagcatatgcatctcctgatgcagactactggaagaaggctgtccgtagtgaaatggattccattatcactaacgggacttgggaggtgacagagcgaccctatgggtgtaaacctgtggggtgcaagtgggtgttcaagaagaagcttaggcctgacgcctcacatggtcttctcgttcatcaaatggacgttaagacagcttttcttaatggagagctggatgagaagatctatatggatcaacctgatgcgtttgtagttgaaggctttgcagtcaatgaggtagataaatgtgtgtattatcgctatggtgggggtgagggagttattccgtgcttgtatgttgatgacatactgatatttgggacaaatcttagggtgataaatgagaactttcttgaaagaactcacctctgtgagcttgattgttggtcgcagtctatgaagattttggactactccatcctgctcgctggcgtgcaccggcgatcgggagagcaggtctccggaacctctgccttcgacgtcttgcatcgggagaaggcggcaataatgtttttggaaagcgcttcacgtgactgctccctgttcatccgcgacggctcgtcttcctctcctttcgcgtgctgcgcgctttcgtcgacgcccgcaaccgcgagtagttcctgccgtgtaaccggtctttccgccacctcgcgtctcagcgcccgccgcccactcgcccgagccctcgactccacgccgccagccgccaactgtcgagacctcaactccgcgccgcttcgccggtgcccggcgccgtcccggctggccgcgcctgcggccagtgccgccaccaccgtcccctccccttcccgcgccgcgaggccgcaactccagcactccgcgtctccgcgccggcgccggcgctgccactgccgtccgcgccgtcccctcccctcctctgcgccagcgccgcgcgtcctctcctccggcctccccgccgtccgtgccgagttgccgacgtcgcgccgtgccaccgtcccctcccctcccttgcttagcccagataatgatattgtgtcgttatttcggaaacatgaagctaagaagattgcaacctcttctagctcttcgaatggcttcattggtgatgaagctcctgtacctgaagaagaaccaccacaagctccaacaattgatgatgaagctcctgtgcccgaagtcaatgcacctcattatcctatttatgatgttaatcgtcttgaaagtgatccaggcctaagacttccaatttcgagctatccggccaatgaccaagattctgttcggagagcatatattctcaagggcccttggcaaaagagcagcttgcgcgcgtgccaactagcaaccccccaagtcgccagcctccttgcctcctccctccccgccccacctccactcgccggcctctgccgattccacctccgccgtgcttccgctctcgctcgctggcctgccagcgcccgtgacagccgcatctgcggaacaaggggaaaaggggagaaggagaaggaggattggagcagatag

SEQ ID NO: 11162 - DNA, 570 bp, Oryza sativa
  Clone ID: TFbOSC1014j.C1.o1.fg
atggcgaagagatcgtctcctgatcccgcatcatcttctccatctgcatcatcctcgccgtcgtctccttcctcctcttcctccgaggattcctcttcgcccatgtcgatgccctgcaagaggagggcgaggccgaggacggacaagagcaccggcaaggccaagaggcccaagaaggagagcaaggaggtggttgatccttcttccaatggcggtggcggcggcggcggcggcaagaggagttctatctacaggggagtcaccaggcatcggtggactggcagatttgaggcccatctgtgggacaagaattgctccacttcacttcagaacaagaagaaagggaggcaaggggcttatgatagtgaagaggcagctgctcgtgcatatgaccttgcagctcttaagtactggggtcctgagacagtgctcaatttcccactggaggaatatgagaaggagaggtcggagatggagggtgtgtcgagggaggagtacctggcctccctccgccgccggagcagcggtttctccaggggtgtctccaagtacagaggcgttgccaggtag

SEQ ID NO: 11163 - DNA, 731 bp, Oryza sativa
  Clone ID: TFbOSC414122j.C1.o5.fg
atggcggccatagatttgtacaagtatcagctgagctcctcgtcctcgtcttcttcctcggatcaggagctcatgaaagcgctcgaaccttttatcaggagcgcttcacccacctccacctccacctccacgccattgttctactcctctagctccatctccaccaccaccaccactcccttctcctactcgtctccattgccgcaagaatcgtactacctccctgcttcttcgtcctacgccgccattgttccacctccgacgacgacgacgaacaccaccacctccttctcggagctccctcccctgcctccctcctcctcgtcgttcgcctcgccggcgaatgctgcggcggtggggctggctcaccttggcccggagcagatccagcagattcaggtgcagttcttgatgcagcagcagctgcagcagcgggggatggcggcgtcggcgtcggcgtcggcggcggcgtcgtaccttggcccgcgggcgcagcccatgaagcaggccggggcggcggcggcggcggcggccggcggcaagatgtaccgcggcgtgcggcagcggcactgggggaagtgggtggcggagatccggctgccgaagaaccggacgcggctgtggctgggcacgttcgacaccgccgaggacgcggcgctcgcctacgacaaggaggcgctccgccttcggggagactacgtgctccttacttccgcactcttcgccttggg

SEQ ID NO: 11164 - DNA, 1188 bp, Oryza sativa
  Clone ID: TFbOSC900238j.C1.o1.fg
atggagccaaactacagcgactaccaccccaacagtgtccccttcgatgcctactacgagcacggccatggccatctcgacgatcatggccatggccaccaccacctgatccctgcccatcctgagccctcctactcctacggcaactggtccttcctccatgccgatgccaccgcaacgtcctcctccgagtcgtcgtcggcgtccgccagctccggcgcggcgcacattgttggcgcctccggtccttctgcatccttcgtgcggcagcttcatttcggcggcgagtactacgacgacgacgcggcggacatcagcgccctcatggaagccgcctccatctcctgctggacgacgaacggtggtgccggtgcgtcaacgtcgcaaaccacaggcttggagggggtggaggtgatgaggagagcggcggccccggcgccggacaacggatcaagtgacaaggaggaggcggcgcggccgctgatcggggtgcggaagcggccgtggggcaagtacgcggcggagatccgggactccacgcgcaacggcgcgcgggtgtggctgggcaccttcaacacccccgagcaagcggcgctggcgtacgaccaggccgccctctcggtgcgcggccccggcgcggtgctcaactacccgctccaccgcgtgcgggagtcgctgcgcacgctcgagctcggcgccgccgccgccgcctcggagtcccccgtgctcacgctcaaacggcgccaccgcatccggaagcgctccacgaccaagaaggcgctggcgggcaaggaggccgacgaggcacccgccacgacgtcgtcggaggggaagaagaagcggcaggtcaacaccaccagccatagtcatgacggcgcatggcgccgacacctcctctcctccgggcggctctcgatggaggggtcgacggcggctggcgggcacggcgggctcgcgggaggacgtggggaggcagccgggagcaacgtgcgtgcggccgacgacgacgaggacggcgaggcggcggccgggagcagtgtgcacgtggctaacgacgatgacgacggcagcgaggcggcggccgtgagcagcatgcacgcggccgataatgacgacgaggcggtagccggaagtggcgtgcgcatgacgacgacgacggcggcaaggaggcggtcgggagcgggctga

SEQ ID NO: 11165 - DNA, 1530 bp, Oryza sativa
  Clone ID: TFbOSC400090j.C1.o33.fg
atggagttggatctgaacaacgtggcggaaggggtggtggagaagcatgagacggcggcgaggagcgactccggcacgtcggagtcgtcggtgctcaacggggaggcgtctggcgcggccatcgcgccggcggaagaggggtcgagctcgacgccgccgtcgccgccgccgcctcccgcggcggtgctcgagttcagcatcctgaggagctcggcgtcggcgtcgggcgagaacgacgccgacgacgacgaggaggaggaggccaccccctcgccgccgccgcaccaccaacaccagcagctgctcgtcacccgggagctattcccttccgccgctccctcgccgcagcattgggcggagctcggcttcctccgccccgacccaccgcgcccacacccagacatcagaatcctcgcccacgcgcctcccccggcgccaccgccgccgccgccgcagccgcagcctcaggcggccaagaaaagccgccgcgggccgcgctctcgcagctcgcaataccgcggcgtcaccttctaccgccgcaccggccgctgggaatcccacatctgggattgcggcaagcaagtctacctaggtaatttcatcgaacacatcatcttcctcctctcaatccaacgcgacatcgccatgaacaatctaacaaacaccttcatcttctcccaaacaatcacaggtggattcgacactgctcacgcagctgcaagggcgtacgacagggcggcgatcaagttcaggggagtagaggctgacatcaacttcaacctgagcgactacgaggaggacatgaggcagatgaagagcttgtccaaggaggagttcgtgcacgttctccggcgacagagcaccggcttctcccgcggcagctcaaagtacaggggtgtcaccctccacaagtgcggccgctgggaggctcgcatgggccaattccttggcaagaaggcttatgataaggctgcgatcaaatgcaatggcagagaagccgtcaccaacttcgagcccagcacatatgatggtgagctgcctactgatgctgctgctcaaggagccgatgtggatctgaacctgagaatatctcagcctgcagcctcacagcagagccccaagagggatagcggctcccttggcctgcaaatccaccatggatcatttgaagctccctctgaacttgctagccgccctcatcggttccctcttctgaccgagcatccgccaatctggactgcccaacctcatcccctattcccaaataatgaggatgcatccagatcatcggatcagaagaggaagccatcagagggggtagctgttccaagctgggcatggaagcagtttggtgccagctaccaagttgcttccagagcaaacactagggatggcaattgtgcccgtttgcccgtttacccgcgggtaaaaaccctattagggttgggtttgttctccattttatacccatgggtatcttattggttcaaaagctatgcccgatgggtaaatgggcatgggtatgggtaa

SEQ ID NO: 11166 - DNA, 1035 bp, Oryza sativa
  Clone ID: TFbOSC415507j.C1.o9.fg
atggacttcagcggcgacatcgatgacctgatctccctccagctcctccacgatcagctgctcggggtcgaggccgacgcgtgcctcccggtggcagttcatcacgatggcgtcgccgcgttcgccgagcatcagcagggtttccatcccgcggcgttcttgccgcagcagccgatgacgatgacaccggctgggtacgtggacatggcgaatgatcagtatttgggtgcgcatgccgccgctggcgaggcggaggcggtctaccgggcggcggcggcggagccggtgatgatacggttcggcggcgaggtgtccccggtgtcggacccccggaggccgcccctgacgatctcgctgcctccgacgtcgcacgcgtgggcggcggcggaggcggtgcacccggccgctctgctgcaggcgcagaccgcggccgcggccgccgacccgaacgacttccggaagtaccgcggcgtgcggcagcggccgtggggcaagttcgcggcggagatccgcgaccccaagaagcggggctcgcgcgtgtggctcggcacgtacgacacggccatcgaggcggcgcgcgcgtacgaccgcgccgccttccgcatgcgcggcgccaaggccatcctcaacttccccaacgaggtcggctcccgcggcgccgacttcctggcaccgccgccgccgcccccgccgccgacgacgtcgacccacggcaaacggaagcggcacgagacggcggcggccgacccggacgtcgaggtgatcggagaatcatccaaatccgtcaagaccgagacgtacacatcgccggcgtcgtcgtcgctggcctcaacgacaacctcaacggtgacatcatcatccacgtcgccttccccctcgtcggaggcagctgcctgcggcggcggcggcggcgagctgttcgtcccaccgatgccgtcgagctggtcgtgggatcagttggaggggttcttcggcatcctctcgccgctctcgccgcacccgcaaatgggattcccggaggtcgccgtaaactaa

SEQ ID NO: 11167 - DNA, 1281 bp, Oryza sativa
  Clone ID: TFbOSC401001j.C1.o62.fg
atggtctccatgaggaagaagaagaaggcctttgctgttgcagctgcaaccaccttgctttcccctcctcggtcctcctcctcctcctcctccacggcgtcctcctgcattgtgccgccgcgcactgagagcggcaagaagaagagtaagcacaggaagagggccaaggatggcaccggcggtgacgacgacgacgccgccgttgctgctgcgccgaggaagggatcctccatctacaagggcgtggcaaggcacaggggttcagggaagtacgaggcgcacctgtgggacaagcaaggctggaacccaaaccagacaaggaagagaggcaggcaaggagcttatgacacagaggaggctgcagctcgcacttatgatcttgcggcactcaagatctggggctcagaccatgtcctaaacttcccgattgacacgtacaggaaggagcttgagaggatgcagcgaatgacaagggaggagtacctggctactctgaggcgcaagagcagtggcttctccaggggtgtctccaagtacaggggagtggcaaagcatcaccacaacggccggtgggaggccaggataggccgagctgtaggcaagaaatacctctacctgggaacattcgatacccaggaggaggcagccacggcctacgacctggcggcgatacagctccgcggccgcagcgcggtcaccaacttcgacgccagctgctacacctacacggaccacctgccgccgccgccgccgccgcagccaccgtccgtctgcaagaccgagccggagctggagccgccgcagccggcggcgcctccaggctcggagtcacttctccggcccaagatggagccctgcgacgactgggagccgccggcgatttgcccgtcgctccgtgacgcggacgacgcggaccacgccatcgccgagatcctgccggcgctctgcatggaccgcgccgacttcgaggccaggtaccctgcccgccgcgcccgcgacgccgccgccgacggctggtcgacgtcgtcggacgacgtcgccgccgcctccgtcgacgatgacgtgctgcgtagcctgccagacgacgtgggcttcgtcgacgacgtcgagagcctcttcctggacgcgcccggcccggccgccgccgccgccgccgccgcgatgccagacgacgtggaacgcgcggtgcagcgcgcgccttctgccgcgtctcgtcgggccaacgccgcggcggtctcctacgcgatcagctcgttggcgtccgggcgctggtggtattga

SEQ ID NO: 11168 - DNA, 822 bp, Oryza sativa
  Clone ID: TFbOSC413093j.C1.o2.fg
atggacgccagcctccgcacactgcctccggcgatcttccccggcgaggtccgctccgccgtctcctccctcctcctctctcccggcggcagcgccctcgacaccgtgttctcccacctcccgccgcccgtcaccatcccgccgctcggctccagcgtctactaccgccagagcgagctcctgcgccacttcgccgcgtcgcaggcggcgcaggcgcagagcgccaccgccgccgccagctcttcgtcggccgccgcggcgggtctcgacgatggcgcgccgcggaagctgtaccgcggcgtgcggcagcggcagtgggggaagtgggtggccgagatcaggctgccgcagaaccgggtgcgcgtgtggctcggcacctacgactcgccggagaccgccgcgcacgcctacgaccgcgccgcgttcaagctccgcggcgagtacgcgcgcctcaacttccccggcgtcatggacggccgcgactgccccgacaacctgcgccaactccgcgacgccgtcgacgccaagatccaggccatccgcgtccgcatggcgcgcaagcgcgcgcgcgcgcgccgccagcgcgaggagagcaagaagagccaacgcgccgaggacgcgaaggcggcgacgccgtctcgccccgtggcctccgagcgcgccgcgtccgagacgacgacgacgacaaccacgacgtcgtcgtcgtacgggtcaccggacggcgtgctctccatgagcgcggcgtccgtcgacggcgactgcccgctcgagcggatgccgtcgttcgatcccgagttgatctgggagatgcttaacttctag

SEQ ID NO: 11169 - DNA, 702 bp, Oryza sativa
  Clone ID: TFbOSC407922j.C1.o8.fg
atgcagggcgagtaccaccgctcctccagcgaggactcggctgcttctgctgctgctgctgcggcggcggcggctgcggctatggctcctctcgccgcggctgcggcggcggttgctgccaaggaggagcaggcggcggcggcggcggtgctgccgctgcagcagcagcagccgaggcggcagtaccgtggcgtgcggatgcggaagtggggcaagtgggtggcggagatccgggagccgcacaagcggacgcgcatctggctggggtcgtacgcgacgcccgtggcggcggcgcgcgcctacgacacggcggtgttctacctccgcgggcggtcggcgcggctcaacttccccgaggagatctcctcgctggcgtcgctgtccgagggcggcggcgcgagcgagccccgcgagcccgacggcggcacgctgtccgcggcctcgatccggaagaaggccatcgaggtcggctcccgcgtcgacgcgctccagaccggcatgatggtcgcgccgacgacccaccaccgcgagcggcagaagcaccaccaccaccaccaccaccaccacccgcacctgcagccgcacggcgaggagcaacaccaccaccacgagcagaagcaccagcggacggcgtggagcggccgcgccaagaacccggatctcaaccaggcgccaagcccggagaactccgacgccgagtag

SEQ ID NO: 11170 - DNA, 699 bp, Oryza sativa
  Clone ID: TFbOSC900281j.C1.o6.fg
atgcagggcgagtaccaccgctcctccagcgaggactcggctgcttctgctgctgctgctgcggcggcggcggctgcggctatggctcctctcgccgcggctgctgcggcggttgctgccaaggaggagcaggcggcggcggcggcggtgctgccgctgcagcagcagcagccgaggcggcagtaccgtggcgtgcggatgcggaagtggggcaagtgggtggcggagatccgggagccgcacaagcggacgcgcatctggctggggtcgtacgcgacgcccgtggcggcggcgcgcgcctacgacacggcggtgttctacctccgcgggcggtcggcgcggctcaacttccccgaggagatctcctcgctggcgtcgctgtccgagggcggcggcgcgagcgagccccgcgagcccgacggcggcacgctgtccgcggcctcgatccggaagaaggccatcgaggtcggctcccgcgtcgacgcgctccagaccggcatgatggtcgcgccgacgacccaccaccgcgagcggcagaagcaccaccaccaccaccaccaccacccgcacctgcagccgcacggcgaggagcaacaccaccaccacgagcagaagcaccagcggacggcgtggagcggccgcgccaagaacccggatctcaaccaggcgccaagcccggagaactccgacgccgagtag

SEQ ID NO: 11171 - DNA, 994 bp, Oryza sativa
  Clone ID: TFbOSC900393j.C1.o17.fg
gcaccggtggacggggaggtacgaggcgcacctgtgggacaatagctgccgccgggaaggccaaagccgcaaaggccgccaaggaggttatgataaggaggagaaggccgcaagagcttacgacctcgccgccctaaagtactggggtccaaccaccacgacgaacttccctgttgccaactacgagacggagctggaggagatgaagtccatgacgcggcaggagttcatcgcgtcgctgcgcaggaagagcagcggcttctcaagaggggcttccatctacagaggagtaacaagacatcatcagcacggccggtggcaagcgaggatcggcagggtggccggaaacaaggacctgtacttgggcactttcagcacgcaggaggaggctgccgaggcgtacgacattgccgctatcaagttcagggggctcaacgccgtcaccaacttcgacatgagccgctacgacgtcgacagcatcctcaacagcgacctgccggtcggcggcggagccgccacgcgcgcctctaagttcccctctgacccatcgctgccgctgccgtcgcctgccatgccaccgtcggagaaggactactggtccctccttgccctgcactaccaccaccaccagcagcagcagcagcagcagcagtttcctgcttctgcatttgacacctacggctgctcctccggcgtgaacgtggacttcacaatggggactagcagccacagcggcagcaacagcaacagcagcagcagcagcgccatatggggcacagccgccggcgcagcgatggggaggcagcaaaacggcggcagcagcaacaagcagagcaacagctactccggtaacaacattccttatgctgctgcagcagctatgacttctggatcagcactctacgggggctccaccggtagcaacgggacatgggtggcgagtaacacgagcacggctccccacttctacaactatttgtttgggatggagtag

SEQ ID NO: 11172 - DNA, 5229 bp, Oryza sativa
  Clone ID: TFbOSC900383j.C1.o18.fg
atggatcggcaatggatgtacgctgaccggcggtccaaagagtttattgacggcgtgcactattttttgagagtggccgaagctaacaggcaaaggggttttatttgttgtccatgcaataagtgtaagaatcagaaggagtattctgcatccaggactattcatttccacttgtttgagtcggggttcataccaagctataattgttggacatcccacggagagcaaggtgttgaaatggaagaagatgaagtggaagacgacaatattccggactttgctcagtatgttggatttgaaggaaatcaaacgggcgaggaggaaatagctgctgatggtaacgacgttgcggatgatcttggtcagatgttgcaggacgccagggaggactgcgaaagtgaaaaggaggcccataaattggacaagatgttggaggaccacagaacttcgttgtacccaggttgcgagcaggggcacaaaaagttggataccactctggagttgttgcaatggaaggcaaaaaatggggttagtgacaaggcatttggcgatttattgaaactcgtcaagaacattcttccggggggaaacaaattgcccgagacaacgtacgaggctaagaagatagtctgcccgttaggactggaagttcataagattcacgcatgtccgaacgattgtatcctatatcgcggtgaggagtatgagaacctagaagcatgccctgtttgcaaagcactacgatacaagattagacgggacgatccaggagaagttgacgggcagctgacaaagaagagaattcctgctaaggtgatgtggtatttccctataataccacggctaaggcgttttttcaggaacaaggggaatgctagaatgttgcgatggcacgctgaagagcgtcaacaggacgggatgctgagacaccccgccgatggttcgcagtggcgaaacatcgacagaaaatttaaagaatttggaaaggacgcacgaaacatacggtttggtttgagtacggatggcatgaatccttttggagagatgagcagcggccatagcacttggcccattacgatgtgtatctacaacctccccccctggctatgcatgaagaggaagtacataatgatgccgattattattcaaggccccaagcaacctggtaacgacatcgacgtgtacctaagaccactggtcgaagatcttaaactgttgtggaggaaggaaggtgtccccgtgtgggacgaggacaaacaggaggagtttaacctacgagcgctgctgttcgtaaccatcaacgattggcctgcacttagcaacctatccggacagtccaacaaggggtacaaggcttgcactcactgtatggatgaaacagaaagtacgtatcttaagcactgtaggaaggttgtatacatgggtcatcgtcgattccttgcagcaaaccacccggtacggaagaaaggcaagcacttcgaacataaggccgaccaccaatttcgaaatagcgagaacgtgaacgagaacgagaacgatcgaacgaacgagagcgagaacgagaacgatcgaacgaagacaagcgagaacgagggaacgaacgtgaatgagaacaagcgaacgaacgtgaatgagaacgagcgaacgaacatgaacgagctagggaacatggctgaccgcgatgaggaacagatattgtacgatacaatcgcggagggaagcagccagtactggaatgaagaagaggggaacgaggatccaaaccagtacttgaacgaggaagggaacgtggagagggatgcggaggggaaccagcaggggcacgtggaaagggatgtggaggggaaccaggaggaggaggctagtggtagtcaaccctccgttggacagaagagggcacgcgggcaacgaggtgcagcgaagaagcttgagggtcggcacatcataacggaagtggaagaagatggacgtcctagtgccccggccgaagccgccaagaactatgtacgtcacagcggttgggttgtgcgggataacgtgcctgtcagtacggtgtactggcgaagaataagggcacgcggagatcatgagagctttgtcccagattcggagaaagagatgctgtggaccacaatgctcgagacattcacccttcctgcgggtacagaggacaaagtgaaaaggtggactctgaagaaaatggcagaacagtttcagagcttcaagggagatctgtatcagaagtatatactgaaggggcagacaccgaacttcgacacattcccaaagctaagggatcactgggacgagttcgttgcatataagacaggtgaacaagggcaggcgatgatggaaagaaacaaagaaaatgcagccaagaagatgtaccatcaccacttggggtcaggaggctatagcgtcgcgatgccgaactgggagcagatggaggctagcttgattgagaggggtatcgaaccggcaacagccaattggccggaacgatcgaagttctggtactatgctcacggtggaacgctcaacccagctgatggctcactggtcttcggcgatcagatgcgagaggctgcgcgacgactaacagatgcagtggaagcctcctctcagggcacgttccgaccagacagagatagggacgagctgacactcgccctgcagactccagagcatccaggacgaacacgagggaaaggggtgattccttggaagattggtttcaaggaggacatctacacgtacaggagtcggatgaggagcaagagagataccgaggcgaagattgcagacctagagttccgggtatcgagctacgaactcaacatgcaagaggaggtggcaaggaaggttgatgaacgcatggccgcacatcggtcccatgatccccagccgaccattcctcctgcaatggtgagcccattaggaaaccgtagcagctgcgcctcaatggggcaggtaggatcacagagcatggacgccatgcaaacacaggacgaatcgacccgtcccgttgatgacatcactcagcggacaccatgtgagctgcatattcctttcaagaacttatcaataaaggtggcgtcgggcatggccatcccaacggacccttcaggtacttaccactgcaggccgattccagcaggatactcgaaggtcgaagttgagttggtcgaaggcgcgtacgaggacctcgagctggattaccctggaggagacggtgagacgcatctacgagacacatgccatgccattattctacggcgcaggcggtacatcatcctccctgggcgacaagcggcgtctcgtgcactatctcctccggctccgccatctcctcctcaggatcctgcaccgtctcctcctcatgctccgccagcaccgtctccagctcaggctccagcatcgactcctcctcaggatcctgcaccgactcctcctcgtgctcctacacctactcccccgcaagctcctcttccggcaccttcaaagtcaagggcccccccagctccaccgcctgcccacacaagggcaacgaagaaggcgaaagttgacgccgccaagaacaaggacccggggtacgattgcacgcaagaggagcttgacgcttacgttgcatcagaaatcaagagacaattcaagcctcgaagtccagaaaagaagattcctatagaccccagtgtcaggaacttcttcaggggtatgtctgcatctgtcaaagaggccatcaagctatcggactatgagcgaacgctgaagaaagcatcttctggaaagtccaaaccagtccctcagcttggagagcaaccaaaccaggagatcgagccgttggtgaccggtaaagaaatgacgatagaacaatttattactgacaccggtctaactacggatcaattgctaggagtcgcaccaatcgaaaaggcggaagtgaaatacatgtacgaactcggtaaaccgcttgtcaagcctgagctgctgcagtccctacccacacaaatgtacaagttccatcagctgtacatggagatgagcgccaccggtagagagatgatcggagtgaggatcagggacacggacttcttgcaaggagatgacattctctggatcaatttcaggggaatctacgaactataccagctagacgccctcgacgtctctattatgagttgctggattttaatggagattcaaagggcccgacggcggagggttttcgatactggattcatcgaccctcggaaagtaaacgtcgcaatgctcgaccaatatccacaagaaacagaggacaatctcgtccatctcctgaaggcgcagcattacaagacgttcatactgttgccatacaacacagaattccactgggtgcttttactcatcgacctggaggcctgcaccgtcaacgtatatgactcaatggataaaaaagagtctacgtttgacaaggttttcgaacttatagacagctttaaactccatgtggtccgcggcaaatggagagaaagacttaggcggaagttcaaatttccttgcgcaaagcaaaagcagggaactaacttgtgcggttattacgtgtgcgagtattgccactgccttgcagaccaaatcatcaccacaagagagctcgattttattcgcatgagggataacctgaccacacacaaggaatttatcgcggcggttcaagaacaactcatgggattcatcaacgaagaaatccttgatcccaagggtggtggcaaaactcgcggggagatgaacaaagatgatgaggtgatcgggacgttcgacacggcggtggaggcggcgctggcctacgacgccacagcgcgatggctctacggcagcaaggccgtgaccaacttccccaccaccaccggcgatggtgacgacggcctcccggttgctgaacccgccgtcgtcgtcgttgccgctcccgccttcgccggcgaggagatggacaagcaggtagctccggcggcggcgacggcggcagagacagtagccgcagaccccggcgccggcgagttgggtccagtggtgctttgtcatgaactggaggccaccaacggctggcagtacgaggcgtacggctacggctacagcatggggctggagctgcttgagaactacgcgtacgccggcgacgtccagccgctgggcctgggggggtcgacgagcaacgccgccgccgccaacgactgcctttggatgttctaa

SEQ ID NO: 11173 - DNA, 786 bp, Oryza sativa
  Clone ID: TFbOSC900408j.C1.o17.fg
atggctgacctgaccgagcatccgtcgccgactgctcctcctcaagtgcaaacagctggcctgccggcggcggcttctccgggtcctgcctcgcctcattcaccgtcggagcaaggggacaagacggcgcccggggcagccacggcgtcgacgatgacgacggcgagctcgggcgagccgtcgccacggtcctcggggaagcacgccttctaccggggcatccggtgcaggagcggcaaatgggtctcggagatccgcgagccgcgcaaggcgcgccgcatatggctcgggacgtacccgaccgccgagatggccgccgcggcctacgacgtggccgcgcgcgcgctccgcggggccgacgcggtgctcaatttcccgggcgccaccgcctcccgccctgtcccggcgtccgcatccccggccgacatacgcgccgcggcggccgcagcagccgcggccgccgcgcaccttgagcggccgcacggccccaccggcactgcctatcctgccaccgccgcagcggagcaccaccagcagcagcagcagcaacagtacggcagtggcagtccggccgccgacgacgtctcaggctacccgccgatggagggagggattggcaatgacgatttcatggacgaagaagccatcttcgagctgcctcagctgctgcgcaacatggcggctggcatgatgatgagcccgccgaggctgagccccaccacctccgacgtgtcgccggagccgtcggaggccggcgagagcctgtggagctaccgtgatccctag

SEQ ID NO: 11174 - DNA, 1209 bp, Oryza sativa
  Clone ID: TFbOSC423200j.C1.o1.fg
atggccttccacctccaacctcactcactcactcaagccaagctagcaatcgatcgatcgagctcaatgcctccatccatggcgacggcgagggtggcgtcaccgtccacggacaggaagcgcaaggccagcagcgaggacgacatagacgccgccgccgccgccgccgctctcacctcgccgctggcgccggcgagggggaggaagcggttcgtcggcgtgcggcagcggccgtcggggaggtgggtggcggagatcaaggacaccatccagaagatccgcgtgtggctcggcaccttcgacaccgccgaggaggccgcccgcgcctacgacgaggccgcctgcctcctccgcggcgccaacacccgcaccaacttttggccccgcccctcgccgccgcccgccgccgtcgcgccaccggagacgacgacgacgccggcgctgccgtccaaggtcaccaacttgctactgctccgcctcaaggctcgcaaccagcaggtcgtcgacgccggcgccgcggcgccgcaagaagccgctctgttgcagctgcagcagcagacgccggcgtcgtgccaggaggtgttcgtccgtagccacggcgaggagtacggcttccacgtcgacgacttcctcagcgacgcgtgcagcaacgagcagtactccggcgacagctcgctgggattggacgacgacgacggcgaggtggaagacgaggaggaggaggagctcgacttccagttcatggacgtcgcgcccggggcgtcgtcggcggcggcggaggcggggctaggcggcgagggcgcgctgtgctcgccgttcgagatggtcgccgcggagctcggcggcgcggtggacgtggccgcgcacgacgcgatgaggcagatggactacgagaggaagatctccgcgtcgctctacgcgctcaccggcgtctccgagtgcctccggatccgcgccgccgccggcgccaccgccgctgcgcgggaccacctcaccggcctgagagaggcttgccggaagaagcagaaattcgccgccgccgcggcggcgccgccacagcagcaagaaccatctcctcctccacagcagcctgagacgccggcgagctcaggcggcggcatgtcggagacggcgagcggcggcggcggcgacggcgacgtgctgatgtggagctcactggacttggctccgatttgccacatggcatag

SEQ ID NO: 11175 - DNA, 618 bp, Oryza sativa
  Clone ID: TFbOSC401241j.C1.o1.fg
atggtacagccaaagaagaagtttcgtggagtcaggcagcggcactggggctcctgggtctctgagatcagacaccccctccttaaaaggagggtgtggctgggcacctttgagacggccgaggaggctgcgcgagcctacgatgaggctgctgtgctgatgagtggccgcaacgccaagaccaacttccccgtgcagaggaactccaccggtgatctcgccacggccgcagaccaggacgcccgtagcaatggcggtagcaggaactcctccgcgggcaacctgtcacagattctcagtgctaagctccgcaagtgctgcaaggcgccatctccgtccttaacctgcctccgcctcgaccccgagaagtcccacattggcgtgtggcaaaagcgcgcaggggcccgtgctgactccaactgggtgatgacggtggagctcaacaaagaggtagaaccaactgaacctgcagctcagcccacatcaacagcaacagcttcgcaagtgacaatggatgatgaggaaaagattgcgctgcaaatgatcgaggagttgctgagcaggagcagtccagcttcaccctcacatggagagggagagggtagctttgtcatctga

SEQ ID NO: 11176 - DNA, 912 bp, Oryza sativa
  Clone ID: TFbOSC415507j.C1.o6.fg
atgctgcttaatccggcgtcgagagaggtggccgcgctggacagcatccggcaccacctcctggaggaggaggaggagacgccggcgacggcgccggcgccgacgcggcggccggtgtactgccggagctcaagcttcggcagcctcgtggccgaccagtggagcgagtcgctgccgttccggcccaacgacgccgaggacatggtcgtgtacggcgccctccgcgacgccttctcctccggctggctccccgacggctcattcgccgccgtcaagccggagtcgcaggactcctacgacgggtcctccatcggcagcttcctcgcgtcgtcgtcgtccgaggcggggacgcccggggaggtgacgtcgacggaggcgacggtgacgccggggatcagggagggcgagggcgaggccgtggcggtggcgtcgagggggaagcactaccgcggggtgaggcagcggccgtggggcaagttcgcggcggagatcagggacccggccaagaacggcgcgcgcgtgtggctcggcacgttcgactccgccgaggaggccgccgtggcgtacgaccgcgccgcctaccgcatgcgcggctcccgcgcgctcctcaacttcccgctccgcatcggctccgagatcgccgccgcggccgccgccgccgccgcgggcaacaagcggccatatcccgacccggcgagctccggctcttcttccccttcatcctcttcctcctcgtcgtcgtcttcctcctccgggtcaccgaagcggaggaagagaggcgaggccgcggccgcgtccatggccatggcactggttccaccaccgccaccaccggcgcaggcaccggtgcagctcgccctcccggcccagccatggttcgccgccggtccgatccagcagctggtgagctaa

SEQ ID NO: 11177 - DNA, 1059 bp, Oryza sativa
  Clone ID: TFbOSC415507j.C1.o7.gp
attctgcagagagtgatgctctgttctgaacttgctcgacccatcaagcagcaatcgatcacgcacagtcgcacaagatggctaaatcaccactaccactaccacatcgccacttagctcaccagctgctggatcggaccggcggcgaaccatggctgggccgggagggcgagctgcaccggtgcctgcgccggtggtggcggtggtggaaccagtgccatggccatggacgcggccgcggcctcgcctctcttcctccgcttcggtgacccggaggaggaagacgacgacgaggaggaagaggatgaaggggaagaagagccggagctcgccgggtcgggatatggccgcttgttgcccgcggcggcggcggcggccgcggcggcgatctcggagccgatgcggagcgggaagttgaggagcgcgcgggagccgcgcatgcggtaggcggcgcggtcgtacgccacggcggcctcctcggcggagtcgaacgtgccgagccacacgcgcgcgccgttcttggccgggtccctgatctccgccgcgaacttgccccacggccgctgcctcaccccgcggtagtgcttccccctcgacgccaccgccacggcctcgccctcgccctccctgatccccggcgtcaccgtcgcctccgtcgacgtcacctccccgggcgtccccgcctcggacgacgacgacgcgaggaagctgccgatggaggacccgtcgtaggagtcctgcgactccggcttgacggcggcgaatgagccgtcggggagccagccggaggagaaggcgtcgcggagggcgccgtacacgaccatgtcctcggcgtcgttgggccggaacggcagcgactcgctccactggtcggccacgaggctgccgaagcttgagctccggcagtacaccggccgccgcgtcggcgccggcgccgtcgccggcgtctcctcctcctcctccaggaggtggtgccggatgctgtccagcgcggccacctctctcgacgccggattaagcagcatctttgaattatcccgtgaatttgaatttgatttt

SEQ ID NO: 11178 - DNA, 654 bp, Oryza sativa
  Clone ID: TFbOSC900404j.C1.o1.fg
atggcggcgctcttcgaggccgcggagacggcggccatcgtggctgcgctgacgcgcgtcattgccgacggcgggcgtggaggcggcggcggcgtctgcgtgccgccgcccgcgccgtcgttggtcgtgccgccgcgggcgggaacaggcggcgggcggcgcgtcgacgttgcgcgggaggaggagatggtcggcgtcgtctccgcgggagatcacgccggcggggcaaacgtggccgaggcggcggcggcggtggtggtggcggcgccggcgacagcgcgcaggtaccgcggggtgaggcggcgaccgtggggcaagtgggcggcggagatcagggacccgaggaaggcggcgcgcgtctggctgggcaccttccgcaccgccgaggacgcggcgcgcgcctacgacgccgccgcgctacgcttccgcgggcgccgcgccaagctcaacttccccgaggaggtgtcccgcccgtggcagggtcacgatgtcgatcacatgtcctgctcgccgccgtcgatctcgaacgctcgctttctgggttcgtggaccttcggaccgccgcagccgccatcgcggtccgtcgcggcggcggcgacgactctgcttggtgggagccatggaggcaacggagcagagaacgggagggaatag

SEQ ID NO: 11179 - DNA, 801 bp, Oryza sativa
  Clone ID: TFbOSC413120j.C1.o7.fg
atggcggcggcgaggcaggattcttgcaagaccaagcttgatgagcgtgggggtagtcatcaggctccgagctccgcgcggtggatctcgtccgagcaggagcacagcatcatcgtcgcggctctgcggtacgtggtgtccgggtgcaccacgccgccgccggagatcgtcacggtggcgtgcggggaggcgtgtgctctgtgcggcatcgacggctgtctcgggtgcgacttctttggggccgaggcggcggggaacgaggaggcggtaatggcgacggattatgctgctgctgctgctgcggccgcggtggcaggaggatcaggcgggaagagggttaggcggaggaggaagaagaacgtgtaccgcggcgtgcggcatcggccgtgggggaagtgggcagcggagatacgcgacccgcgccgcgcggtgcgcaagtggctcgggacgttcgacaccgccgaggaggccgccagggcgtacgaccgcgccgccctcgagttccgcggcgcgcgcgcgaagctcaacttcccgtgctccgagcctttgcccatgcccagccaaagaaacggcaatggcggcgatgctgtcacggcggcgacgacaacggcagagcagatgactccgactctgtcgccgtgcagcgcggatgccgaggagacgacgacgccggtggattggcagatgggcgcggacgaagccggcagcaaccagctctgggatggcttgcaggacctgatgaagctggatgaagcggacacctggttcccgccattttccggtgcagcgtctagtttttga

SEQ ID NO: 11180 - DNA, 807 bp, Oryza sativa
  Clone ID: TFbOSC404645j.C1.o13.fg
atggtcaccgcgctagcccacgtcatccgcgccgcccccgacctgcacctcccccaccacccatcctcctccgcctccgccgccgcccacccgcagcaggcttcttccttctacccgaccgccgccgccgccgcctcctcgccgtccgaccagctcgccgccgccgccgctgccgaagagcaagggaggaggcggcactacagaggtgttcgacagcggccatgggggaagtgggcggcggagataagggacccgaagaaggcggcgagggtgtggctggggacgttcgacacggcggaggacgccgccatcgcctacgacgaggcggcgctccggttcaaggggaccaaggccaagctcaacttccccgagcgcgtccagggccgcaccgacctcggcttcctcgtcacccgtggcatcccccccgccgccacccacggtggcggctactacccctcgtcgtcgccggcggcgggggcatgccccccgccgcggcagcagcagacggtcgtgccgtacccggacctcatgcggtacgcgcagctgctgcagggcggcgtcggcggcagttacatgccgttcggcggcgccgcgacgatgtcgtcgtcgacggtgtcgtcctcgtcggcgccgcagatactcgacttctcgacgcagcagctcatccgggccggcccgccgtcaccaatgccatcgtcgggctccggctcggcgaccgcggcggcgtcgtccacgacgtcggcgtcgtcgcccggtgcatggccgtacggcggctcggagcgcaagaagaaggattcgtcgtcgtga

SEQ ID NO: 11181 - DNA, 711 bp, Oryza sativa
  Clone ID: TFbOSC401008j.C1.o5.fg
atggagaagaacaccaccgccatggggcaattgatgagctcctccgcgacgacggcggcgacggcgacggggccggcgtcgccgaagcggccggcggggcggaccaagttccaggagacgaggcacccggtgttccgcggggtgcggcggcgcgggcgcgcggggcggtgggtgtgcgaggtgcgcgtcccgggcagccgcggcgaccgcctgtgggtcggcacgttcgacaccgccgaggaggccgcgcgcgcgcacgacgccgccatgctcgccctgtgcggggcctccgccagcctcaacttcgccgactccgcctggctgctccacgtcccccgcgcccccgtcgcctccggccatgaccagctgcccgacgtgcagcgcgccgccagcgaggccgtcgccgagttccagcgccggggaagtactgccgccactgccaccgccacctccggcgacgccgcatccaccgctcctccgtcgtcgtcgcccgttctgtcacccaacgacgacaatgcctcgtcggcgtccactcctgcggtggcggcggcgttggaccacggcgacatgttcggtggcatgcgcaccgatctgtacttcgcgagcttggcgcagggtctgctcatcgagccgccgccgccgccgaccaccgctgagggtttctgcgacgacgaaggatgcggcggcgctgaaatggagctgtggagctag

SEQ ID NO: 11182 - DNA, 639 bp, Oryza sativa
  Clone ID: TFbOSC400832j.C1.o8.np
ctgtactaattaaggtggactatgacaattcttggtccaaccattttcagatatttctcatccggcgggaggtgcacgcggtttcgcggggtgcagaagcggccatgggggcggtacatggcggtgatctgtgacccggtgaagaaggcgcgggtgtggctggaaacctatgactccgccgaggaagacacataggcctacgacgctgcgcgggcctacgatgtggcagcgcgggcgctccgggtcccaaggccaagaccaacttcactctctccctccctcacgcccagccccagctccaccaccatcagcaccaccaccaccacctcacctacccaccctactccgctgccatcgctagctaggccagccaccaccagccttagctccaccattgagtcattcggcaccaggccgcgaccggtgctccttccacggctttcgccatcgtagatccttgatggtgactgccacaatgattgcgggttgtcggcgtcgatggttgatgaggactgcacggacgccaccgcctcactgtcgtgtcagctcacgtttcagtttgacctcaacctgccgcctatcggcgccatttggctagatcgaggtggttggcgactccatatcaccgcaaggcgttta

SEQ ID NO: 11183 - DNA, 1089 bp, Oryza sativa
  Clone ID: TFbOSC400736j.C1.o6.fg
atgtgcggcggcgccatcctctccgacctcatcccgccgccgcggcgggtcaccgccggcgacctctggctggagaagaccaagaagcagcagcagcagaagaagaagaacaagggcgcgaggaggctgccactgcgccaagaggaggaggatgatttcgaggccgacttcgaggagttcgaggtggattccggcgagtgggaggtggagtccgacgccgacgaggccaagccgctcgccgcgccccggagcggcttcgctaaaggtggattgaaaaacactactgttgctggtgctgatgggcctgcagcaaggtctgctaaaaggaagagaaagaaccaattcaggggtatccgccagcggccatggggcaaatgggctgcggaaatcagagatcctcgcaaaggtgtccgcgtctggcttggcaccttcaactctcctgaggaagctgccagagcttatgatgctgaagcacgaaggattcgaggcaagaaggccaaggtcaatttcccagatggggctccagtggcttctcagaggagtcatgctgagccctcctccatgaacatgcctgctttcagcatcgaagagaagccggccgtcatgtcagcaggcaacaaaaccatgtacaacacaaatgcttatgcctaccctgctgttgagtacaccttacaggagccatttgtgcagattcagaatgtctcatttgttcctgcaatgaacgcgattgaggatactttcgtgaacctgtcctctgatcaagggagcaactcctttggttgctcggactttagccaggagaatgatatcaagacccctgacataacttccatgcttgcaccgaccatgacaggtgttgatgactccgcattcctccagaacaatgccagtgatgcaatggtacctcctgtgatggggaatgctagcattgatcttgctgacctggagccgtacatgaaatttctgatcgatggtggttcggatgagtcgattgacacccttctgagctctgatggatctcaggatgtggccagtagcatggacctttggagcttcgatgacatgcccgtgtcggccgagttctactga

SEQ ID NO: 11184 - DNA, 714 bp, Oryza sativa
  Clone ID: TFbOSC401539j.C1.o112.fg
atgtctctctccttggggtttagcgccggcgccggcgtcggtgccgatcgcctcgccgccgcgcccgcgctccaggccgccggtgctctgccgccacgcgtggacgtgtctctgtcgctggcgcgcgcggccaacgggcagccgtcgtcgtacctcccgctcaacgagaacgactcgctggacatggtcctcttcgacgtcctccgcgaggcctccgcggtggcggcgctgtcgtcgtcgtcgtcgtcgtcgccggagctgggcgcgcggacgacggcgccggtggtcgccggccaccccgccgggcgcaagggtggcggcggcggaggcggaggcaggggagcggcggcgaggggcggcgccgctggcgggcggcactaccgcggtgtgaggcggcggccgtgggggaagtacgccgcggagatccgtgacccgacgcggcacggcgcgcggctgtggctcggcaccttcggcacggccgaggaggccgccgcggcgtacgaccgcgccgcgttccgcatgcggggcgccaaggcgctgctcaacttcccgccggctgtcgccggtgacggcgcccgtcgcggcgccgccgcggccgcgaagcaggtcggcatgagcgacgtggtaccaagagcatgtcatgtagtttgttactctgtgcttagtgctcacattttttatgatatctttcgtggtgtgataccaattccgtga

SEQ ID NO: 11185 - DNA, 312 bp, Oryza sativa
  Clone ID: TFbOSC6566j.C1.o6.np
tatctcctaacaacagtccattactacgaatctgacgagcaagccaattcgatcaccgaaagcaaaggggaaataatggatcaccgacgcagcgagagcggagacgagcgaactcggcgtggcgttgtccgtatgcgcgtgccgtgtcagcgaaatggagaaaaacggaaaggaaaaaaaatcgaatttattttcgtggcggtccagcgtggcggcggtgtgtggccaggccgcatctgcggcgagatggagaaggaggtagaggaggaggaggaggaggaggaggcggaggcgagtagaaagaagggagaa

SEQ ID NO: 11186 - DNA, 1473 bp, Oryza sativa
  Clone ID: TFbOSC410566j.C1.o16.fg
atgtcgccgccgacgaacggcgccatctcgctcgcgttcccgcccatggggccgctgccggcggacgcgctgatctacccgttcgacggcctctcctacgacgacttcgtcctccctgtcgccgccgcaccgcagcatccgctccccgtcgccgtcgccgaccccgcgcccctcctcctcctgccgccgccgtcctcctgcacctgcaacggcgccagcagcggcatgggcgccgttgcgccgcgcacgttggctctgggcgccaccaccgacggcagcgtgatgacccccaccagctggggcagcgacggcggcggcggcggctcctcctccgcgcgggccgtgcgctcgccgtcgccggtgctgccgctggtgcagggcaccggccagaggacctcctgctaccgcggcgtgaccaggcacaggtggacggggcgatacgaggcgcacctgtgggacaacacgtgccggcgagaaggccagaagcgcaagggccgccaagttacgactccagtagagttgtttctactgtccgtccttgttgattggcatttggcaacaaacttttgtactttactcgatacgcttgcagagttgcacagtgcagtggttccttttttttttttaagaaaggactaccagtggttccatgatagtgatactatgacatgctgcttctttgcattcagtggctatgacatagaagataaggctgctagggcatatgaccttgctgctctgaaatattggggtgctaatgctaccactaacttccctaaagaaagttacgtgaaagagattgaggagatgcaaaagatgagcaagcaggagcttgtagcctcactaaggaggaagagcagtggcttttctagaggtgcatcgatctacagaggtgtaacaaggcaccaccaacatggccgctggcaggcaagaattggtcgtgttgcaggcaacaaggacttgtatctcggcacctttgcgaccgaagaagaagcagcggaggcgtatgacgttgcagcgctgaagttcaggggcgccaacgccgtcaccaacttcgagccaagccggtacaacctggaagcgatctctcagagcgacctcccgatcagcgtgtccgggaggcggcacaacagcagcagcaacagcaacaatccagcaccagaagcaggaggccaaatcactctgatgagcagcccgccgatctcccagcagtcgagcagcgcgccaccgtatctcatccacaacctcctgcagttccagccatgtggtcccccatacgcaccaccaccaccaccaccaccaccaccaccaccaccacaggctcttccgctgccaggatcgtacaactttgcagagccagtaggcttctactggccctacggcgatggggaggagcagaaggttcagctcaacagcaacatggttggaatggctagtggtggctttcttcatctggccaatgctgccaactga

SEQ ID NO: 11187 - DNA, 1254 bp, Oryza sativa
  Clone ID: TFbOSC415455j.C1.o7.fg
atggaggatttcctcggcggcctaggcggaggcggcggcgccgtcgccgccgctccggcagctgccccggaggatcagctcagctgcggcgagcttggtagcatcgccgccgggttcttgcgccggtacccagcgcctgagaacgccggcggggtgaccatcgcaatggcgaccgacgcggcggcggagctggccgatccggcgaggaggaccgccgagacgttcgggcaacggacgtccatctaccgtggtgtcactaggcaccggtggacggggaggtacgaggcgcacctgtgggacaatagctgccgccgggaaggccaaagccgcaaaggccgccaaggaggttatgataaggaggagaaggccgcaagagcttacgacctcgccgccctaaagtactggggtccaaccaccacgacgaacttccctgttgccaactacgagacggagctggaggagatgaagtccatgacgcggcaggagttcatcgcgtcgctgcgcaggaagagcagcggcttctcaagaggggcttccatctacagaggagtaacaagacatcatcagcacggccggtggcaagcgaggatcggcagggtggccggaaacaaggacctgtacttgggcactttcagcacgcaggaggaggctgccgaggcgtacgacattgccgctatcaagttcagggggctcaacgccgtcaccaacttcgacatgagccgctacgacgtcgacagcatcctcaacagcgacctgccggtcggcggcggagccgccacgcgcgcctctaagttcccctctgacccatcgctgccgctgccgtcgcctgccatgccaccgtcggagaaggactactggtccctccttgccctgcactaccaccaccaccagcagcagcagcagcagcagcagtttcctgcttctgcatttgacacctacggctgctcctccggcgtgaacgtggacttcacaatggggactagcagccacagcggcagcaacagcaacagcagcagcagcagcgccatatggggcacagccgccggcgcagcgatggggaggcagcaaaacggcggcagcagcaacaagcagagcaacagctactccggtaacaacattccttatgctgctgcagcagctatgacttctggatcagcactctacgggggctccaccggtagcaacgggacatgggtggcgagtaacacgagcacggctccccacttctacaactatttgtttgggatggagtag

SEQ ID NO: 11188 - DNA, 1077 bp, Oryza sativa
  Clone ID: TFbOSC417508j.C1.o10.gm
atggagcttctagcatacaaggaaggaattgctttggcgattcaatggactctaaaaccgatcgtggtggaatcagactgcttggaagcggcgcatgctaaagttggggtggcggcggcagaaatattagtcccacggcgaccggtgataacggggaaagggatgtggcacctgcaactcttccacctgcacgactctaggttggataaggtgttcattgttgttgcattgattatgttcgcctaccgcgagatcaccatggtctggttacgggtgctgtcgcctcctagctggactgccctctcgccccccgtggcagctggctctagggttggtggccatcttccagtgctgagtatggatttctacttcttctcctcgtcggcgccggcgccggagaagaagacgaggcggcagcagcagcagcagcagcagcgggagcaggaggggggtggaggagggaacgaggcgagatacctcggcgtgaggcggcggccgtggggccggtacgcggcggagatcagggacccggcgaccaaggagcggcactggctgggcacgttcgacacggcggaggaggccgccgtcgcctacgaccgcgccgcccgcaccatccgcggcgccgccgcgcgcaccaacttcgcctacccggacctgcccccgggctcctccctcacgccctacctctcccccgacctctccaccaacgacctccaccgccactactacggcgccggcgccggcgccgacacccagaccgccgccgcgctgccggcgccggctcagcccgcacacggcggcgacgcccaggaaatggcttacggtggcggtggcggtcagaatgtgggtggcgtgttcgacgtcgtcggcggcggcggcggcgcggcgtggtgcgacgcgtcggagctggagttcggcgggtacgacgacgcgggcgcgtcggcggcggcggcggcggtgtacttcgaggaggggtacgtgcacagcccgatgttctcgccgatgcccgcggccgacgaggtcgccgccgacggcttccagctcggcgggtcgtcgtcctcctcgtattactactga

SEQ ID NO: 11189 - DNA, 629 bp, Oryza sativa
  Clone ID: TFbOSC900102j.C1.o14.np
tggtactgctggaactacggctgtgcgacctgcaggcacccggtcatctagtttccatggtgtgaccaggcatagatggagtggaaaatatgaagctcatctgtgggacagttcgtgcagaatggaagggcggagaagaaagggaaggcaagactatgcaggaagttatgataccgaggaaaaagctgccaggtcatatgatgttgcagctcttaaatactggggccaaaatacaaagctgaatttctcggtttcagaatacgaaagggaactggaggacataagggacatgtctcgagaggaatgcgtaacatacctaagaagaagaagtagctgcttctcaagaggggcttctatttatagaggagttactagaaggcagaaagatgggaggtggcaggcacgcataggactggttgctggaacaagagacatttacctgggaactttcaaaactgaggaagaagcagcggaggcttacgacattgctgctattgagatccgtggcaaaaatgcggtgaccaactttgatcgaagcaactacatggagaaggcacttctttatggaatattttattaggaacgcagcgttcctaataaattaaaagactataaaaacctagtggtga

SEQ ID NO: 11190 - DNA, 1452 bp, Oryza sativa
  Clone ID: TFbOSC407922j.C1.o4.fg
atgcgcagcagcagcagcaaggccacacccacaacctcccctgcttttcgcgtcctctgctctcctcctagtgccaagagtccaagacccaacaagggggaggacggaggaggcgaggcagaggcatctcaccgaagggggaagggcgacgccatgtgggacctcaatgactcgccggcggccgaggccgcgccgccgccgctgtcgccgtccgccgacgactccggcgcctcctcgtcctcggccgccgccgtcgtcgagatacccgacgacgccgacgacgactcggccgctgtggttgtcgtcacgcgccagttcttccctccggccgtcccgggcggcggcggcgaccccgcccccgggaacgcgcgcgccgggtggctccgcctggccggagccgccccgccggtcgctgcaacggggccggcggcgtcggcggcggtgtccaagaagagccggcgcgggccgcggtcgcgcagctcgcagtaccgcggcgtcacgttctaccgccgcaccgggcgatgggaatcgcacatatgggattgtggcaagcaggtctatttgggcggatttgacactgctcatgcggcggctcgggcgtacgatcgggcggcgatcaagttccgcggcgtggaggccgacatcaatttcagcttggaggattacgaggatgacctgaagcagatgagcaacctgaccaaggaggagttcgtccacgtgctccggcggcagagcacggggttcccccggggaagctccaagtacaggggcgtgacgctccacaagtgcgggagatgggaggctcggatgggccaattcctcggcaagaagtacgtctacttggggctgttcgacaccgaggaggaagctgccagggcgtacgaccgcgctgccatcaagtgcaatggcaaggatgcggtgacgaacttcgatccaagcatttacgccggggagttcgagccgccggcagcggccacgggtgatgccgccgagcacaacctggacctctcgcttgggagctcggcgggctccaagaggggcaacgttgacggtggcggggacgacgagatcaccggcggcggtggcggtggcgcgggctccgaccagcgcgtccctatggcgttcgaccttgactggcaaacggcggcggcgaggagcaccaaagctaagttcttgagcaatggtgatccggggacagcgggaggcctgtcactgacgatcggcgcaggcatggccgggcactggcctccccagcagcagcaggggtggggcaacgccggcggcatgagctggccgcacccgccgcacccgccgccgccgccgaccaacgccgcggccgccgcaaccgctacagcagctgcagcatcatcacgattccctccctacattgcgacgcaagcctcaacctggctgcagaagaacgggttccattccctgacccggcccacctaa

SEQ ID NO: 11191 - DNA, 1416 bp, Oryza sativa
  Clone ID: TFbOSC900281j.C1.o2.fg
atggagtcgttctctttccacgtctttccccacactgccaagagtccaagacccaacaagggggaggacggaggaggcgaggcagaggcatctcaccgaagggggaagggcgacgccatgtgggacctcaatgactcgccggcggccgaggccgcgccgccgccgctgtcgccgtccgccgacgactccggcgcctcctcgtcctcggccgccgccgtcgtcgagatacccgacgacgccgacgacgactcggccgctgtggttgtcgtcacgcgccagttcttccctccggccgtcccgggcggcggcggcgaccccgcccccgggaacgcgcgcgccgggtggctccgcctggccggagccgccccgccggtcgctgcaacggggccggcggcgtcggcggcggtgtccaagaagagccggcgcgggccgcggtcgcgcagctcgcagtaccgcggcgtcacgttctaccgccgcaccgggcgatgggaatcgcacatatgggattgtggcaagcaggtctatttgggcggatttgacactgctcatgcggcggctcgggcgtacgatcgggcggcgatcaagttccgcggcgtggaggccgacatcaatttcagcttggaggattacgaggatgacctgaagcagatgagcaacctgaccaaggaggagttcgtccacgtgctccggcggcagagcacggggttcccccggggaagctccaagtacaggggcgtgacgctccacaagtgcgggagatgggaggctcggatgggccaattcctcggcaagaaatacgtatacttggggctgttcgacaccgaggaggaagctgccagggcgtacgaccgcgctgccatcaagtgcaatggcaaggatgcggtgacgaacttcgatccaagcatttacgccggggagttcgagccgccggcagcggccacgggtgatgccgccgagcacaacctggacctctcgcttgggagctcggcgggctccaagagggacaacgttgacggtggcggggacgacgagatcaccggcggcggtggcggtggcacgggctccgaccagcgcgtccctatggcgttcgaccttgactggcaaacggcggcggcgaggagcaccaaagctaagttcttgagcaatggtgatccggggacagcgggaggcctgtcactgacgatcggcgcaggcatggccgggcactggcctccccagcagcagcaggggtggggcaacgccggcggcatgagctggccgctgccgccgcacccgccgccgccgccgaccaacgccgcggccgccgcaaccgctacagcagctgcagcatcatcacgattccctccctacattgcgacgcaagcctcaacctggctgcagaagaacgggttccattccctgacccggcccacctaa

SEQ ID NO: 11192 - DNA, 638 bp, Oryza sativa
  Clone ID: TFbOSC100759j.C1.o1.np
atcgccatgatctatctccattctccagctagcttctcatgtagtaataagccgatggcaaattcgtccaatcgatcggcaatacaacgagtacgtcgaagaggagccaagtagtcagtgaggccgtacaagggggtgaggatgcggagctgggggtcgtgggtgtcggagatcagggcgccgcaccagaagcggcggatctggctgggctcctacgccacgccggaggccgcggcgcgcgcctacgacgccgcgctgctctgcctcaagggctccgacgccgtcctcaacttcccctcctccgcctcgtctcgccgccgcctcgacatccaccgggggggcacggactcggcggcgggcgacatgtcgccgaggtccatccagcgcgtcgcggccgccgcggcgggggcattcgacgccgccgccgccgccgtcgtcctccggcggcggtgacgtgctggaccacgcgacgacgccgtcgtcgtcgtcgtctgccgcggccaacgtttgctcgccgccgctggagggggaccatgagctgtggacggagctggacgcgttcgcgtcgccgaagttcatggatctaatggccccggcggcacggcgttctcgtcgccgtgggaggagcccgaggagga

SEQ ID NO: 11193 - DNA, 855 bp, Oryza sativa
  Clone ID: TFbOSC401685j.C1.o143.fg
atggagcggggggaggggaggaggggagattgctccgtgcaactttgtggaattattgagttacctcattgggtcaggaagaagagaacgcgaaggaaaagcgatggccctgattcaatcgctgaaaccatcaagtggtggaaggagcaaaaccagaagctccaggaggagaatagctccaggaaagcgccagccaaggggtccaagaaagggtgcatggctgggaaaggaggtccggaaaattcaaattgtgcttaccgcggtgtcaggcaacggacatggggtaagtgggtggctgagatccgtgaaccaaaccgtggaaggcgcctatggctaggatcatttcctactgcgctggaggctgcgcatgcatacgatgaggcggcaagggcaatgtatggtcccacagcacgtgtcaattttgcagataattccacagatgccaactctggctgcacatcagcaccttcattgatgatgtctaatgggccggccactataccttctgatgagaaggatgagctggaatctcctcctttcatcgtggctaatgggccagctgtgttgtatcagcctgataagaaggatgtgttggaacgtgtagtccctgaggtgcaggatgttaaaacagaagggagcaatggcttgaaacgtgtttgtcaggagcggaagaatatggaggtatgtgaatcagaagggatcgttttacacaaagaagtgaacataagttatgattatttcaatgtccatgaagttgttgagatgataattgttgaattaagtgctgatcagaaaacggaagtacatgaagagtaccaagagggagatgatgggtttagccttttctcctattag

SEQ ID NO: 11194 - DNA, 1077 bp, Oryza sativa
  Clone ID: TFbOSC401827j.C1.o10.fg
atgccgatgccggcggcggctggggaggggccgtggccgcgccgcgcggcggatctcggggtggcgcagagccagaggtcccccgccggcgggaagaagagccgccgcggcccgaggtctcggagctcccagtacaggggcgtcaccttctacaggaggaccgggcgatgggagtcgcacatctgggactgcgggaagcaggtgtacctgggtggtttcgatacagctcatgccgcagcgagggcctatgatcgcgcggcgatcaagttcagaggcctcgacgcggatatcaactttaatctgaatgactatgaggacgacttgaagcagatgcgcaattggaccaaggaggagtttgtgcacatacttcggcgccaaagcacaggatttgcaagggggagctcaaagtaccggggtgtgacactgcacaagtgtggccggtgggaagctcggatgggccagctgctcggcaagaagtacatctatctaggattgtttgacagtgaaattgaggctgcaagagcatatgaccgggcagctatccgcttcaatggaagggaagctgttactaattttgatcctagttcttatgatggagatgttctacctgaaaccgacaatgaagtggttgatggagacatcattgacttaaatctgagaatttcacagcctaacgttcatgagctgaaaagtgatggtaccctaactgggttccagttgaattgtgattctcctgaagcttcaagttctgttgttactcagccaataagtcctcagtggcctgtgcttcctcagggcacatcgatgtcccagcatccacatttatatgcatctccttgtccgggcttctttgtgaacctcagggaagtacctatggagaaaagacctgagttgggtccccagtcgttccctacttcgtggtcatggcaaatgcagggctcccctttgccattactccctactgcagcatcatcaggattctctacgggcaccgtcgccgacgccgcccgctcgccttcctcccgcccccatccatttcccggccaccaccagttctacttccccccgaccgcctga

SEQ ID NO: 11195 - DNA, 651 bp, Oryza sativa
  Clone ID: TFbOSC900301j.C1.o3.fg
atggcggcgctcttcgaggccgcggagacggcggccatcgtggctgcgctgacgcgcgtcattgccgacggcgggcgtggaggcagcggcgccggcgtgccgccgcccgcgccatcgttggtggtgccgccgctggcgggaacgggcggcgggcggcgcgtcgacgttgcgcgggaggaggagatggtcggcgtcgtctccgcgggagatcacaccggcgaggcaagcgtggccgcggcgggggtggtggtggcggcgccggcgacagcgcgcaggtaccgcggggtgaggcggcggccgtggggcaagtgggcggcggagatcagggacccgaggaaggcggcgcgcgtctggctgggcaccttccgcaccaccgaggacgcggcgcgcgcctacgacgccgccgtgctccgcttccgcgggcgccgcgccaagctcaacttccccgaggaggcgtcccgcccgcgccgcccgtggaagggtcacgacgtcgatcacatgtcctgctcgccaccatcgatcgcgaacgctcgctttctgggttcgtggatcttcggacctccgccgccgtcgcggtccgtcgcggcggcgacaacgactctgcttggtgggagccatggaagcaacggagcagataatgggagggaatag

SEQ ID NO: 11196 - DNA, 831 bp, Oryza sativa
  Clone ID: TFbOSC405795j.C1.o6.fg
atgtctccggcggactccctcgccgccggcaggagccgccgtgttggggctagcatgcctcggcccaagcgtgtccgcgtctacttcgtggacgccgacgccacggacaccgactcctccggggacgagcgctccaggccgcgcgtccgggaggtcatcgacatcgacgtcggggccgcctcgccggcgccggcgccgaagcacccgaggcggctggttccgacggcgacggcggcgctggcccggcggcgcgcggggatggcggcgagccggcggttccgcggcgtgcggcggcggccgtggggcaggttctcggcggagatccgcgacccgagcctgcagaagcggctgtggctcggcaccttcgacaccgccgaggaggccgccgccgtgtacgacgacgccgcgctccgcatcaagggctcccacgccgtcaccaacttcccctccgactccgacaccccctccgccaaggccaagcagatgaagctccaccctcgccgacacaccaccccggacaagaccccaagctcttccaccgccgccgccgccaaggcctccgtccccgatccgacgccggcgccaccggaggaggaccgcgccaacgacagctcgttcaacccgttcgcgtcgccgacctccgtgctccggtacgcggcagcggacgaggtgaccgcgccatccttcgagcacctcctcgtcgagctgggcgacctctcggcgccgccgccttccaccaaggcggcggagttcgactggctgccgtggtgggaaggggaggacttcgtgacggcggggctgacggcgagcaacgccgtcagcgtgaaatga

SEQ ID NO: 11197 - DNA, 957 bp, Oryza sativa
  Clone ID: TFbOSC410095j.C1.o5.fg
atggagagctacgggaggaagcgggcgtggaagaaggggccgacgagggggaagggcgggccgcagaacgcggcgtgcgagtaccgcggcgtgcggcagcggacgtgggggaagtgggtagccgagatccgcgagcccaacaagcggacgcgcctctggctcggctccttcgccaccgccgaggaggcggcgctcgcctacgacgaggccgcgcggaggctctacggccccgacgccttcctcaacctgccccacctccgcgccgcctccgccgccgccgcgcaccagcgcctcaggtggctcccggcctccgccgccgccgccgccgcaagggggggcgccgccgccgtccccgcctacggcctcctcaacctcaacgcgcagcacaacgtccacgtcatacaccagaggctgcaggagctcaagaactcgtcgtcgtcgccgaccaagccgccgccgcgtacgccgacgcgcgccaacccgcctccgccgcctctccccacctcgtcgccctgctccaccgtcaccaacagcgtcggctccgcggctctgcctccgcccatgtcgtgcttccaggcgctggagcaagcgatggcggccacggcggcgatggagagcgcgccgtgcgacgacgacgccgccgtcgtgggcttcggcgccgacaagccccagctcgacctcaaggagttcttgcagcagataggcgtgctcaaggccgacgacgacggcgcgacaggcaagaacggcgccgtccacggggacgacggcgagctggcggacgcgtttggcttcggcggcagcggcgagttcgactgggacgcgctggctgccgacatgagcgacatcgcaggaggccacggcggcgcgctgggcgccaatggcgggttccagatggacgatctgcatgaggtcgaacagtttggcgggtgcatgcccatccctatttgggacatttga

SEQ ID NO: 11198 - DNA, 885 bp, Oryza sativa
  Clone ID: TFbOSC22414j.C1.o4.fg
atgccgccctgcgccgccgggaagcgcagctccatctaccgcggcgtcacccggcataggtggacaggccgatatgaagctcacctctgggataaaagcacatggaatcagaatcagaacaaaaaagggaaacaaggtgcatatgatgatgaagaggctgcagcaagagcttatgaccttgctgcattgaaatactggggagctgggacacaaataaactttcctgcttatgttcattatgtatttgcttatttagggaaggacatcacgctggatgggaaatttgcaggaacctttggcttagagaggaaaattgatctgacaaattacataaggtggtggctcccaaaaaagacacggcagtcagatacatctaaaatggaagaggttactgatgaaatccgtgctattgaaagttcaatgcaacggactgagccttataagtttccttcccttggcctccattctaactcaaagccctcttccgtggtcctatcagcatgtgatatcttatctcagtctgatgccttcaaaagcttctcagaaaaatctacaaaactatctgaagaatgtacttttagcaaagaaatggatgaaggaaagacagttaccccagtacctgcaactggacatgacacaactgcagttaacatgaacgtgaatgggttgcttgtgcaaagagctccatacacattgccctctgttactgcacaaatgaaaaatacctggaaccctgctgatccttctgcggaccctcttttctggaccaacttcatcctgccagcaagtcaacctgtcacgatggcaacaatagcaacaacaacgtttgcaaagaatgaggtgggtgataacatcctgcacgtctatgggtttccttcttcctag

SEQ ID NO: 11199 - DNA, 260 bp, Oryza sativa
  Clone ID: TFbOSC24042j.C1.o1.np
gtgctttttcttattatttcactacacctacgacatatttttaagagtaaagttcatcaccgctccctaaacttatattgctgtgtcatcccggtccctaaactcgcaaatcgaccgttcagatccttaaacttgttcgactgtgtcatcccggtccccaaacttgcagatcactcgtttaggtcctccaacttgttcagttgtatcaccccggtccctaaacaggtttttgaattaaaactgtttagggtcctaaaata

SEQ ID NO: 11200 - DNA, 570 bp, Oryza sativa
  Clone ID: TFbOSC401180j.C1.o8.fg
atggtgccgccggcggcgcacgcgccgaagaacctggggctgaggggggtgcggcgccggctgtggggcaggtgggcggcggagatccgcgtgccgcggggccaccgcgcggccgcgaggctgtggatcggcacgttcccgtccccggcggcggcggcgctcgcctacgacgccgcgctctactgcttccacggcggcgcgccgccggggaaccgcgccttcaacttcccgcacgcgccgcgcctccgcatcgacgaccgccgccgccacgcgctcacgccgggccacgtcagggccatcgccgagaggtacgcccacgacgtcggctccgtcctgttccgcccgctccctccgccgccgccgcccgtcgccgccgccgccgtccccgtgttcgccgcacctgcaccgcccatggcgccggcgccggccaaccatgctgccgatccttactactgcaacgagcctgacaccaccacagacgaggacgtcatggctgcggctgaccgcctcctctccatggacatcgaagaggtcgccgctttgatcgccattgttcagcaaggagagtga

SEQ ID NO: 11201 - DNA, 849 bp, Oryza sativa
  Clone ID: TFbOSC900397j.C1.o2.fg
atggcgatggagggggaggtggagggtggtgggaggaggcgggtggtgcggatcatcttccgcgacgaggacgcgacggattcgtcgagcagtgaggaggagggggagggggaggtggtggcggcgaggcgggtggtggtgaagcggacgcggctgcggtgccaggaggtggagaggaggttcaccggcgtgcggcggcggccgtgggggaggtgggcggcggagatccgcgaccccaaggagaacgggcggcgcgtgtggctcggcaccttcgacaccgccgaggccgccgccgccgcctacgacgacgcctgcctccgcctccgcggccccggcgccgccctcaacctcccctcccgccgctgcgtcgctcccgctccgcctccaccgcctcctccgccgccgccgacggccgaggagaagaagctgctgctgttcccgccgccgctgcctccgaggaagaaggcgatgctattcccgctgccgctgccgccgaggaagaagccgctgctgtacccgccgccgctgccgccgaagaagaagccgctaccaccaccatcaccaccgccacagccgccgctgccggagaaggagaacaccccgctcccgccgctgctgctgcctccaaagaagaagccgcttccgccgccgtcaccgacagcggcagcgaaggaggagcccatcgagctcgagcatgcggcgccgccgccgcctttcgtgccccggccggtgtggcccctcctggccagcggcggcggcgggaagcggaagaagcagtcgggctgcggcggccgcatccccgccctcaacaccgccgccgccgccgtcgaggagaccggccgcgcctga

SEQ ID NO: 11202 - DNA, 336 bp, Oryza sativa
  Clone ID: TFbOSC6563j.C1.o1.gm
atgagccgggcggagtgcggcggcggcgaggaggaggagcggtgcaggtacaggggcgtgcggcggcggcggtgggggaagtgggtgtcggagatccgggtgcccggcacgcgggagcggctgtggctggggtcctacgccacgccggaggccgccgccgtcgcgcacgacacggcccaaatgatgacactctatcatctgaatcagagttttcatgtatcaaattataatgatgactatcatccgatgcgcactgtgcttttggatgcaatgcagctaccaattggcagtgttctggtgatccagacttgtatgcacttgcacttccatctgtga

SEQ ID NO: 11203 - DNA, 1029 bp, Oryza sativa
  Clone ID: TFbOSC414138j.C1.o23.fg
atgtgtggaggatccattctcggcgaccttcacttgccggtgcggcggacagtgaacgccggtgacctgtggggagacgccggcaagggtagagatggtggcgacggcttgaagaagaggaaggggagttcttgggatttcgatgttgattgcgatgatgatgatgatgatgactttgaggctgattttgaggagtttgaggatgactatggcgatgatgatgatgtgggtttcggggacgacgaccaagaatccgacatgaacggtctcaagctcgccggattcagcaccacgaagctcggcctcggcggcagcaggaagaggaagacgcgataccgagggatccggcagcggccatgggggaaatgggcggcggagatcagggacccccgcaagggcgtccgcgtctggctcggcacgttcggcaccgccgaggaggccgccatggcgtacgacgtcgaggcacgccgcatccgcggcaagaaagccaaggtcaacttccccgacgccgccgccgccgccccgaagcggccacggcgttcttcggcgaagcattcgccgcagcagcagaaggccaggtcgtcgtcgtcgtcgccggcgagcctgaacgccagcgacgccgtgtccaagtccaacaacaaccgcgtcagctcggctgggagcagcaccgacgccaccgccgccgccatcgccatcgacgacggcgtcaagctcgagctgctctcggagacggatccttctccgcccatggccgccgccgccgccgcgtggctcgacgcgttcgagctgaacgatcttgacggatcaagatgcaaggacaacgcattcgatcaccagattcacaaggtagaagcggctgtcgctgatgaattcgcgttctacgacgatccgagctacatgcagctgggttaccagctcgatcagggcaactcgtacgagaacatcgacgcgctcttcggcggcgaggccgtcaacattggtggactctggagcttcgacgacatgccaatggagttcagagcttattga

SEQ ID NO: 11204 - DNA, 606 bp, Oryza sativa
  Clone ID: TFbOSC22139j.C1.o2.fg
atggcgttgtcggagccggacctcgcggcggagacggaggcgatcgtgtcggcgctcacgcacgtcgtcgcgtacggcggcggcggcccgccgccgagcgaggagaccgccgcgtcgcgggcggcgcgggtgtggctcgggacgttcgccaccgccgaggacgcggcgcgcgcctacgacgccgcggcgctccgcttccgcggggggcgcgccaggctcaacttccccgaggacgccgccgcggccgacgagcgacgcgccacggacgccgcggccgccgcggcggcggcgtcgtcggcgcccgccgcgctgctggagtcgcagccgggcgacgtcgcggactgcctcgactactccaggatcctggcgggggcgccggagcggccgacgagctccaccgtcccggacgggttcttcggcggcggcgggaacggccgcttcttgcactcgtggagcattggcacgtcgccgtcgccgtcgggctcgggctcgggcggagccggcggtggcggtggcggtggcggtggcggcgcccctgttcgtcctctgtttcatggcggtaacggctgggagcaacgcggtgacagtgcatacaacggtttctag

SEQ ID NO: 11205 - DNA, 262 bp, Oryza sativa
  Clone ID: TFbOSC100668j.C1.o5.np
cgcgcaggtaccgcggggtgaggcggcgaccgtggggcaagtgggcggcggagatcagggacccgaggaaggcggcgcgcgtctggctgggcaccttccgcaccgccgaggacgcggcgcgcgcctacgacgccgccgcgctacgcttccgcgggcgccgcgccaagctcaacttccccgaggaggtgcgccattgccgacgacggacgtggaggtggcgcgacgttgggcggcggtgcgccgctctgcccgcgccgtcgtt

SEQ ID NO: 11206 - DNA, 939 bp, Oryza sativa
  Clone ID: TFbOSC101030j.C1.o20.fg
atgtgcggcggtgcaatcctcgccgatttcaccccggcgagggtgccccggcggctgaccgccgccgagctcctgccggtgaccccgactccccccgccgccgagaggagaaccacccggaagcgcaagtccgacgtcgacttcgaggcggagttcgagcttttcgaggacgacgacgacgacgatgagttcgagctttccgacgatggcgacgagagtttggccgtgtcattttcgtcggatgtctcctcgagctccaggccgcggcggcgcgtggcggcggcggcggccggtcgtcggaaggcgagcaagaagagcaagtacaggggcgtccggcgccggccgtcggggaggttcgcggcggagatcagggaccccaagaaggggcggcgcgtgtggctcggcacgtacggcagcgccgaggaggccgccatggcctacgaccgcgaggcccgccgcatccgcggcaagggcgcgaggctcaacttcccccgcgacggcgatggctcccctcgccggagtaacgaccggccctgctggaccatcgacctcaacctccccgcggcggccgtctccggtgacgacgacgacgccatggccgtcgacgccgcagacgcagacgcaggcagtgctggccgtgcagcagcctatgcagatcaagaagcactgagcgcggcaaagtgcaagatcaagcagtgtcctcgcgacgaacagatggcgagcgccacacctgagctcatggaggaggacgcgagcagcagcagaaacatggtgcccctgtccatggcgctgcagctgcagtatgcggcgatgatcgccgaatgcgaccgcgagatggaggagatcgccgccgtggagagggacctcgagaggcgcaggaggcaggtgttcgagcgcagaggccacctggtcaggcaggcctctcttctgctcgactga

SEQ ID NO: 11207 - DNA, 1164 bp, Oryza sativa
  Clone ID: TFbOSC400468j.C1.o6.gm
atgggcccacagtgcagtggcccgggaggaagcttcgcgcgcacgggccgctccccgacggaagaggcaattagtgaggacagagagttccagagccttttagtttctggtgttctgatctgttcttggtgtaagattattgaaggaaatctgatgcgggcgctgggagaggctccgtcgccgcagatgcagaagatcgcgccgccgccgtttcatcccggcttgccgccggcgccggcgaacttctcctcggccggagtccacgggttccactacatgggcccggcccagctcagcccggcccagatccagcgcgtccaggcccaactccacatgcagcggcaggcccagtcggggctcggcccgcgggcccagcccatgaagcccgcttcggcggctgctccggcggcggcggcggcgcgggcgcagaagctgtaccgcggcgtgcggcagcggcactggggcaagtgggtggcggagatccggctgccgcgcaaccgcaccaggctctggctcggcaccttcgacaccgccgaggaggcggcgctcacctacgaccaggccgcgtaccgcctccgcggcgacgcggcgcggctcaacttcccggacaacgccgcgtcgcggggcccgctcgacgccgccgtggacgccaagctccaggccatctgcgacaccatcgccgcgtccaagaacgcctcatccaggtccaggggcggcgccggcagggccatgcccatcaacgcgcccctggtcgccgcggcgtcgtcgtcctccggctccgaccactccggcggcggcgacgacggcggctcggagacgtcgtcgtcgtctgcggcggcgtcgccgctggcggagatggagcagctggacttcagcgaggtgccgtgggacgaggcggaggggttcgcgctcaccaagtacccgtcgttccggaggctgctcgccggcgtcgtttttgtgtccggcgtctccgatgtctatttggtcttcggaaactcaggactgaatttcatccaaaaaaactcaggactggggaagaccgaggcgacgccgacacttgaggtggagccgcggagggaggaggcggcgccggcgctggaggcgatgccgcggagggaggaggtgacgccggcgccggaggcggaggcagaggcggaggcgtga

SEQ ID NO: 11208 - DNA, 1191 bp, Oryza sativa
  Clone ID: TFbOSC900362j.C1.o6.fg
atgtgcggcggagcaatcatctccgggttcatcccgccgtcggccgctgcggcggcggcggctgcggtggccaagaagcagcagggcaggagggtcacggccgacgtgctgtggccggggatgctgcggaaggggaaggcggcggcggcggaggaggactttgaggccgacttccgcgagttcgagcgtggcatgagcgacgacgaggcggaggggggcggcggcgaggaggaggaggacgacgacgacgtggtcgtggtggtccccccgccggcggcggcgaggttcgtcgtccgtgccgcggccaaggcggcgcccccaactgcagatgggatgttgactacaaagcttgtccaacatgatggacctactgctagatcagcaaagcacaagaggaagaatcagtacagggggatccgccagcgtccctggggcaaatgggcagctgaaatccgagaccccagcaagggtgtccgtgtttggcttggaacatataacactgctgaggaggcagctagggcatatgacgctgaagcccgcaagatccgtggcaagaaagccaaggtcaactttcctgatgaaccagctgttgctcagaagctctccctgaagcaaaacgctgccaagcaagagaaactagctccacctctgaagacctgtggcgatgatgctttctttcagctaaacagttcagacaatgatttgtttgcaatgcttgcaaaggtgcctgcaaagccggcagagcctgttgatctcatgcctccagtcaaacctcttgcttccactgagacattcgagatgaacatgctctctgatacgagcagcaactcatttggctcttcagactttggttgggaggatgacaccctgaccccagactacacttcagtcttcgttcctaatgctgccatgccagcatatggtgaacctgcttacctgacaggtggagcgccaaagagaatgaggaacaactatggtatcgccgtgccccagggaaatggcatgcctaatctcgcacaaaacatgcccaccttcgatcccgagatgaagtatttgccattaccttatgttgagagcagctcagatgaatcaatggacaaccttctgcaaaatgatgctacacaagacggggcaagcaacgagggcatctggagccttgatgagctgctcatggcagctggtgcctactga

SEQ ID NO: 11209 - DNA, 801 bp, Oryza sativa
  Clone ID: TFbOSC407938j.C1.o7.fg
atggagctccagttccagaagccaacacaagggcaatcccagcagcagcaatgccattaccaagtgccaaccgtgacagtggccaagaacaaagcgaaaaccaagtgcagcagcagtaagttcgtgggcgtcaggcagaggccctcagggaggtgggtggcagagatcaaggacaccacccagaagatacggatgtggctcggcacgttcgagaccgccgaggaggctgcgcgggcctacgacgaggccgcatgcctcctccggggctcaaacacgcgcaccaacttcgcaacgcaggctgcaccagactcgccgctcgcgtcgaggatccgcaccatcctcacccacaagaagctcaagaagagcatgccccagcctaccatcaccttcagcaccgcagtatatcaccatgctcgtagcactgtccctgctgctgcaaccagcacaagcaccagtggtgtcagccccagcagaagcaacagctcaagccttaattttgctacaaacctctctaattttgctatgagtggaggtgaagaattgcagctggcttcttcacaacaacaatatgatcagtcatgggcactcaacaccagcctactaccgattggggatggatgcgacatgtcaggcagcaatgcttgcccagtggcctcagaccaggataagatgaaggcagagaagcaaggctcccatggtatgaatggcatccaggagcaggaaacctttgatatgggtaatgatctgtgcgactccttgtgggatctgccccctatttgtcaactgtcctgcaagtattaa

SEQ ID NO: 11210 - DNA, 837 bp, Oryza sativa
  Clone ID: TFbOSC401961j.C1.o15.gm
atggcggggagggcggcgacgtggggacgcggagtgggggcgcggcgtggagcggagaaggcggcggcgcggacggtttcggcggcggttgccgtcgtggggctggcggctggaggaaggggacgacctgacagccacgccggcatgtacatcggctacacggcagacgccgccgcgtcctcctcctcctcctcctcgtcttcgtcgtcttcctcctcggagatgcttcggttcgacacgggctggcccgacgagacacctgcgccatcctccgtggcggggaggaggaggagcgcgggcggtgatcatcgtcaaggtcggggacagacggaggcggcggcggcgttcatcggggtgcggaggcggccgtggggcaggttcgcggcggagatccgggactcgacgcggaacggcgcgcgggtgtggatcggcacgttcgacagcgccgaggccgccgcgatggcctacgaccaggccgcgctctcggcgcgtggcgccgccgcggcgctcaacttccccgtggagcgcgtccgcgagtcgctccacgcgctctccctcggcgcggccgggggctcccccgtgctggcgctgaagcggcggcactcgaagcgaaagcggcgcaagaaagctgaactactcgccgccgccgccgccaccgccgcgacggcgaatgccacgccgcaaacgcggaggatcagcaagagcacggaattgactactgcgacgacggacgagcagaagcggttcgtcgtggagcttgaggacctcggcgccgagtacctggaggagcttctctggctgtcggagatcaatggtggtagtgaccctgctgactga

SEQ ID NO: 11211 - DNA, 849 bp, Oryza sativa
  Clone ID: TFbOSC413563j.C1.o9.fg
atggcgatcggagcggctccagcttccaatcagcctcatgacacgagcaacatactcgagaacgtgtgggccagcatcatgacgtcgtcgtcgtcgccggcggtgtcgtcgtcggtggcggtgtcgtcgtcggcggtgaccggtcaggaggagaattcggcgatcttgcagaggttgccgagcttggggaggtggatatccatgggcgcagaggagtgggacgagctgctgctcagcggggcggcgctcgcgtcggaatcctccggcgagctacagctcgtcgccgcctcccccggtgatcacaaccaggtcgtcggtggcggcggcggcgccaactacaggacgacggcgacggccgcggcgcggaggagctaccgcggggtgaggcggcggccgtggggcaagttcgccgcggagatacgcgacacgcggaggaggggcgcgcgggtgtggctcgggacgttcgcgacggcggacgaggccgcgctggcgtacgacatggcggcgctccgcatgcgcggccaccgcgcccacctcaacttcccgctcgccaccgtgcagaagcacctcgagcgcgacctcgccggcggccgctcctcctccgatcagacctccacccgcgcgcgccgcaggaggaggccgagagcgaacaccaccaccgatgccgcagcaagaagcgtcgtcttctccggcgtgcagaccgcgacgaactgtgatcacatggtgtcgttcgcttcagaaaaagatcaagtttcgatgcaagaatgctcgaaaagtgacgcaggagtgatcgatttcgaggagattggtggcgagtattgggattatttgttcccgcctcttgtataa

SEQ ID NO: 11212 - DNA, 296 bp, Oryza sativa
  Clone ID: TFbOSC18525j.C1.o1.gm
acgttgctagccgaccaacactcggccacacccagaccggccgtgagccgctgtggacgctccggataccgcggccgccgtcggcagccaccgccgccgacagcaccacctccaggagctcctgccgacggctgacgccgccaccgccgtgggcctcgcaccgccgtcgccaccgcgacgggcgctcctgccacgagctcgccctgctgccgccgccgccacgtcgtcgcgagctcaacaacgagctccttgaggtagctgtgcttgcggagcatgtcgatgacctcggcctttga

SEQ ID NO: 11213 - DNA, 966 bp, Oryza sativa
  Clone ID: TFbOSC101030j.C1.o17.fg
atgtgtggcggcgcgattctggctaacatcataccggccacgccgccgcggcccgccacggcggcgcatgtgtggcccggcggcgacggggagaagcggcggaaggttggtggaggcgggtgtgatgacgacttcgaggcggcgtttgagagattcggacgtgaggactctgagatggaggaggaggaggtggaggaggtggtggttgggaagaaggcggcggtgaggcggcggagggcgacgcccgccgccgggcgccgcgcgaggccgagcaagtactggggcgtgcggcgccggccgtgggggaagtgggcggcggagatccgcgaccccgtcgagggcgtccgcgtctggctcggcacgttcgccaccgccgaggccgccgcccacgcctacgacgccgccgcccgcgacctccgcggcgcgaccgccaagctcaacttcccctcctcctcctcctccaccgccgccaccccacgcccccgcaagtgccgccccaccaccgccaccgccacccccaaggcgacgacaccgaacgtcgtcgtcgtcgtcaacctcgtcgacaaagaggccgaggtcagcgagagctccggtgccagcagcagcgcgctgccggacttctcgtggcagggcatgtcggcgtcgtccgacgacgacgccgcggcgcagcaggcactcctcgacgccgccggcggcgccaagaagcgtccccggagcgagccccacgtcacctccgacgacgaagtgctcccggcgtcattcgacagtgacaacaacaccgccgccgccggcctgctcccgctcgacgatcctttcttgttcggcgaccagttcggcgacctcaacggcggcgcgttcgcctcgctcatggacgggctgttcgccgccggtgaagcgaacgtcgccggcgagagcgtggggctctggagcttcggcgacgactttctcaacgcgtcgtactattag

SEQ ID NO: 11214 - DNA, 624 bp, Oryza sativa
  Clone ID: TFbOSC400325j.C1.o13.hg
atggacgatcgcaggaggggagcagacgcaacgtggcctccattccccgccgacacgttcctctgcacccacccacgcggaccgttcggcctcgtcgaacagcagcactatagcggcagcatccatcccatccagccgtccaaaaccttgctatctcttgcagccctcccgtcctctggcacagtatataaagcgtacctgcaggtgcagcacctgatacctgcaaagcagaggcactggggctcctgggtcgccgagatccgccaccctctcctgaagacgaggatatggctggggacgtacgggacggcggaggacgcggcgagggcgtacgacgaggcggcgaggctgatgagcggcccagcggcgcgcaccaacttccctctcagcagcagcggcggcaacgcccgcagctgcctctccccgaccctgcgcgcgcggctggagaaatgctgcggcgcggggtcatcagcgcaggcgcaacagggcgccgtcgctggccaggacaacgacgatgctgctgcggcggcggcggcgatgggcgtcgacgacggcgacgagtacgtcgaggagatgatccaggagctcacgttctacggctccatagagatcgtccagccctga

SEQ ID NO: 11215 - DNA, 834 bp, Oryza sativa
  Clone ID: TFbOSC412549j.C1.o4.fg
atggagggagtgcaacatatggaagccacatcgaagtgtcaaacacgccacacacacactgagcagcagcagcagcagcagcagcatcagacagcgaggcacaacgagagatcacttgcgtttcaagccatcaaacgttttgacatggtgaagacggcggcgagcaatggcgcggcggcggcgaggcgcgtcggcggcggcggtgatgggaagagggcggcgtacaagggggtgaggatgaggagctgggggtcgtgggtgtcggagatcagggcgccgagccagaagacgcggatatggctgggatcctactccaccgccgaggcggcggcgcgcgcctacgacgccgcgctgctctgcctcaagggctccgccgccgccgacctcaacttccccgtccgcctcccgttcgacctccccgccgccgccatgtcgcccaagtccatccagcgcgtcgccgccgccgccgccgccaatgccaacgccaacgccagcagcagctgcagcgcggccgtcttcgccggcgtcgacgacagcggcggcgccagcgccagcgaggccagcacacctgcctgcagctccagcgatggtgccgcctcgccgtcgccggtgagctccccggagacggtcatcagcgacgtcgacgtggactacagcttgctcgccgacatcgaggcgttcttccagtctcccaagtgcatggagtacgccatgatggacccgtgcagcgcgttcttcgcgccgccgccgccgccggcgatggcgatggaggaggagtgcggctgggaggaggaaggcgacattgcgctctggagcttctcctctctggactga

SEQ ID NO: 11216 - DNA, 603 bp, Oryza sativa
  Clone ID: TFbOSC900026j.C1.o24.fg
atggatcgagacgagagcttgggcacgcagccattgaccgggaggcgggtgcgcgcggacacaaggcacccggtgtaccgcggcatccggctccgcagcggcaagtgggtctcggagatccgcgagccgggcaagtccagcaggatctggctcggcacgtacccgacgcccgagatggccgccgcggcgtacgacgccgcggcattggcgctgcgcggcgccgacgccgcgctcaacttccccggcacggccacgtcgcgcccggcgccagcctccggctcccccgacgacatccgcgcagcggccgcggccgccgccgcgatgatcggctccggtcaccgtggcaaccagcgcgccgccgacgcgagcacgtctcgcgcggcgacggcggcgccggaggccgccgtcgccgctggggcgggcgatcagaagcgcgtcgtggacgaggacgacgtcttcgagatgccgcggctgctggtgagcatggccgagggcttgatgatgagcccgccgaggctgagcccctcgacggacggcgtcggcggcgtgtcgccggaggacgacgaggacgaggacggcatgagcctgtggaaccattcctga

SEQ ID NO: 11217 - DNA, 687 bp, Oryza sativa
  Clone ID: TFbOSC401367j.C1.o10.fg
atggcagccagcgagcagagctccgagtcgtcgtcgacggcgtccacgtcgtcgtgcggcaagaaacagcaggtggccgggaagaggaagcgcgaggacgtcggcggcggcggggagcaggcggcggcggtggcgtacaggggggtgaggatgagggcgtgggggaagtgggtgtcggagatcagggagccgaggaagaagtcccgcatctggctcggcaccttcccgtgcccggagatggcggcgcgtgcgcacgacgtcgccgcgctcagcatcaagggcgcccgcgccgtcctcaacttccccgacctcgcccctgccctcccgcgcccggcctccctcgccccccgcgacgtccaggccgccgccgccctcgccgccgtcatgcaccaccacaaacacccctcctcctccacctccacctcctcgccgccggctgctcctccgccggacgaacaccaccctcgccacgagccgcagcagcctgagtcgagcagggaggatgaccagcagcagcagccggcggcggcggcggcggcgcagatggcggtggccgagctggtgttcgacgagctggcgccgctgtgggtggaggacgtggtggagttcgggacgtcggatcattgctggacggcgtacgatgcgcttgaccccatcggcttccagcctctcctctgggagtactag

SEQ ID NO: 11218 - DNA, 540 bp, Oryza sativa
  Clone ID: TFbOSC18350j.C1.o8.fg
atggcggcgcgcgcgcacgacgccgccgcgctcgtcgtcaagggccccgccgcggtgctcaacttcccgggcgccgccgcgtccctcccgcgcccggcctccgccgccccgcgcgacgtgcaggccgccgccgcgcgcgccgcggccatggcgctcgacgccgtcgtccccgcgccgccgtcgccgccgcctccgttaatgccgccccaggcatcgccatcagaggcggctcgcgcgcacgcgctcgttgcccaggtcgaccaggacgacgacgacgaggagctggaggagatcgtcgagctgccgcccatcgacgagctcgacgccgcggcagagctcgtgttcgccagcagcggcgctacgacgttccactacgaccccgccgccgaccagccgtggtacgaccagccggcggcgtgtctgcaggacggcggcggcggcggcattgccgtgcacgacgcgctcgggttcgagctggaccatgtctgggcggacggcgtcgtggcgtccggcttcggcgcgctcctgtggaacatgtag

SEQ ID NO: 11219 - DNA, 957 bp, Oryza sativa
  Clone ID: TFbOSC403609j.C1.o3.fg
atgtgcggtggtggcaaggtggcgagcccgccgggaccacgactgccgcggctcgccggcgccggcggcgaggaagaagaggaggaggcggcggctggaatgctgtcgaggcatggacaggcgagggagatgtctgtgatggtgtccgcgctggcgagggtggtcgccggcggcggcggcggcgaggcggaggagtggtggccgccggcgtacggcgcggcgccgctgccaccgtctacttcccctgcatctcacgagcacgcagcagccatggcggcagggcagtacgcgccggcgacgtcgtcggcgatggcgtcaccgcgcgagcaggcctcctcgccgtcgtccggcgacgccgccggcggcggcggcggcggcggcaggaagcggtaccgcggcgtgcggcagcggccgtgggggaagtgggcggcggagatccgcgacccggtgaaggcggcgcgcgtgtggctcggcaccttcgacaccgccgaggccgccgcgcgcgcctacgacgacgccgccctccgcttccgcggctgccgcgccaagctcaacttccccgaggacgccgcgctcctgccgcctccgcctccgcctcctgcgccggcgccggcgccgccgcagtcgcaggggatggtcggcgtcggcgaggagtactccgagtacgccaggttcttgcagggcgccggcgagccgccgcatttcctcgagcagataatggaggactcgcctcggccatcgacggcggccggcgcgtcgtcgtcgtcgtcggggcagtcgtcgtttccgttgttctacagcttcgctggacatgagcttggcggcaacgaagcgaaccttgcccgcccgccggagagcggcggcgctggtggtgacggtgggaggggctcctcgccgccggtgacttggccgggctatgggtggggtgcgccgccgccgtgggacccatcgagatag

SEQ ID NO: 11220 - DNA, 1329 bp, Oryza sativa
  Clone ID: TFbOSC400189j.C1.o6.gm
atggccgaccaacgccggagatttcgcggcggaggagattggcaggcgagcgtcgacgatgtggtggacgacggtggcgagctcgaggccgcggcggcggcggcggcgaggggatcggtgctgtccggggagtaccaggctcaggagatgtccacgatggtgtcggcgctgacctgggtcgtcgccgccggccacgacgaccacggcggcgggcagtggtctggccttgtggacgtgccggcgacgacgctcgccggcggcggcggcggcgactacgggcatggcgcacaggggagctattattactacggcgcagcgccgacgtcgacaccggagttcgtagcaggagggcagcaagagcagctcagctccgacgtgccgcagggcggcgctagtctcggtctcgccatggacgagcactcgcccacatacaccgtcgaagcgtcgtcctccgccgatcagcacggcggcggcggcggcgggcggcggtaccgcggcgtgcggcagcggccgtgggggaagtgggcggcggagatccgcgacccgcacaaggccgcccgcgtctggctcggcaccttcgagaccgccgaggccgcggcgcgcgcctacgacgaggccgcgctccgcttccgcggcagccgcgccaagctcaacttccccgaggacgcgcgcctcagcagcccgcccgccggcgccggcgccggtggcgccaccgcagcggcgcagacggtgccggtggcctacccggccagcgcggtctcggactacttgcacggcggcgccgccgctgccatgagtagctctttggggccttactcctccatccccacctcctcggtcaccgtcgcctccgtgccgtcgtcgtcctctgccgcgtcgtcttcttcgggttacggcgcgccggcggagcacggcgaggcggtgcagtggaccagctggccggacgctcagctgcagccggcgcccgcgcgggcggagcaaaccacgggcggggcgaccacgccgacgacccgcgcacacgccggcttcttcgtcctcttcttcttcttcttcttcttccacccccgcgacccgccgccgcccccgcgccgaagctcgtggcctcctccgccgtccacgtccacggccactagctaccatctagaagcttccggaagcttcgggaaggaagccgccccccgcgccgccttgccgggcctcgcaatgccggaggagaaggagtacgcgcccgtgcccctcggccaggcgccggaggcggtggaccccgaggacccggtcaagtcgccgccgcggcccacctcgccggcgaactccacccgcaaggtctag

SEQ ID NO: 11221 - DNA, 1182 bp, Oryza sativa
  Clone ID: TFbOSC401948j.C1.o30.fg
atggacagctccagctgcctggtggatgataccaacagcggcggctcgtccacggacaagctgagggcgttggccgccgcggcggcggagacggcgccgctggagcgcatggggagcggggcgagcgcggtggtggacgcggccgagcctggcgcggaggcggactccgggtccgggggacgtgtgtgcggcggcggcggcggcggtgccggcggtgcgggagggaagctgccgtcgtccaagttcaagggcgtcgtgccgcagcccaacgggaggtggggcgcgcagatctacgagcggcaccagcgggtgtggctcggcacgttcgccggggaggacgacgccgcgcgcgcctacgacgtcgccgcgcagcgcttccgcggccgcgacgccgtcaccaacttccgcccgctcgccgaggccgacccggacgccgccgccgagcttcgcttcctcgccacgcgctccaaggccgaggtcgtcgacatgctccgcaagcacacctacttcgacgagctcgcgcagagcaagcgcaccttcgccgcctccacgccgtcggccgcgaccaccaccgcctccctctccaacggccacctctcgtcgccccgctcccccttcgcgcccgccgcggcgcgcgaccacctgttcgacaagacggtcaccccgagcgacgtgggcaagctgaacaggctcgtcataccgaagcagcacgccgagaagcacttcccgctacagctcccgtccgccggcggcgagagcaagggtgtcctcctcaacttcgaggacgccgccggcaaggtgtggcggttccggtactcgtactggaacagcagccagagctacgtgctaaccaagggctggagccgcttcgtcaaggagaagggtctccacgccggcgacgtcgtcggcttctaccgctccgccgccagtgccggcgacgacggcaagctcttcatcgactgcaagttagtacggtcgaccggcgccgccctcgcgtcgcccgctgatcagccagcgccgtcgccggtgaaggccgtcaggctcttcggcgtggacctgctcacggcgccggcgccggtcgaacagatggccgggtgcaagagagccagggacttggcggcgacgacgcctccacaagcggcggcgttcaagaagcaatgcatagagctggcactagtatag

SEQ ID NO: 11222 - DNA, 519 bp, Oryza sativa
  Clone ID: TFbOSC1745j.C1.o11.fg
atggcgaggccgcagcaacgataccgcggcgtgcggcagcgccactggggctcctgggtctccgagatccgccaccctctcctgaagacgcggatatggctgggcacgttcgagacggcggaggatgcggcgcgggcgtacgacgaggcggcgaggatcatgtgcgggccccgcgcgcgcaccaacttcccgctcgccgacgccaccgcggcggcggcggcggccgccgcgtcctcgtcgttcctctccgccgcgctcgtcgccaagctccaccggttcaacctggcgtccgtgcaggccacgcagcggcagagggaggccgccgccaccgccgccgcggcctcttcggcctccgccacgacgccgccgctcggcaatgccgccgccgccgacgacgacgcgcggaccaccacgacgtacggcgcggaatggagcggcaggttcctcgaggagcagcacgtcgagcagatgatcgacgagctgctcgactccaacttctccatggagatctgctactag

SEQ ID NO: 11223 - DNA, 386 bp, Oryza sativa
  unsure (1)..(386): unsure at all n locations
  Clone ID: TFbOSC407709j.C1.o1.gm
gggcgtgcggcggcggcggtgggggaagtgggtgtcggagatccgggtgcccgggacgcgggagcgcctgtggctcggctcctacgccaccgccgaggccgccgccgtcgcgcacgacgccgccgtctgcctcctccggctcggcggcggccgccgcgccgccgcaggcggaggcggcgggctcaacttccccgcccgcgcgctcgccgcggcggcggccgcctcctcctacggcggcgccggcggtctcctgtccccgcgctccgtgcagcgcgtggcgtccgacgccggcatggccgccgacgcgcagctcgtggacctgcgccgcgaccacccgcccgcngcngccgccgcctcatcctccggcagcggcgtggcgggagacg

SEQ ID NO: 11224 - DNA, 783 bp, Oryza sativa
  Clone ID: TFbOSC900060j.C1.o3.fg
atgtcgtcgcggcagccgataggatccggaggcggcggcgcgcccccggattggcacgacgtcgagccgcagtggcagccggtggacgacgtggtcaccgtggccgccgccgcagcctacctcgccgcgccggccggggcgacgctgtcgtcggaatcagctgaccggcggtggcggccggtggggccttcagccgccgccgccgccgctgccctgcaggccgtggaggcgcaaggtgcggcggcggcggagcggcactaccgtggcgtgcggcggcggccgtggggcaagtgggcggcggagatccgggaccccaacaaggcggcgcgcgtctggctgggcaccttcgacaccgccgaggccgccgccgccgcctacgacgacgccgcgctccgcttcaagggcgccaaggccaagctcaacttccccgagcgcgtccgcggccgcaccggccagggcggcttcctcgtctcccccgctgtgccccgcccgccgccgcatggtgttcccgctcccgcgcccgccgtggcgccggcgccgttccccgacctgatccagtacgcgcggctgctgcggagcggggaggacgccgccgccgccgccgccgtggccggcattgcggccaccgcggcgccggcggcgcagatcctggacttcgcggcgcagcggctcgtcggggtctctccggcgatggcgccgcgcccgccgtcgacgctgccgacgacgacgaccgcggcgtcgtcgccgagcgcgtggcctcacggcggcggccacgggagctag

SEQ ID NO: 11225 - DNA, 702 bp, Oryza sativa
  Clone ID: TFbOSC400143j.C1.o10.fg
atggggctgacccacctgggcccagcccagatccagcagatccaggcccagttcttggcccagcagcagcagcagagggccctggccggcgccttccttcggccgcgtggccagccgatgaagcagtccgggtcgccgccgcgcgcggggccgttcgcggcggtcgccggggcggcgcagtcgaagctctaccgcggagtgcggcagcgccactgggggaagtgggtggcggagatccgcctcccgaagaaccggacgcggctgtggctcggcaccttcgacaccgccgaggacgccgcgctcgcctacgacaaggccgccttccgcctccgcggcgacctcgcgcggctcaacttccccaccctccgccgcggcggcgcccacctcgccggcccgctccacgcctccgtcgacgccaagctcaccgccatctgccagtccctcgccacgagctcgtccaagaacacccccgccgagtcagcggcctccgcggcggagccggagtcccccaagtgctcggcgtcgacggaaggggaggactcggtgtccgccggctcccctcctccgcccacgccgctgtcgcccccggtgccggagatggagaagctggacttcacggaggcgccatgggacgagtcggagacattccacctgcgcaagtacccgtcctgggagatcgactgggactcaatcctctcataa

SEQ ID NO: 11226 - DNA, 1933 bp, Oryza sativa
  Clone ID: TFbOSC400143j.C1.o13.gp
tgagaaaggtacatatagttacataagctactgaatttccaacatgtaacaagggattacagcttaattctcgaccggccgcgccgtgaaaaaaacaaccggcagctcaaccaggagatcagatcactgagtacaccaacgacacttgcacgacgacgtaataccaacgaccttactactactgagtactgactagttactgctactcgcagcagccatggccgacgtctaaaatgccaccgagccatggaagccacggaattcagagaagattacacagctagttgagttgagtgactctagcttgacgaagactactactagtactagtaatagactagtagtagctgcttctgcttgtttatgagaggattgagtcccagtcgatctcccaggacgggtacttgcgcaggtggaatgtctccgactcgtcccatggcgcctccgtgaagtccagcttctccatctccggcaccgggggcgacagcggcgtgggcggaggaggggagccggcggacaccgagtcctccccttccgtcgacgccgagcacttgggggactccggctccgccgcggaggccgctgactcggcgggggtgttcttggacgagctcgtggcgagggactggcagatggcggtgagcttggcgtcgacggaggcgtggagcgggccggcgaggtgggcgccgccgcggcggagggtggggaagttgagccgcgcgaggtcgccgcggaggcggaaggcggccttgtcgtaggcgagcgcggcgtcctcggcggtgtcgaaggtgccgagccacagccgcgtccggttcttcgggaggcggatctccgccacccacttcccccagtggcgctgccgcactccgcggtagagcttcgactgcgccgccccggcgaccgccgcgaacggccccgcgcgcggcggcgacccggactgcttcatcggctggccacgcggccgaaggaaggcgccggccagggccctctgctgctgctgctgggccaagaactgggcctggatctgctggatctgggctgggcccaggtgggtcagccccatcggcccgttcgtcgccgacgccgcaggtgaagcagcatgatactgcgaagagtacagcggaggtagctgcgagaaagacgaggtggtggtggcggcggcggttgtgatagaggaagtgggataagatggggtgggcatgtaagaatcttggctcatggaaggagaagaagagtagtagtggtggcagggggaggaagcggaggaagaagaagcgctcctaataaaaggttcgagcgctttcatgagctcctgatccgaggatgcgatctggtgtgtgctagtgttatacttgtacatgtctattgctgcggccatgaggactggatggaggtagaagatgaagatggcaagggtatggaaatcttaaaaacaggaaagaaaaaaggggtgctttttggatgcaagaagtgaaaaatcagccctgttcctcaataaaagtagagaaacaaagggtgcaaagaaagaaagagcttttgaatagaaagaagaaaaatttgagaggatgaactagaagggtattgcaaaacaaccctttctggccttagaaaagcaaaggaagcctaaaaatcggcaagaatccagaagagaaaaaaggttctctggatctctgttcctcctaggagaagttgatgggatgagaaagaacctgtacgcacaagaactcctctttcgatctaataaacccgaaagaagtaccttcttgggacaggacctttcttgtgtgttacctgcttctaaaaagatcagagaagttcagagaacaaacctgttgctgctcgtcgctgatgatttttttcagatcgctcaacctcaccgtggactgggatgggatgggatgtggctttggtgttcttggggtggggttgaggc

SEQ ID NO: 11227 - DNA, 900 bp, Oryza sativa
  Clone ID: TFbOSC401580j.C1.o12.fg
atgtcccggtcgcgcacggtgcggatcttctgggacgaccccgacttgacagactcgtccggcgaggacgaggggtgcggcggccggagggtggggagcatggtgcgggagctgccgcctgcccagatgcccgtggcgcaggcaggttttgctcctgctgctgcagccgctgctgctgctttgccggagcagtgcagcggcggggacggtgatatgggaagaagggtcgttggtggcggatgcactgtgggtgtgggacggaggaggttgacgaaggacggagggcctggcgcgccgagcaccaagttccgcggcgtcaggcggaggccgtggggcaagttcgcggcggagatccgcgacccgtggcgcggcgtgcgcgtctggctcggcaccttcgacaccgccgaggaggccgcgcgcgtgtacgacaacgcggccatccagctccgcggccccagcgccaccaccaacttctccgcctccaccaactccgcgggtgcacaagatccggtggcagttggctacgagtccggcgcggagtcctcgccggcggtgtcgtccccgacgtctgtgctccgcaaggtcccgtccctgtgctccctggccgaggacaaggacgactatgaggccggcccctgcgagcccgcaactgccgccggttccaacctcaccgttctcgaggaggaggagctcggcgagttcgtgccgttcgaggacgcgccggtctacggcggcagcagcttctgggacttcgagcccgagtccggcttcctgtacgccgagccgtcgtcgcctgagacgccgtgggacgccggcgccacgtcctccggcgaggcccaagactacttccaggacttgcgcgacctgttcccgctcaacccgcttcccgcaattttctaa

SEQ ID NO: 11228 - DNA, 624 bp, Oryza sativa
  Clone ID: TFbOSC400601j.C1.o37.fg
atgtgcggcggtgcaatcatctacgactacatcccggcgcgccgccggttgtgcgcctccgacttctggcccgacgccgacgactccgacccccacacccccgctcccgagaaaccgccgcgcgcgaagagggagcggaagaaccagtaccgcgggatcaggcagcggccgtgggggaagtgggcggcggagatccgcgacccggtgaagggggtgcgcgtctggctcggcacctacccgaccgccgaggccgccgcgcgggcctacgaccgcgccgcgcgccgcatcaggggcgccaaggcgaaggtcaacttccccaacgacttcggcgccgcccccgcgccggccgcggcggcggcgaaggccgtccctcgcgtcgcgcccacgccggccgtgctcccgccgcccaagatggaggcggtgtccgagggcgccggcgcctgctcctccgacgaggtcaaggagctgtccgaggagctgctcgcgtacgagaactacatgagcttcctcggcatcccctacatggagggcggcgccgcctccgccgccggcgccgaggaagccgcggcgcccgccgggctctggaccttcgaagactacgagctgccgtcgctagcgctctag

SEQ ID NO: 11229 - DNA, 945 bp, Oryza sativa
  Clone ID: TFbOSC400903j.C1.o14.np
atggataaccacgccgtcgcggtccagcaacgcgacacggcgccccggccccgcgcccgcgcgcgcgcctccgtatccagtatccagggggggggggggcctggctgggctgaccacgtcgccctcccacgcccgccacgttgccacccgcgccgccctcccaccccatgtcggcgaccgctcgcgttcgcgtcctcctccatccatccgcatcgcgccgtgctgccaagcggcgcgccgcctcacgtgtcggccggggcgcgcgacacgggcggcgcggcggggctcgcgcgaccccaccactcatttccccaggagaaaaagccgaagccaagacacgcaggtgtcgcctcgcctcgcctcgccctcgcgccgctgcggaattccgcgaggatggataggagggaggccaccgtcttcttgcccccgccgccgccaccgcagccgacgcagccgcagcagcagcctgcggcggcggcggtgagggctccggtaggcgggaggggtgggggaggagggaggcagtatcgcggggtgcggatgcggaagtgggggaagtgggtggcggagatccgcgagccgaacaagcggtcgcggatctggctcggctcctactccaccgccgtcgccgccgcgcgggcctacgacaccgccgtgttctacctccgcggccgctccgcgcgcctcaacttccccgaccagctcgacggcgcgggtggtggtggcgcgggcgccggcggcgccgaggaccacagggagctcaccgccgccgtcatccgcaagaaggccgccgaggtcggcgcccgcgtcgacgcgcagcactccgtcgtcggcgccgcggcgcccgtgccgctccagccgccgcagcccccgccgccccagcgccgccggaccaagaaccccgacctcaaccgggagcccaccccggacacctccgacgacgag

SEQ ID NO: 11230 - DNA, 1332 bp, Oryza sativa
  Clone ID: TFbOSC400466j.C1.o4.fg
atggcgaagagatcgtctcctgatcctgcatcatcttctccatctgcatcatcctcgccgtcgtctccttcctcctcttcctccgaggattcctcttcgcccatgtcgatgccctgcaagaggagggcgaggccgaggacggagaagagcaccggcaaggccaagaggcccaagaaggagagcaaggaggtggctgatccttcttccaatggcggcggcggcggcaagaggagttctatctacaggggagtcaccaggcatcggtggactggcagatttgaggcccatctgtgggacaagaattgctccacttcacttcagaacaagaagaaagggaggcaaggggcttatgatagtgaggaagcagctgctcgtgcatatgaccttgcagctcttaagtactggggtcctgagacagtgctcaatttcccactggaggaatatgagaaggagaggtcggagatggagggtgtgtcgagggaggagtacctggcctccctccgccgccggagcagcggtttctccaggggtgtctccaagtacagaggcgttgccaggcatcaccacaatgggcggtgggaggcacggatagggcgggtcctggggaacaagtacctctacctgggtactttcgatactcaagaggaggcagccaaggcctatgatcttgctgcaatcgaataccgaggtgccaatgcggtaaccaacttcgacatcagctgctacctggaccagccacagttactggcacagctgcaacaggaaccacagttattggcacaactgcaacaagagccacaggtggtgccagcattacatgaagagcctcaagatgatgaccgaagtgagaatgcagtccaagagctcagttccagtgaagcaaatacatcaagtgacaacaatgagccacttgcagccgatgacagcgccgaatgcatgaatgaaccccttccaattgttgatggcattgaagaaagcctctggagcccttgcttggattatgaattggatacaatgcctggggcttacttcagcaactcgatgaatttcagtgaatggttcaatgatgaggcattcgaaggcggcatggagtacctatttgaagggtgctccagtataactgaaggcggcaacagcatggataactcaggtatggcagaatacaatttgtttgaggaatgcaatatgttggagaaggacatttcagattttttagacaaggacatttcagactttttagacaaggacatttcaatttcagatagggagcgaatatctcctcaagcaaacaatatctcctgccctcaaaaaatgatcagtgtgtgcaactga

SEQ ID NO: 11231 - DNA, 1005 bp, Oryza sativa
  Clone ID: TFbOSC101030j.C1.o19.fg
atgtgtggaggcgccatcctcgccgagttcatcccggcgccgtcgcgcgccgcggcggcgaccaagcgggtgaccgccagccacctgtggccggccggctccaagaacgccgcccgcggcaagagcaagagcaagaggcagcagaggagcttcgccgacgtcgacgacttcgaggccgccttcgagcagttcgacgatgactccgacttcgacgacgcggaggaagaagacgaaggacacttcgtgttcgcgtccaaatctcgtgtcgtcgccgggcacgacgggcgcgcggcggcgagggcggcgagcaagaagaagcgggggcggcacttccgaggcatccggcagcggccatgggggaagtgggcggcggagatccgcgacccgcacaagggcacgcgcgtctggctcggcacgttcaacaccccggaggaggccgcacgcgcctacgacgtcgaggcgcgccgcctccgcggcagcaaggccaaggtcaacttccccgccacgcccgccgccgcgcgcccacgccgcggcaacacgagagccaccgccgtgccaccgccggcgacagcacccgccgccgccccgccgcgcggactgaagcgagaattctcgccgcctgctgagaccgcgctacctttcttcaccaacggcttcgtcgacctgacgaccgccgcggcgccgccaccggccatgatgatgacgagctccttcaccgacagcgtcgccacgtcggagtccggcgggagccccgccaagaaggcgaggtccgacgacgtcgactcgtccgagggcagcgtcggcggcggcagcgacacgctgggtttcaccgacgagctggagttcgacccgttcatgctgttccagctcccctactccgacggctacgagtccatcgacagcctcttcgccgccggcgacgccaacagcgcgaacaccgacatgaacgccggcgtcaacctgtggagcttcgacgacttcccaatcgacggcgcccttttctga

SEQ ID NO: 11232 - DNA, 170 bp, Oryza sativa
  Clone ID: TFbOSC422801j.C1.o1.fg
atggcgggggtgggggtgggggaaggggaggtgaggtaccgtggggtgaggaggcggccgtcggggaggtacgcggccgagatccgggacccggcgaagaagaccccgatctggctcggcacgttcgactccgcagaggccgccgcccgcgcctacgacgccgccgcgag

SEQ ID NO: 11233 - DNA, 969 bp, Oryza sativa
  Clone ID: TFbOSC401103j.C1.o24.fg
atgtctcaaacccaatcaaactccaaccaaactcacctacctacccccaacccatccagagctagagctatgtgcggcggcgcgatcctcgccgacctcataccgtcgccgcgctccggcggccacaccaaaaagaacaagcggcggcggatcagcgacgacgaggacttcgaggccgccttcgaggagttcgacgccggcgacgacgactccgactccgactccgagtccgaggaggtagacgagtacgacgtcgtcgtcgacgacgacgacagcgaggacggcgtggtggttcttccgccgccgccgccgccgccgccggtgattccacatgagcgccatggcgcgaggcggttccgcggcgtgaggaagcggccgtgggggaagtgggcggcggagatccgcgaccccgtgcgcggcgtgcgcgtctggctcggtaccttccccaccgccgagtccgccgcgcgcgcctacgacgccgccgcccgccgcctccgcggcgccaaggccaagcccaacttcccctccgcgccgccgccctcggctgctgctcaccgccgcaagaagcgccgcgcccacgccgccacgcgctcgccgtcgtctccgcccgccaccagcgaggtcacggcggcgtccgcgtccgcgtccagcgatgtccccgcgccggcgttcgcttccttcgtcggcgagcccgggcacggcggcgccaagtcgatgccgacgacgagccacacctcgcagccagccccgccggcgacggtggcgtccgagaacgtcgacgacccggaggtgttcgacccgtacgacgtccacggcggcctcgcctcctacttcgccggcggcgcgtacgagtccctggagagcctgttcgcgcacggcggcgacagcgccgccgtcgaccaagcggcgagcgaccactggccggcggcgctatggagcttcgcagacgacggctcgttctgcttctga

SEQ ID NO: 11234 - DNA, 1056 bp, Oryza sativa
  Clone ID: TFbOSC400259j.C1.o124.fg
atgacggtggcgggggcgtcggagctcatgtcggggtattaccaggcgcaggagatgtcgacgatggtgtcggcgctggcgcgcgtcgtggcgggcggcggcggcggcggcggcgacggcgacggcgaccagtgggcgtggtcgtcgccgtcgccgtcgtcgtcagcggcggcggcggcggcgcgtggcgtgcaggagaggaggcgggaggagcaggcaatgcacgagctggcgggatacgcctgcgggggcgcgccatcgccggagttcgcaggatcggagcagagctcggacacccagagcgcgagcgcggcgaccatggacgagcaccactcgccggtgggcggcggcgggaacgcggaggggcccgacacgccgcggcggcggtaccgcggggtgcggcagcggccgtgggggaagtgggcggcggagatccgggacccgcacaaggcggcgcgggtgtggctcggcacgttcgagacggcggaggccgcggcgcgggcctacgacgaggccgcgctccggttccgcggcagccgcgccaagctcaacttccccgaggacgcgcgcctctacccgaccgccgccaccaccaccaccgcggcgccgcccccggcgccggtcgcggcggcatcgccttccgcggccatctaccccggcgcctcccagagcgccgagtacctgcgctaccagatgcttctgcaggggaggcttaccaccgccacccccaaccaaggcacccttcttccgttctacggcggcggcggcggcggtggctccatgaccaatccctacggaggcggtggcggcggcgccatgagcggcttcctcggctcctactactctttccctaccccctctgtttccgtggccaccgtcccctcctccacctcctccgcgccgggcaactactactcgtcccacggcggctcgcaccagagcatgtcggcggcggaggagtggaactgggagaacgccctggtctacccggcgacggcggcgtcatggtcggagtcgagctatcaccaccacccgccgccgccgcacacgcagtag

SEQ ID NO: 11235 - DNA, 987 bp, Oryza sativa
  Clone ID: TFbOSC418226j.C1.o20.fg
atggacttccaccacggagacgccgacgacttcgccctcgagttcatccgcgagcaccttctcggcgtcgacggcgccaccgccacggccaccgagccggcggacctcgaggtcgtcgaaccggcggcggcgtacccgcctatgtcgtggcaagagcagcggcagcaggagcagcatggttgtcacgtagaactaacggacgagcacctggaatccgcacccgctgctgaggcagcggcggcgttccgaacggcgcccgcgcagccggcggccgaggtgatgatcaagttcggtggcgagccctccccggtgaggccgtcgtcgtcgctgaccatatccctgccaccgagctcgttcggcagctgggcgtccgcggcggcgccggccgcggccgccgtggaggacttccgcaagtaccgcggcgtgcgacagcggccgtgggggaagttcgcggcggagatccgcgacccgaagaggcgcgggtcgcgcgtgtggctgggcacgtacgacacccccgtggaggccgcgcgcgcgtacgaccgcgccgccttccgcatgcgcggtgccaaggccatcctcaacttccccaacgaggtcggcacccgcggcgccgaactgtgggctcctcccccgccgccacccgcgcactccgccgccgcctcgacgacgaacaagcggaagcggcagccgtcggaggaccccgacgacggcgtcgaggtgatcggagtggtaagcaaggccgtcaagaccgaggcgccgacgtccaactcgtcgtcactgtcgtcgtccctgacgtcgcgggacacgacgccggccacgtcgtcggcgggggcggagcacgccggcgcggccgccgagagttcgccggcgacgccgtcgagctggagctgggagcagtactgggaagcgctgctcggtggcctcccgccactgtcgcctctgtcgccgcacccggcgttggggttccctcagctcaccgttaactga

SEQ ID NO: 11236 - DNA, 957 bp, Oryza sativa
  Clone ID: TFbOSC418226j.C1.o21.fg
atggacttccccggagacgccgaggatttcgccctcgagttcatccgcgagcacctgctcggcggcgacgcccctgtactgccgcctgctgctgtaccggcggcggcggcgtacctacccaccagtaccatgttcttgccacagcagcagcgaggctacgcaggcctaacgccgcaggagtacgtggtggattccgccccggctgctgatcaggccgcgttccgtgatgatcagcccgatccggcggccgacgtgatgatcatgttcggaggcgagcgcttccctgcggtgaagccgtcgtcgtcgtcgtcgccatcgctgactgtcaccgtgccccccagctcgttcggatcatgggcgccggccgccgtgcccgccgtggcggccacggccgccgccgtggaggacttccgcaagtaccgaggcgtgcggcagcggccgtgggggaagttcgcggcggagatccgcgacccgaagcggcgcgggtcgcgcgtgtggctgggcacgtacgacacccccgtggaggccgcgcgcgcctacgaccgcgccgccttccgcatgcgtggcgccaaggccatcctcaacttccccaacgaggtcggcacacgcggcgccgaactgtgggctacgccgccgccgacgaacaaaaggaagcggcagccggaggacgacaccgccgccgccgacgacgtcgaggtgatcggagtggcaaacaaggctgtaaagaccgaagcgccgacgtccgcctactcatcgtcgtcactgtcatccatgtcgcgggacacgacggcgaccacgtcgtcggcggggacgtcgactgggtcgtcggagcccacgagttttccggtggtgacgccgtcgagctggagctgggaccagtactgggacggcctgccgccgctgtcgcctctgtcgccgcacccggcgttggggttcccgcagctcaccgttagctaa

SEQ ID NO: 11237 - DNA, 582 bp, Oryza sativa
  Clone ID: TFbOSC400698j.C1.o29.fg
atggagcaacgggcggcggcggcggcgcagcagcggcaggggaggaggcagagcgcggcggcgtgcgggatcaggcgggcgagggcggagacgcggcacccggtgtaccgcggcgtgcggttcagggcggggaagtgggtgtcggagatccgggagctccggaagccgagcaggatatggctcggcacgtacgccacccccgagatggccgccgcggcgtacgacgccgccgcactggcgctgcgcgggcgcggcgcggcgctcaacttccccgacgccgcgcggtcgcgccccgccccggcgtccgcgtccgccgacgacgtgcgcgccgcggccaccgccgccgccgccgcgatggcacaccaggaggaggacgacgacagtcggcgtcagctcgaggacgggggcggcggcggcggcgtggtggacgaggacgacgtgctggagatgccgaggctgatggtgagcatggcggaggggctgatgatcagcccaccgccggtgatgctcggcctgcaggcggacggcggtggaataatggacgagggcggcggcgtggtgaggttgtgggatcacagctga

SEQ ID NO: 11238 - DNA, 1098 bp, Oryza sativa
  Clone ID: TFbOSC409411j.C1.o25.fg
atgtgcggcggcgccatcatccaccacctgaaggggcacccggaggggtcgcgccgggcgacggaggggctcctgtggcccgagaagaagaagcccaggtggggcggcggcgggaggcgccacttcggggggttcgtggaggaggacgacgaggacttcgaggccgacttcgaggagttcgaggtggactccggggactcggatttggagctcggggaggaggacgacgatgacgtcgtcgagatcaagccggccgccttcaagagggccctctccagagataacttgagcaccattaccactgccggatttgatggtcctgctgcaaagtctgccaaaagaaagagaaagaaccaattcaggggcatccgccagcgcccttggggtaagtgggctgctgaaatcagagatcctcgcaagggtgttcgtgtctggcttggcactttcaacagtgctgaagaagctgcaagagcttatgatgctgaagcacgcaggattcgtggcaagaaggccaaggtgaattttccagaggctccaacaactgctcagaagcgtcgtgctggctccaccactgctaaagcacccaagtcaagtgtggaacagaagcctactgtcaaaccagcattcaacaatcttgccaatgcaaatgcgtttgtctacccatctgctaacttcacttcaaacaagccgtttgttcagcctgataacatgccatttgttcctgcaatgaactctgctgctcctattgaggaccctatcatcaactctgaccagggaagcaactcatttggctgctctgactttggctgggagaatgataccaagacaccagatattacatcaattgctcccatttcaaccatagctgaagtcgatgaatctgcattcattaagagcagtaccaacccaatggtccctcctgttatggagaacagtgctgttgatctgcctgatttagaaccctacatgaggttccttctggatgatggtgctggtgactcaattgatagccttctcaacctggatggatcacaggatgttgtcagcaacatggacctctggagctttgatgacatgcccgttagcgatttctattga

SEQ ID NO: 11239 - DNA, 730 bp, Oryza sativa
  Clone ID: TFbOSC400766j.C1.o8.np
atggctcccaggaacgccgccgaggccgtcgccgtcgccgtggcggagggcggaggagccggcatggagcccaggttccgcggcgtgaggaagcgcccgtggggcaggtacgcggcggagatccgcgacccggccaggaaggcgcgggtgtggctcggcaccttcgacaccgccgaggccgcggcgcgcgcctacgacagcgccgcgctccacttccgcgggcccaaggccaagaccaacttccccgtcgccttcgcgcacgcccaccaccacgccccgccgccgccgctgcccaaggcggcggcgctggccgtcgtcagcccgaccagcagcacggtcgagtcgtcctcccgggacacgcccgccgccgccccggtggcggccgcggccaaggcccaggtgcccgcctcgccttcgctcgatctgagcctcgggatgtcggccatggtggccgcccagccgttcctgttcctcgaccgcttggagtacgacccggacggaggagacgcgcggaaaaccgcggcaccaacgaccatctacgacgacgtcgcttgccgcgggccccgtggagaacgagtccacccgtgcacaggcgtgcgcagcgggagcagagctcgtaggacgccgcgccgcaccgcgtcgcgtcgcccaggggagggggaggagtcgtcgtggtcacgctcacacagtcacacttgctcccacggcgcgacaaccacgtagccaaagc

SEQ ID NO: 11240 - DNA, 591 bp, Oryza sativa
  Clone ID: TFbOSC400555j.C1.o42.gm
atggaggacgacaagagtaaggaggggaaatcgtcgtcgtcgtaccgcggcgtgcggaagcggccgtggggcaagttcgcggcggagatccgcgacccggagcgcgggggagcccgcgtgtggctcggcacgttcgacaccgcggaggaggccgcgcgggcgtacgaccgcgccgcattcgccatgaagggcgccacggccatgctcaacttcccgggagatcatcatcacggcgccgcaagcaggatgaccagcaccggctcttcttcgtcctccttcaccacgcctcctccggcgaactcctccgcggcggcgggccgcggcggctccgatcggacgacggacaaggtggagctggagtgcctcgacgacaaggtcctggaggacctcctcgcggagaccaactatctacgaggagagcgggacgcggccgggttcgcgacggcgcacacgcaggctgggccggtgatgggctgcgtgggagcacacgcgattcgccgccgcccgctggagtccccgccgcccgccagcgactcgccgacgccccttcgccacgccaccaccgccatgttgcaaaccctcccgttgtga

SEQ ID NO: 11241 - DNA, 828 bp, Oryza sativa
  Clone ID: TFbOSC401067j.C1.o3.fg
atgggaggcaaccaggagtacatgatccgattcgacggccacatcgacgatgcctcgccgagctccgccactgcagagccaccgccgccgctgccgccgccgcgtcccttcgccgggagggcgatctcggccgagagggagcactctgtgatcgtcgcgacgctgctccatgtcatctccggctacaggacgccgccgccggaggtgttcccggcggcgcgcgcggaggtgtgcggggtttgcgggatggaccagtgcctcgggtgcgagttcttcgccggggagtccggggtggtgtcgttcgatggcgcggagaaggtggcggcggcggccgccgcggcggcggctggcgccgcggcggggcagaggaggaggaggaagaagaagaacaagtaccgcggcgtgcggcagcggccatgggggaagtgggctgcggagatccgcgaccctcgccgagcggtgcgcaagtggctggggacgttcgacaccgccgaggaggccgccagggcgtacgaccgcgccgccgtcgagttccgcggcccgcgcgccaagctcaacttcccgttccccgagcagctctccgcgcacgacgacagcaatggcgacgccagcgccgccgccaagtccgacacattgtctccgtcgccgcgcagcgcagacgccgacgagcaagtagagcacacgcggtggccgcagggaggaggaggcggcggcggcggcggcggcggcgagacaggggaccagctctgggaaggcttgcaagacctgatgcagctggacgaaggcgggctcagctggttcccacagtcgtcagattcttggaattga

SEQ ID NO: 11242 - DNA, 954 bp, Oryza sativa
  Clone ID: TFbOSC900147j.C1.o10.fg
atggtgccctcttcacggaaagtccgtgttttctgctctgatcctgatgccactgactcctctgatgaagatgaccagaataagaaggaaaggagattttcaagggaaatactaattccaatggaaaactccaaggcatccaaacctgttaagacccttgttcaatgtggcacaaagactgtaaaggattccgagaaggaaccgacgagcaaatacaggggtgtgcgccggcgggcgtggggcaaatgggctgcagaaatacgtgaccctgtgcgaaaatcaaggaaatggattggcacatttaacagtgaggaggaggccgctgcggcatatcttgcacaatcaaaccagttccatgaagagttgatggccttgaaaatccaatcttctgtatcagagcaggaagatttgtcaagctctgttactatatcctgcgtgtcctcatctcagtcatgtgaccagaagattcaggcaaagccacaagaacacaagagagtgtcagtggtggttaaccgtgagaccgttgagcagaagtttaaggcacagccacaagctcagaagattaaggcacagccagaagtgcagaagagagtgtcagtgaagattagccatgagactgaggatgagcacttgctgaacttgccgtccacgcctaaaggcaaagagatttcgatgggcgctgttcttggcaggatagatgagattcctgtgagcaactgtgtgggccatattgatgaatttccacctgatgatttcactaggcttgcagatgcgttcccagttagtgattttatcggcatggcagatgtgccactgggcgatgattacattggccttgcagacatcagccacctgccgctgcctatcacagatctgaagttcgacctcaatgcagaactcaactgggacgggttcgactttgcttcattggaacaagaactcaactgtctttga

SEQ ID NO: 11243 - DNA, 2604 bp, Oryza sativa
  Clone ID: TFbOSC401715j.C1.o2.fg
atgtcatcctttatccttcccttcctcctccctccttctctctcttctctcccccttttctcttccccgttcgaacgcctcggcggcagcggcggccgggggccggagtggcgacggcgaccgcgccaccgcctgccctgtctccaagctggcctaccatcgcgcaagctccgccaggggctccgccgggggcgcggcatgggcgcccgcgcgcagcccacgccgtcgtgggcgcgggagccactgttcgagaaggccgtgacgcccagcgacgtcggcaagctcaaccgcctgctggtgcccaagcagcacgcggagaagcacttcccgctgcggcggacgagctccgacgcctccgccaccgccgccgcggccacctgcaactctgcaagggcgtgctcctcaacttcgaggacggcgaggggaagcagccagagttacgtgctgaccaagggatggagccgattcgtgagggagaagggcctccgcgccggcgacaccatagtcttctccggctcggcgtatggccccgacaagctgctcttcatcgactgcaagaagaacaacacggcggcggccaccggcgacgagaagccaattacaagcggcgaagcaacacgcgtcgtgaggctgttcggcatggacatcaccggcggcggcggcgattgccggaagcgggagagggcggtggaaatggggcaagaggcgttcttgatgaagaggcaatgcgtgtgcaccacactacaccgtccgctcagcgaaggcgatataacagcaatgcaggtgcagcaacgcaagcccaaggcttgcgccgagagcgccgcggcggcgcgaggagcggatcagcagcagtgcgacggcaggccgctggaggcgggcgaggagtccctggagcgctccgtgccgcggaagaggaagccagctgcggcggtggctgctgccgagaagcgatggagctccgtggcctacgtcgtgctcgccgcctttgtcatggcgacggtcttcgccgttcttggcgggcggcgccccgccgtctggatcgccgccaccaaggccctgcgtcgaggttccgacgataaatcgattccattggcacgaagcgccgctgacaaactcctcggcggcctcttgcccgaaggattcgacgagaaatcatgtcgcagcaggtacgagtcatacctgtaccgccggaacccgggccgacgaccatctccgcacctcgtggcgcggctgcggatgcacgaggagctccagagacggtgcggccccaacacggagtcgtacaaccgcgccgtgcaacggctgagggacggcggcgccgccgaggccgacgcgcactcgccggacgacgagcagtgcaagtacgtggtctccatctcgtaccgcggcctcgggaaccgcatcctcgccgccgcgtcggccttcctctacgcggtgctcaccggccgcgtcctcctcgtcgacccgagcaacgagatggacgagctcttctgcgagccgttccccggcacgacgtggctgctcccacgcgacttcccgctggcgtcgagctacgcgaacttcagcgccgacaccgccgagagctacggcaacatgctgaagaacaaggtgctcgggacggacgggagtactgacggtgacatgcccgcggcgcagatgccggcgttcgcgtacctccacctggaccacgactacggcgacggcgacaagatgttcttctgcgacgacgaccagcggctgctgtcgaacatccagtggctggtgatgaggacggacacctacatcgtgccgtcgctgttcctggtcaccacgttccaggacgagctcgacgcgctcttcccggagcgcgacgccgtgttccaccacctcggccggtacctgttccacccggccaaccatgtctggggcctcgtcgcgcggtactaccgcgcgtacctcgcgacggcgcggcagctggtcggcgtccaggtgcgcgtcttcgaccaccggcaggcgaagtcgccgcacgtcgtcctcgagcagatcacgtcgtgcgcgtggaaggagaagctgctcccggaggtactcgacgcggtggaggacgcggccatgcccacgccaccgacgacgccgcacggcgggagcaacaactccaaggccgtcctgatcacctctctccggccgtggttctacgagcgcgtcaaggctatgtactgggagcgcgcgacggcgaccggcgaggacgtgagcgtgcaccagccgagccacgaggagtaccagcacttcggcgagaagtcgcacgacggcaaggcgtgggcggagatgtacctcctgagcctgtgcgacgtgctggtgaccagcggctggtcgacgttcgggtacgtggcgcaggggctcggcgggctgaggccgtgggtgatgtacaagccggtgaacatcacggcggtgccggacccgccgtgcggacgggacgtgtccatggagccgtgcttccactcgccgccgttctacgactgcaagacgaagcgcggagtggacaccgggacaatactgccccacgttcggcactgcgacgacgtgagctggggattgaagcttgttgatccgaatggaagtccgaactag

SEQ ID NO: 11244 - DNA, 257 bp, Oryza sativa
  Clone ID: TFbOSC900114j.C1.o17.gm
atgcgtggaggaggaggaggaggagactctgaagtgaactgccatggcgagcatgaagcagcagcagacgccgggagctccgcggtgaccgcggcggcggcggcctcctcctccgccaccgccccgtggccgcatgcgaaggggagcgaaggcggcggcgatcaactcggagctgtggcacgcgtgcgccggcccgtcgtgtcgctgccgccggtgggcagcctcgtcgtctacttcccgcaaggcacagcgagcag

SEQ ID NO: 11245 - DNA, 2895 bp, Oryza sativa
  Clone ID: TFbOSC400188j.C1.o2.fg
atggcggggatggctgcggcggcggcggcgttggtggcggcgaagaggtgcatgaacgccgcgtgcggggccccggccccgtccccggcgggaggggagtggaggaagggctggccgctgcgatccggtggcttcgccgtgctctgcgacaagtgcgggttggcatatgagcagcttgtgttttgtgatatatttcaccaaaaagaatctggctggagggactgctcattttgtgggaagcgtctccattgtggatgtattgcttcgaagaactcctttgatctacttgatagcggtggagttcaatgtgtcacttgcattaaaaattcagcagttcaatctgttccaagtccagtcgtccccaagcttttttcatcccaaaataaccagagactttttggcaaaagcgatgatttattgtctggtagaccactggagacatcctcccttatggtcgatgccagaaacgatgatcttactattatcgctaagaacaaccttccattcatggtgaaaaacgtagaagctgggcaaagcagtaatattttgaggcaaaaagaactagagaatggtgcgaggcagattaaatgggaactacctacccttagtatcggggacatgggaaggatacctttcctaactagatctcaaagtgcattggagtctcgaagagatgaaaataaagacccaactacagaaagcacgacaagtgaatcactttctgaggcatgcctcaacatgagcttgggaattgctagtaatggaaacaagttggaggctacttcaactgtggaaagacctatgctatcaccaacaacaggatttcctgaaggaagagagcttaccactgcattatctccatttcagcatgcacaaagggctcgtcattttctgaccagaccgccaagggttggtgaaggtgctgtttttgatccaacgaaagatatgcttccgcatcttcgtgttgcaaggccacctgcagaaggtaggggccgcaatcaattacttcctcgatattggcctagaataacagaccaagagctacagcaaatttctggagagtatccttattatatttatcaacttcttggtgatattatgcataattcaaattccaccattgtccccctgtttgagaaggttctaagcgccagtgatgcaggccgcatagggcgccttgttctaccaaaagcctgtgcggaggcatatttccctccaatttctcagccagaaggtcgtcctttgacaattcaagacgcaaaaggcaaagaatggcattttcagttcagattctggccaaataacaacagcagaatgtatgtcttggagggggttacaccatgcatacaatcattacaattacaggctggtgatacagtgacttttagtcggatagaacctggagggaaacttgttatgggcttccggaaggccacaaacactgtcagtttgccagactcacagatttcagctattgccaacggttccattcttggggatacattattttctagtacaaatgagaatttagcaatagtaagtggttattcaggatttcttcagtcaataaagggggctgcagatctccatacaagctctatatacgatcatcatgtgaactcagctgacggggatgttagttggcttaagacagataaattcggcagcaggccagatgaggggtctttgcagtttttaaagagaggccgcaatattggttccaaaagcaggaggctttcaatggatgctgaagaagcctgggaactaaagctttactgggatgaggttcaggagctgttgcgtcctgctccaactgcaaaacctactgtcgtgatgattgaggactacgaaattgaagagtatgatgaaccccctgtgtttgcaaagagatcaatttttaccatccgttctactggggaacaagatcaatggattcaatgtgatgattgctcaaaatggcgccggttaccacttaatgttattgttgcatccaagtggacatgtgctgacaacacaatcgactcaaaaagctgttcctgctctgcacctgaagaattaacccccaaagaattgcacattgttcttcagcaatacgaagatatgaggaggcgaaggaacagctttggttttaagcagaacatccccgaaatggatgcggtcagccttgatgcctttgccactgccgcagtctatggtgatgtcgggaaccaaggttccccttctgttgcgacaaccacaaagcacccccggcatcgccctggctgcacctgcatagtgtgtatccagccacctagcgggaagggcccgaagcacaacccagcttgcacctgcaatgtctgcatgaccgttaggcgtcgcttcaagacactgatgatgaggaagaagcaacggcagtcggagcgagaggaggccgaggcgagcaagaagatcgcttggatgaacagagatgagcctgagggaagcagcctgtcaagatccccacagacggttgacactacccgagacggagatgtgaccatgttcgacaaggttgacatcaacaagggccacatagacctgaacttccaccctactgccgtccgagacgaggagcggcatggcgggcagcctcgggtgagcatggtcagcctcctggaggtggccaaccggccactggagaactacatgaagcagaacggcctgacgagcttggctggggagcaagggagctccagcacatgtacaggtgcagccacggttccgcagccggctctggtggagagcgaagagcggacgtccaacaacgacggcgggcgtgtggcgacggcagagcagccggagagcatggccgtcgacgaggctggagataaccagccggacaaggctgccggtgactctgctgctgctttagcttga

SEQ ID NO: 11246 - DNA, 1128 bp, Oryza sativa
  Clone ID: TFbOSC100150j.C1.o1.fg
atggagttcactacaagcagtaggttttctaaagaagaggaggacgaggagcaggatgaggcgggaaggcgagagatccccttcatgacggccacggccgaagccgcgcctgcgcccacgtcgtcgtcgtcgtctcctgctcatcacgcggcttccgcgtcggcgtcggcgtctgcgtcagggagcagcactccctttcgctccgacgatggcgccggggcgtctgggagcggcggcggcggcggcggcggcggagaagcggaggtggtggagaaggagcacatgttcgacaaggtggtgacgccgagcgacgttgggaagctgaaccggctggtgatcccgaagcagtacgccgagaagtacttcccgctggacgcggcggcgaacgagaagggcctcctgctcaacttcgaggaccgcgcggggaagccatggcggttccgctactcctactggaacagcagccagagctacgtgatgaccaaggggtggagccgcttcgtcaaggagaagcgcctcgacgccggggacaccgtctccttctcccgcggcatcggcgacgaggcggcgcggcaccgcctcttcatcgactggaagcgccgcgccgacacccgcgacccgctccggctgccccgcgggctgccgctcccgatgccgctcacgtcgcactacgccccgtgggggatcggcggcggagggggattcttcgtgcagccctcgccgccggccacgctctacgagcaccgcctcaggcaaggcctcgacttccgcgcttcaaccccgccgccgcgatggggaggcagggcggcgggctcaccggtggtgctcgactcggttccggtcatcgagagccccacgacggccgcgaagcgcgtgcggctgttcggcgtgaacctcgacaacccgcatgccggcggcggcggcggcgccgccgccggcgagtcgagcaatcatggcaatgcactgtcattgcagacgcccgcgtggatgaggagggatccaacactgcggctgctggaattgcctcctcaccaccaccatggcgccgagtcgtccgctgcatcgtctccgtcgtcgtcgtcttcctccaagagggacgcgcattcggccttggatctcgatctgtag

SEQ ID NO: 11247 - DNA, 936 bp, Oryza sativa
  Clone ID: TFbOSC400240j.C1.o9.fg
atggagttcatcacgccaatcgtgaggccggcatcggcggcggcgggcggcggcgaggtgcaggagagtggtgggaggagcttggcggcggtggagaaggagcacatgttcgacaaggtggtgacgccgagcgacgtggggaagctgaaccggctggtgatcccgaagcagcacgcggagaagtacttcccgctggacgcggcgtccaacgagaaggggctcctgctcagcttcgaggaccgcacggggaagccatggcggttccgctactcctactggaacagcagccagagctacgtgatgaccaaggggtggagccgcttcgtcaaggagaagcgactcgacgccggggacaccgtctccttcggccgcggcgtcggcgaggccgcgcgcgggaggctcttcatcgactggcgccgccgccccgacgtcgtcgccgcgctccagccgcccacgcaccgcttcgcccaccacctcccttcctccatccccttcgctccctgggcgcaccaccacggacacggagccgccgccgccgccgccgccgccgccggcgccaggtttctcctgcctccctcctcgactcccatctacgaccaccaccgccgacacgcccacgccgtcgggtacgacgcgtacgccgcggccaccagcaggcaggtgctgttctaccggccgttgccgccgcagcagcagcatcatcccgcggtggtgctggagtcggtgccggtgcgcatgacggcggggcacgcggagccgccgtcggctccgtcgaagcgagttcggctgttcggggtgaacctcgactgcgcgaattccgaacaagaccacgccggcgtggtcgggaagacggcgccgccgccgctgccatcgccgccgtcatcatcgtcatcttcctccgggaaagcgaggtgctccttgaaccttgacttgtga

SEQ ID NO: 11248 - DNA, 705 bp, Oryza sativa
  Clone ID: TFbOSC408625j.C1.o9.fg
atgagctcgtcgacggcggccagcatcgggccgccgcagccgccgccgccccccacgtctcccgaggaagagaagtgcctcaacttggagctctggcacgcctgctccagcccgctcgtctgcctcccctccgtcggcacgcgcgtcgtctacttcccgcaaggccacagcgagcaggtgtcgtggctcagtgcaatgggatgctcacttctgtccaggggaaaccatcaaagaccatggtggattgccttgccatcttcgtgctggtgcttcttctccaagactctcgccgagcgcgaggcgttctattacgtggttgacaacgctgctgtcatggacttcatcactgtgaacaccagcggctccatcctcatcaacatgctcaagcctgagtataggaaatttggtgaatgggggaacaggtgcatttggtttacaacaattcagttctctgtaatctccaaggatctagcttcttacatatcaattcagccagtaagtggccaaactatctgtgttggattgttatgggagtatattataggtcattttctatcttcaacagctcttgtatcattcatttgttgctccaaaacacatgggtatattgcttcagcattctataatgcaccccaggagcttaaaaaggatattgagctaatgatagtgatgaccaggagctatctaaggaaaaagaataaataa

SEQ ID NO: 11249 - DNA, 595 bp, Oryza sativa
  Clone ID: TFbOSC100150j.C1.o1.np
atcatgtaagatcaatgtgtgttttgatttttattctgtgatgaacaattggcatctgtgattattggttttgatatttggagattatcgtcgaagtggttttggagataatcaattttcaggtgatgatcagattcactgttattttatgtgaccggtctgaccgggctgtgtatgccggctagagttgatgcacgtggttggtgaagattctatatggcatacgatggaggtattgtgtgcgtatgggatgcggagtcgaatttggaaggagtccaaatttggtacaattggttatgtaaagtttgtatcttgtactagaggatttcctaaggtgtttaggactcttagtatgagtttggttcgtggctttaggctgcctacctcatgtataaatagagggggagcgtctaaccggcaactcaccggcggtcagaccgatggcattgtggcggtcagaccggcggcggcgacagcgagcggcaggcgactttggcagttcgaccgatcattctacatcggtcagatcggcggcatccactcggtcagaccgacagatcaatctcggtcagaccgatctccgtcgatttcgagg

SEQ ID NO: 11250 - DNA, 2289 bp, Oryza sativa
  Clone ID: TFbOSC101706j.C1.o7.fg
atggcggcggcggcggcggcgctcgccgacgacggcgacgggatcgtagaccgtgccatgtggctcgcatgcgccgccccgaactccggccgcctccccgccgtcggctcgatggtcttctacttcgtcgacggccacgcagagcagttttgccagttccccgcacctctcctggagcagctcgccgtccccggcccccgcgtcttcctctgtacggtggccgccgtccgcctccgcgccgacgccctcaccaatgaggcctacgccgacatcaccctcgacccggtcgccgaccacgacgtcccgcgcctgctccccgctcccgctcccgccgccgccgccggtggccagcagcagcagttgcgttacttcgtcaagacgctgatgtcttccgatgccgagtaccgagaccgcttcgccgtccccatggatgttgccaaggacgtcttcccgccgctggtcgacgccaaagcggtccagcccctcatcgtcaaggaccttcaaggatctccgatgacgttcgactacggcaggaacggcaacagggtcacgctcgccaaggtctggaagaaatttcgggacgacatggacttcgtcgacggagacagcgtcatcttcatgcgtcgccgcgacgacgacgagctgtacgtcggggtgcggcgccagcgcacgctcgacaagccactcaggacgcgccgatccaggcctccgacaccgcttccggtggccgtgcaggaggtgatagctgcagcgggtcgcgcggcggccggcgagcagttcactgcgacgtaccgctcgcggcaggacggcgacgagttcgtcgtgccacgcgaggtggtggaggaggggctccgcctccgctccagattcactcccgagatggaggtggagtttgtttgggcccttgaggatggcgcgccgcccagcgtcgggccacatggcaagatcaccgccatccacgacactacatggatgtggcgatcagtcgagattggatggacgggaggttcagagatgaacaagtacgccaacttctggcaagttcgattggttggttcggacgattttgcttctgctgctcctccccctcctctttctccaaagaggctgaagagttcagagcagtgcccgtcgcgtccaccagagccccttccaggcagggtgtttctatgtaaagtcacagctgtccgcttggatgcaacaagaaatgagctctttgcgaccatgtccctcatcccagtcgccagagaccaagccatccagcctcaggcgcccgctgatccaggtccaagctcccctcaagtgcagactactcttgtttcatttgtgaagcctctcacgtgcaccgatgctgtcaagaatcggtatcggttcatagtgcccaagagagagaccgccatgggtgttctaccccagctccaattgaacgaacacgtgccgctctatatcaaggacatgcacggaaaggagtgggtgattaattatacatggaaagagtacacccacatgctttccagtggctggataaaattcgcgaatgccaaccgccttgtcacaggtgacaacgtagtgtttatgcgcagcatggacagtggcgagagatacatggggctgcgtcgcaccctcaagccggagccagtgtcagttgacgaagtgattgaggccgtatggagggcggcgcgtctcgagccgttcgaggtgacctacctctcgcgccaggacggcgacgagtttgttgtaccgtgtgggattgtacataatgctctacgagcgaagtttaccccaggaatggtggtaaacttcgtatgggctgttgaggaggacaggctgccgaatgttgggccacagggaaaggtcattgccatagagaactatgcaacctcaatctggaggatgattcaggttgagtggccatcctgtgcaggaatgaacagatatgttaatttttggcaaattcgtgaagttcttggagagagttcctttgaggcatccacttgcattgtgagaagtcaagattactcgccggcaccacagaggaatttagttaatgcgcttcagcttcctgacggaacaaaacagcttcagcaaaacaagaagtctgtttcctcgtcatccaccttccgactctttggcaaaaaaatgacacctggcgtgccaccaagaagagacaccagtggtctttctggacaggtatcattattcagccattatcttccccatgatgaggacgatggacaagttccaacgatgaggcaacggctagagacgctgtttcctgataacatctga

SEQ ID NO: 11251 - DNA, 1224 bp, Oryza sativa
  Clone ID: TFbOSC101706j.C1.o6.fg
atggcggcggcggcggcgccgctcgccgacgacggcgacgggatcgtagaccgtgacatgtggctcgcatgcgccgccccgaactccggccgcctccccgccgtcggctcggtggtcttctacttcgtcgacggccacgccgctcagttttgccagttccccgcccctctcctggagcagctcgccgtccccggcccccgcgtcttcctctgtacggtggccgccgtccgcctccgcgccgacgccctcaccaatgaggcctacgccgagatcaccctcgacccggtcgccgaccacgacgtcccgcgcctggcccccgctcccgctcccgcacccgccgccgccgccggtggccagcagttgcgttacttcgtcaagacgctgatgatttccgacttcgacttccgcatccgcttctccgcccccatggctgacgccaaaggcgtcttcccgccgctggtcgacgccaaagcggtccagcccctcctcgtcaaggacctccatggatctccgatgacgttcgactacggcaggaagggcaagagagtcacgctcgccaaggtctggaagaaatttcgggacgacatggacttcgtcgacggagacagcgtcatcttcatgcgtcgccgcgacgacgacgacgacgacggcgagctgtacgtcggggtgcggcgccagcgcacgctcgaaaggccactcaggaatacgatgcgccggtacaggcctccgaccccgccccaggcggccgtgcaggaggcggtactagccgcggcgggtcacgcggcggccggcgagcggttcacggtggcgtaccggtcgcggaaggacggcgacgagttcgtcgtgccacgcgaggcggtggaggaggggctccgcgccagactcacctcgctggcggaggtggagtttgtgtgggccgtcgaggacggcgcgccgcccatcgtcgggccacggggcaaggtcaccgccattgccaccggacagctgtggcgaaatctcgagattgtatgggatggaaactcggagatggacatgagtgccaacttttggcaagttcgacctgttgaggaagttgatatttctccttctactcctcctccgaagaggctcaagaattgtgagattgatgataccgcctctacttctgtttccgtcgacaatggagatgagcaagttccaacgatgaggcaacggctagaggcgctgattcctgataacatctga

SEQ ID NO: 11252 - DNA, 2778 bp, Oryza sativa
  Clone ID: TFbOSC400219j.C1.o15.fg
atggctgctgcagcgacggcggcggcctcgccggttgaggggctcaccggcggcggcggcggtggtggtggaggagtggacgggctgttcgtggagctgtggcgcgcgtgcgcggggccgctggtgacggtgcccgccgtcggggagagggtcttctacctcccgcagggccacatcgagcaggtggaggcatcgacgaaccaggtcgccgagcagcagggggctccgctctacaatctgccatggaagatcccgtgcaaggtcatgaacgtcgagctcaaggctgagcctgatacggatgaggtgtatgcgcagctcaccctgcttccggagaagcagcaggatgggaatgggagtggtaacgggaatgtgtccaaagacaaggtggaggaggaagaggtggtgccaccagctgcaactgagcggccccgggtgcactccttctgcaagacgctcactgcgtcggacacgagcacgcatggtggcttctcggtgctgcgccggcacgcggatgagtgcctcccaccactgtacagcttttttgataggctaattgtagcaatgcctttgacgtcgctgcttgatcaggatatgagtcagcatcccccaacacaagagctggtggccaaggatcttcatggggttgagtggcgcttccgtcacatcttccgaggtcagccacgaagacaccttctccagagtggttggagtgtttttgtgagtgccaaacgccttgttgctggagatgccttcatatttctcagaggtgagaatggggaactacgagttggagttcggcgtgcaatgagacaacaagctaatattccatcttcggtcatatcaagccacagtatgcatcttggtgttcttgcaactgcatggcatgcagtgaacactggaaccatgttcactgtgtactacaagccaaggactagtccatctgaatttgtggtaccacgtgatctgtacaaggaatctctgaaacgaaatcattcaatagggatgagattcaagatgacatttgaaggcgaagaggctgcagagcaaagattcactggcacaattgttggagtaggtgattctgacccatctggttgggctgactcaaaatggcgttcccttaaggtgcgatgggatgaagctgcttctgttcctcgtcctgatagggtttctccttggcaaatagaacctgctaacagcccttcccctgtcaaccctcttccagcaccccgaaccaagcgggctcgtccaaatgttttagcttcctcacctgacttgtctgctgtaaacaaagaagttgcttcaaaagtcatggcaaactcgcagcaaaatggtcttccaagggccttccacagtcaagaaaacatgaatttgagaagtcgttttggtgatagcaatgagctaaatacttcccaaaagcttaccatgtggtcttcaggaagcaatcaagagaaaaataatgtttctgtccagagggagctaggttcacagagttggatgcagatgagaaggcctgatggttcctctgagatattatctggatttcaaccactgaaagatacgcggaaccctctgagttcatttcctagtcagatatctggaaaccgttcaaatacgtggaacacaatcaatgttcattatcccgaccaaaatgccaatcataatatgtaccctggcacatggtctcttatgcctccaaacactggttttggtgtgaatcagcagaactacctaatgacgcctgacatcacactccctcaaaggtctcttaatgccaagtttggtgggaatggagcattcacttcgcttcgggcccatggcatagatcagcgctcctctggttggcttgggcatattgagccaagttctcacattgatgatgcctcatcgagtcttatcaagccacagcctttggttattgatcacaatgttcagaaagctaaaggctcttcatgcatgctatttgggatttctcttgacagccctgcaaaacctgaactattgatatccccaccaagtgttgcatttgatgggaagctccaacaggatgcacttgaagaggatgaatgctctgatccttccaagactgtgaagccacttgatggagctcagcacgattctgctagagagaaacatcagtcatgtccagatggtaccaaaaacattcagagtaaacagcaaaatggttcctcccgaagttgcaagaaggtccacaagcaaggaatcgcactcgggaggtcaatagatcttacaaagttcacttgctatgatgagttgattgctgaactggaccagatgtttgacttcaatggtgagctgaacagttcaagcaagaactggatggtcgtttacactgataatgagggtgacatgatgttggttggtgatgatccttggaatgaattctgcaacatggttcataaaatcttcatctacacgagggaggaggtccagaagatgaatccgggtgccctaaactcaaggtcttttgtggtttgcaagaacagaagacgacatatccatggtaggaaggaatcttttcgtggtgtagtagtagtagctggtgctttatatgtatcgggtaagccccgcagtaccccatttgtagatggtgcttgtcctggtatcagttgcccgctcttcgttttcgacaagttttgggtgtgctttgttgaggttttaagttattgtatgatatgccccgtagtagtgaaaggtgctgaggccaagctgccgcgcccggtgcgcttgcttgcttgcgctcttcctccctcctaa

SEQ ID NO: 11253 - DNA, 141 bp, Oryza sativa
  Clone ID: TFbOSC1558j.C1.o4.gm
atgaaggcgagggggtatgttgttgtgttgttggagaaggcggaagcgacggggagatgggcgtcatcggcggcggaggcgacgagcggccacggtgtcagcgacggggtcttctatcatgccaaggctctcaaaaactga

SEQ ID NO: 11254 - DNA, 3114 bp, Oryza sativa
  Clone ID: TFbOSC400924j.C1.o6.fg
atggcgagctccggcggagggggtggtggtggggaggagggggagggcaggggggcgaccaaggtgaaccaggagctgtggtacgcgtgcgcggggccgctcgtctcgctgccgccgcaggggagcctcatcgtctacttcccccagggtcacagcgagcaggctgatcctgacacagatgaggtttatgctcgaatgactctccagccagttagcaatgtgacccagtgtgacaaggagacattgctagcatcagagcttgcgctgaagcaaaccaggccacaaacagaattcttttgcaaaacactgaccgccagtgatacaagcactcatggaggtttctctgtgccacgccgtgccgctgagaggatttttcctcgtcttgacttctccatgcagcctcctgcccaggaactgcaggcccgggatttgcatgataatgtttggacatttcgtcatatataccggggtcagcctaaaaggcatttactgactacgggctggagcctatttgtcagtggaaagagattacttgctggtgattcagtcttgtttattagtgatagtatgcatattggaattcttgctgcagcagcccatgctgcagcgaataacagccaatttacaatatattataacccaagggccagtacttccgaatttgtgattccttttgccaaataccagaaggcagtgtatggtaaccaattatctcttggcatgcggttcagaatgatgtttgaaactgaagagtcaggaacaagaaggtacatgggtacaataactggtataagtgatctggatccagtaaggtggaaaacatctcattggcgcaatattcaggttgcatgggatgaagcggcaccaactgagagacgcaccagggtttccctctgggagatagagcctatcattgctccattcttcatctacccctcaccattattcaccgcaaaacgtccaaggctacctgggatgacagatgacgagactgaaatggacggtcttctcaagagggccatgccatgggttggtgaggagatttgcaagaaagatctgaatattcagaacagtgtagtgcctggtctaaatctagctcagtggatgaacatgcagcacagctcctcgcttcctggcacggttgtgcaaccagagttactaaactcattaagtggaaaacctgtacaaaatttggctgcagctgatttatcaaggcaaatcagttttcacccgcagttcttgcaacaaaacaacatccagttcaacactgcgttggtacctcaacaaaaccaacagacagaacaattagcgaaagttatccctacaccaaaccaattgggaagtgttataataccgcagaaggtggttcaggattgcaactctgaacaaaggcagcatgtggttactcaaccagtgcaaggcagccagccaaacataaacattccacagcctcagcttgttgttcaggctcagcttcagcaaccgcaagtcattctccaggcgcaactgcagcaacctcaagttgttgtccaggcccaactccagcaaacgcaaccttcggtccaaagtcacactgtcttacaaggaggtcttcaacaaatccagcttctccagcagcaacagccacatgtgcagcaccagcagataccgcaacagttacatcatcagcagcagcaaacacaacagttgcaacctgtccagcaggttcagcagtcagtacaggaacatcagcaaataaagatacaacctgttcatgtttccatggatgcaagtatgaatacgcaggtggcagatcatcaaatgaaactacaactactcaaggctttacagccacagcagcctctgatctcagagcagcagaagatgcttttggatttgcagcagcaagtgataaattcacagtcagctcctcagcagtgtgtacagcaaaaggttcagtctcaccaagttcaagacttaactgggaatgtcattcctaattcaaaatcagacatcgctacttccatgggtgctagttctttgcatgtagctggtggacgccaattattgaagacagatgatgttccgtctacttcaacatcaccatccactaacagcaatcctgttcttctgcaatccatcccaagtagctccaagaaccaaagtttaactacagcaggaaagacatctcaatcatctgttgtgttgggtcctacgatcgaacaggacacaaagccatatcaaaatgtaaagcaaacagttatgattcccaagacgacagaacaaaggccagctactggacaagactgcataaataacaatcctcaaatggattacttggacacatcctcttcagctacttcggtttgcctttcccaggctgatggatcattgcaacaaaactttccaccttcatccttccaccagcatcacttgctaaaagacacagttccagatagcgagtttgaggttacagatccaagaaataaccttctatttggggtgaatattgatggtcaactgggtttaccacttaatgcagacctgcttgcgaatgacattggaaccgataaatacatggatcagttgccaggaaatggcatttctaacttcatttcatcaaaggattctcaacaagagttatcatcttcaatgatttcacattcatttggagttgctgatatggcattcaattctatagattctgcaatcaatgataccccattcttaaatagaaattcccggtctgcagcaggtcctgcacatcaacggatgagaacctacaccaaggtacacaagcgtggtgcggtgggaagatcaattgacatcaatcgatattctggatatgatgagctgaaacatgacgttgctcggatgtttggtattgaggggcagcttggtgatcaaaatagagttggctggaagctagtatatgaagatcacgagaaggatgttctactagttggtgatgatccatgggaggactttgtgaaatgtgtacgatgtatcaggattctttctccacaggaagaaatgcagatgagattagtcggcgactttggagacagctttctacccaaccaagcttgcagcagctctgatgggggtcatccctggaggataaccggcgactag

SEQ ID NO: 11255 - DNA, 1545 bp, Oryza sativa
  Clone ID: TFbOSC900261j.C1.o1.fg
atgagctcgtcgtcggcggccagcatcgggccgccgcagccgccgccgccccccgcgccgcccgaggaagagaagaagtgcctcaactcggagctatggcacgcctgcgccggcccgctcgtctgcctccccaccgtcggcacgcgcgtcgtctacttcccgcaaggccacagcgagcaggtggcggcgtcgacgaacaaggaggtggagggtcacatcccgaactaccccaacctgccggcgcagctgatctgccagctccacgatgtcacaatgcatgcggatgtggagactgacgaggtgtacgcgcagatgacgctccagccactgaacccagtaaggcgcctggggtttttgcatgatgtttgcagtgctgaggttttgatgcaggagcagaacgatgcgtaccttcccgcggagatggggataatgagcaagcagccgacgaattacttctgcaagacattgacggcgagcgacaccagcacgcacggggggttctccgtgccccgccgtgctgctgagcgcgtcttccctcctctggatttcacacagcagcctccagcccaggagctaattgcacgggatattcatgacatcgagtggaagttcaggcacatctttcgaggccaacccaaacgacacctgctaaccactggctggagcgtttttgtcagtgctaagagacttgttgctggagattctgtgcttttcatatggaacgagaaaaaccagcttttacttggaataagacgtgccagtcggccacagactgtgatgccttcctctgttctttcaagcgatagcatgcacataggtctccttgcagcagcagctcatgctgctgctacaaacagccgtttcactattttctacaacccccggtatatggggactataactgaagttagtgatgcagacccagtccgttggcctagttcctattggagatctgtgaaggttggttgggatgaatcaactgcaggggaaaggccaccaagagtttctttatgggaaattgaaccattgacaacctttccaatgtatccatctctgttcccactgagagttaagcatccttggtattcaggagttgcttccctgcatgatgacagcaatgctttaatgtggctgagaggagttgctggtgagggaggttttcagtctctgaactttcagtcacctggtattggctcctggggacaacagaggctccatccatccttactgagcagcgatcacgatcagtaccaagcagtagttgctgctgctgctgcttcccaatctggtggttacttaaaacagcaattcttgcaccttcagcaacctatgcagtcccctcaagaacactgcaacctcaacccattattgcagcaacaaattctgcagcaagcaagccagcaacagataattaatcctgatgcccaaaatatccaaacgatgttgagcccaagtgctatacaacagcaactccagcaactacagcaaatgcagcaagttcagaatgatcagaagcagaagattcaaccagatcaaagctaccaa

SEQ ID NO: 11256 - DNA, 2490 bp, Oryza sativa
  Clone ID: TFbOSC900260j.C1.o14.fg
atgagctcgtcgtcggcggccagcatcgggccgccgcagccgccgccgccccccgcgccgcccgaggaagagaagaagtgcctcaactcggagctatggcacgcctgcgccggcccgctcgtctgcctccccaccgtcggcacgcgcgtcgtctacttcccgcaaggccacagcgagcaggtggcggcgtcgacgaacaaggaggtggagggtcacatcccgaactaccccaacctgccggcgcagctgatctgccagctccacgatgtcacaatgcatgcggatgtggagactgacgaggtgtacgcgcagatgacgctccagccactgaacccagtaaggcgcctggggtttttgcatgatgtttgcagtgctgaggttttgatgcaggagcagaacgatgcgtaccttcccgcggagatggggataatgagcaagcagccgacgaattacttctgcaagacattgacggcgagcgacaccagcacgcacggggggttctccgtgccccgccgtgctgctgagcgcgtcttccctcctctggatttcacacagcagcctccagcccaggagctaattgcacgggatattcatgacatcgagtggaagttcaggcacatctttcgaggccaacccaaacgacacctgctaaccactggctggagcgtttttgtcagtgctaagagacttgttgctggagattctgtgcttttcatatggaacgagaaaaaccagcttttacttggaataagacgtgccagtcggccacagactgtgatgccttcctctgttctttcaagcgatagcatgcacataggtctccttgcagcagcagctcatgctgctgctacaaacagccgtttcactattttctacaacccccggtatatggggactataactgaagttagtgatgcagacccagtccgttggcctagttcctattggagatctgtgaaggttggttgggatgaatcaactgcaggggaaaggccaccaagagtttctttatgggaaattgaaccattgacaacctttccaatgtatccatctctgttcccactgagagttaagcatccttggtattcaggagttgcttccctgcatgatgacagcaatgctttaatgtggctgagaggagttgctggtgagggaggttttcagtctctgaactttcagtcacctggtattggctcctggggacaacagaggctccatccatccttactgagcagcgatcacgatcagtaccaagcagtagttgctgctgctgctgcttcccaatctggtggttacttaaaacagcaattcttgcaccttcagcaacctatgcagtcccctcaagaacactgcaacctcaacccattattgcagcaacaaattctgcagcaagcaagccagcaacagataattaatcctgatgcccaaaatatccaaacgatgttgagcccaagtgctatacaacagcaactccagcaactacagcaaatgcagcaagttcagaatgatcagaagcagaagattcaaccagatcaaagctaccaagttcctacaagtgcagttctcccaagtccaacatcattaccgagtcatttgcgagaaaaatttggcttctctgatcctaatgcgaattcttcaagcttcatcacctctagcagtagtgataacatgttggattcgagcttccttcagggaagttcgaaagctgtggacttatctcgatttaatcagcctgtagctagtgagcagcagcagcaacaggcatggaagcagaagtttatgggttcacagtcagtgtcttttgggggctcggttttgcataactcacccacaagcaaagatggttctgttgaaaacaaaattggtcgtgatgtgcaaaaccagtccctttttagtccacaagttgactcttcatccctcctgtacaacatggttcctaatctgacttcgaatgtttcggatggcaacttatcaacgatcccttctggatcaacttatctgcagaatgcaatgtatggttgcttggacgactcttctggtttattgcaaaatacaggagagaacgatccagcaaccagaacatttgtgaaggtttacaagtcaggttcggttgggaggtcgttggacatcacccggttctctaattatgctgaacttcgagaagaactgggtcagatgttcggcattaagggtcaattggacgaccctgatagatcaggctggcagcttgtattcgtcgacagggagaatgatgtgcttctccttggagacgacccttgggaattcattaacatctatatgaatgtgaggaatgctaaaaagtcttacattatgaaacggagggagtacaatactttggtttcctggtttccacaactaatagcttatcgaggaaagactgttcttccttcaataatatgtgttggtcagtcactacatgttgatgctcagttacccaagacccttcgtgagagtaaacatcagacatga

SEQ ID NO: 11257 - DNA, 3282 bp, Oryza sativa
  Clone ID: TFbOSC401881j.C1.o3.fg
atggcgagcatgaagcagcagcagacgccggcgagctccgcggtgaccgcggcggcggcggcctcctcctccgccaccgccgccgtggccgcatgcgaaggggagcggaaggcggcggcgatcaactcggagctgtggcacgcgtgcgccggcccgctcgtgtcgctgccgccggtgggcagcctcgtcgtctacttcccgcaaggccacagcgagcagctactaataactgtacttgttcattaccaaagtggttgggagcattgggcctactggcttcccttttctgttgccctactagtatggtcaatagacagtcttgggaggactaatcctgcaattattcgtgcatttctttttagaaagatgagaaaaaaggtgtacaaaagtaacataatattaagaaatgctttctccatgctattggaaacagcagaatatctacttaatctaagctttttgtttcaggttgcagcttctatgcaaaaggatgtggatgcacatgttccaagctacccaaatcttccctccaagttgatatgtcttcttcacggtgtcaatttgcatgcagacccagatactgatgaagtttatgcacagatgactcttcaaccagtgaatacatatggaaaagaggcgttgcaaatatcagagcttgcactaaaacaagcaaggccacaaatggaattcttctgtaagacactcaccgcaagtgatacaagtacacatggaggattctctgtgcctcgccgtgccgcagagaagatattccctcccctggacttctctatgcaacctccagctcaagaactgcaagctagagatatacatgacaatgtgtggacatttcgtcatatatatcgaggtcaaccaaaaagacatttacttactactggttggagccttttcgtgagtggcaagaggttatttgctggtgattctgttattgttgtgagggccagtcctactgaatttgttatcccatttgcaaaataccagaaggcactgtatagtaatcagatatctttaggaatgcggtttcgcatgatgtttgaaaccgaggaattaggaacaagaaggtacatgggtacaataactggaataagtgacctagatcctgttggctgggatgagtctgcagctggtgaaaggaggaacagagtttcaatctgggagattgaaccggttgcagctcccttttttctatgtccccaacctttttttggtgtgaagcgccccaggcaattagatgacgagtcagagatggaaaaccttttcaagagggcaatgccttggcttggtgaggaggtatgcataaaggatactcaaaaccagaacagtacagcacctggtctaagtttggttcagtggatgaacatgaacaggcagcagagctcatcattggctaacaccgctgcgcagtctgagtacctgcaagctctaggtaaccctgccatgcaaaaccttgctgctgatgaacttgcaaggcaactatatgtccagaacaatctccttcaacagaactgcatacagtttaattctcccaagctccctcagcaaatgcaaaccatgaacgatctgtccaaggcggcaattccgttgaatcagcttggggctatcatcaatcctcaagatcagaaacaagatgctgtcaaccatcagagacagcagaactccatacaagtgattcccctgagccaagctcaatctaatctcgtccaggctcaggtgattgttcagaatcagatgcaacagcagaagccatctccaactcaaaacccgcaaaggattaatggccagcggctgcttttgtctcatcaacagaaggatcaaaatttacagctgcaacagcagcttttacttcagcaaaaacaacagttacagcagcagcagcagcagcaacaacagaatcagcagcagctaaataagtcccttggacagttggtaaatctggcaagtcagcagtctaagttgtttgatgaggagcttcagttgcagatattacagaaactgcagcagcaatcactgatgtcacaatccacatcaacactctcacagccacctctgatccaagaacagcaaaagttaatcacggacatgcaaaagcagttgtcaaattcacattcacttgctcagcaacaaatgatgccccaacaagaaatcaagccttcattgcaagcaacaccattgctacccacggtccagcaagagcaacagcagaagcttttacagaaacaagtctcacttgcagatgtgtcaggagttgcttttcaaccaatttcatcaaccaatgtgatccccaaaactggaggtgctatgatcatttcgggtgctacacaatctgtagttacagaggaaatgccctcttgttcaacatctccatccacagctaatggaaaccactttacacaatcaaccaaaaacagacattgcatcaacacagaaaggctgccaccgtccactgctccaatgttgatcccaacctccattgacgctgtaacagcaactccactaatgaccaaggaattgccaaagccgaataataatgtgaagcaaagtgttgtcaactcaaaattaccaaatgttgctcctggcccacaaaattgtataaaccatgcattgcaaacagacaacttggaaacatcttcatcagcaacttcattatgtccttcccgaacagatggacttgtgcatcaaggtttcccctcttctaacttcaatcaacaccagatgttcaaagatgcacttcctgatgtagaaatggaaggtgtggatccaagtaacagtggcttgtttgggatcaacaatgataacctgttaggattcccaatagaaacagaggacttgctgataaatgcacttgattctgtcaagtatcagaatcacatatcaactgatgttgaaaacaactacccgatgcaaaaggatgctctgcaagaaatatcaacctccatggtttcccagtcatttggtcagtcggatatggcttttaattccattgattctgcgatcaatgatggtgccttcttgaacaaaaattcctggcccgctgcccctctgctgcagagaatgcggacattcaccaaggtgtacaaacgaggagctgtaggccggtctattgacatcggcaggtactctggatatgaagagttgaagcatgctttggctcgcatgtttggtatagagggtcaacttgaagatcgacagagaataggctggaaactggtctacaaggatcacgaggatgacatcctgcttcttggtgatgacccatgggagtaa

SEQ ID NO: 11258 - DNA, 1203 bp, Oryza sativa
  Clone ID: TFbOSC102151j.C1.o2.fg
atggagttcactacaagcagtaggttttctaaagaagaggaggacgaggagcaggatgaggcgggaaggcgagagatccccttcatgacggccacggccgaagccgcgcctgcgcccacgtcgtcgtcgtcgtctcctgctcatcacgcggcttccgcgtcggcgtcggcgtctgcgtcagggagcagcactccctttcgctccgacgatggcgccggggcgtctgggagcggcggcggcggcggcggcggcggagaagcggaggtggtggagaaggagcacatgttcgacaaggtggtgacgccgagcgacgttgggaagctgaaccggctggtgatcccgaagcagtacgccgagaagtacttcccgctggacgcggcggcgaacgagaagggcctcctgctcaacttcgaggaccgcgcggggaagccatggcggttccgctactcctactggaacagcagccagagctacgtgatgaccaaggggtggagccgcttcgtcaaggagaagcgcctcgacgccggggacaccgtctccttctcccgcggcatcggcgacgaggcggcgcggcaccgcctcttcatcgactggaagcgccgcgccgacacccgcgacccgctccggctgccccgcgggctgccgctcccgatgccgctcacgtcgcactacgcccccccctcgccgccggccacgctctacgagcaccgcctcaggcaaggcctcgacttccgcgccttcaaccccgccgccgcgatggggaggcaggtcctcctgttcggctcggcgaggattcctccgcaagcaccactgctggcgcgcgcgccgtcgccgctgcaccaccactacacgctgcagccgagcggcgatggtgtaagggcggcgggctcaccggtggtgctcgactcggttccggtcatcgagagccccacgacggccgcgaagcgcgtgcggctgttcggcgtgaacctcgacaacccgcatgccggcggcggcggcggcgccgccgccggcgagtcgagcaatcatggcaatgcactgtcattgcagacgcccgcgtggatgaggagggatccaacactgcggctgctggaattgcctcctcaccaccaccatggcgccgagtcgtccgctgcatcgtctccgtcgtcgtcgtcttcctccaagagggacgcgcattcggccttggatctcgatctgtag

SEQ ID NO: 11259 - DNA, 2040 bp, Oryza sativa
  Clone ID: TFbOSC100243j.C1.o9.fg
atgtcgtcgcaaggtgacgcgctgcctctggttcttgttttgttcttgttcttgtttttgttttgttttgtttgccgggagctgcaagagccgacggacccggcgctgctggcggagcaaatcaagatgttccaggtgccgtacaagatcctctgcaaggtcgtcaacgtcgagctcaaggccgagacggaaaccgacgaggtgttcgcgcagattaccctgcagcctgacccggatcaagagaatctgccaacattacctgacccgcccctgccggagcagccgaggcctgtggtgcactccttctgcaagatcctgaccccatccgacaccagcacccatggcgggttctccgtgctccgacggcatgccaacgagtgcctcccgccactggatatgtccatggcgacaccaacccaagagctcatcacaaaggaccttcatggatctgagtggaggtttaagcacatctacaggggccaaccccgtaggcatcttctgactactggatggagcacgtttgtgacatcgaagaagctgatttctggcgacgcgtttgtctacttgaggagtgagacaggagagcagcgtgtcggagtgaggcgtcttgtgcagaaacagagcacaatgccggcatctgttatatcaagccaaagcatgcatcttggtgtgcttgcaagtgcatctcatgctatcaagactaattcaattttcctagtgtactacaggccaaggttaagccaaagccaatatattgttagtgtgaataagtaccttgcggctagtaaggttggatttaatgtgggcatgaggttcaagatgagttttgaaggggaagacgtcccggttaaaaagttttctggaactatagttggtgaaggtgatctttctctgcagtggtcaggttctgaatggaagtccttgaaggtccaatgggatgaagtcacaaatgttaatggccctgagagggtttccccttgggaaattgaaacatgtgatggcactgcacctgccatcaatgtacccctgcagtcagcaacgaaaaacaagcggcctagggagccaagtgaaactattgaccttcaatcactggaaccagctcaagagttttggctatctggaatgccacaacagcatgagaagacaggtattggttccagtgaacctaattgtatctctggacatcaagttgtttggccaggcgagcatccaggatatggtgccgtgagtagttcagtttgtcagaatccgctagtacttgaaagttggttgaaggatttcaactcttcaaacaagggtgtctcccctaccttgtcagagatttctcagaaaatttttcaggttaccagcaatgaagcaagaattgctacatggcctgcacgttctgcttaccaagctgaggagcccacttccaagttgtcttcgaacaccgctgcctgtggttaccgaactgaagaagttgctccaaatgcgtccaaggttgttgaaggaaaaaaggaacctgccatgtttcgtctgtttggtgtggatttgatgaaatgtaccagcatatctactaccactgatgacaagtcaagtgtgggagcaggagaagcttcagccaaaggtactggttctcacgaagactctggtcagctgtcagcattctcaaaagtgacaaaagagcatattgctgcggatgaaagcccccaagagatccaaagccatcagaattacaccgctagaactcgcataaaggttcaaatgcatggaaatgctgtgggcagagctgtggatctagctaatctagacggatatgagcaactgatgaatgagctggaagagatgttcaatataaaggacctcaaacaaaaatggaaggtggctttcactgatgatgagggtgacacaatggaagttggagatgatccttggctggaattttgccagatggtcagaaagattgtgctctatcccattgaagacgagaagaagatcgagcctcacccgaagttactgtcttcagctaatccagagcaggatcagaagactgggttttag

SEQ ID NO: 11260 - DNA, 1434 bp, Oryza sativa
  Clone ID: TFbOSC421067j.C1.o1.fg
cacgccgagcagtgtcccgcccctctcccggatccgctcccctccgcccaccgattcttcctctgcaccatcaccgccgtcgacctctccgccgacaccaccaccggcgagccctacgccaccatctccctcctccctcttcgccacgacgcccccgcccccgcccccgcccccgcccccgccgccgccgaattagcagaagcagaatcacaggagttccgctactacgccaagcagctgacgcagagcgacgccaacaacggcggcggcttctccgtgccaaggttgtgcgccgatcacatcttcccggcgctcaacctggatgatgacccgcccgtccagagcctcaccatgggggacctgcagggcgactcgtgggaattccgccacatctaccgcggcacgccgcgccggcacctgctgacgaccgggtggagcaagttcgtgaacgccaagcagctggtggccggggacacggtggtgttcatgtggtgcggggccccggcccccgagaggaagctgttggtcggggtgcgacgcgcggccaggtactcgggcgagtcggcgtgcaacgcgcgggggcgggtgcagccccaggaggtgatggaggcggtccgactggcggcggagcaggcggcgttcagggtgacctactacccgcggcatggggcgggggagttcgtggtgccgcgggtggaggtggataagggattgactactccgtggaggtgcgggatgcaggtgcgcgcccaggtgatggaggccgaggacacccgccgcctcgcttggctcaatggcaccctcactaacctccgccaccaacaaatctggcgcactctcgaggttgaatgggatgcctccgccgcgtcatcttccatgaaaaacagatttgttaatccttggcaggtccagcctgttgatttccctcctcttcccatggggctaaagatttctaacaacaatattagtgcacctgtgtgcaatggggattcactgctggtgccaccgatactaatgcacccgcaacctcaacctcccgctgacattcagggagccaggcataacaatggccatgcctatgcagatataccctcttcatcaacaccatcaatggtgaggactcagcagctgttcccaagggatcttcagattttagttccccacaccgacattgtcactcctcaaaatggatcaccgcccgacaaccccgtaaacacgcctctttctgcatctgacggaatgaagaccatacagctgtttggcgtcacaataacatcacctgtgcaaggagacaccaatggcgctttcgcttcagcacaagtgaatcaggttccagagggtgtagatgatgaaactgctaccgaagaagcttctgacacaagcctacctgactctcttaccaatggccacaatcaagatggtgctaggctttga

SEQ ID NO: 11261 - DNA, 1044 bp, Oryza sativa
  Clone ID: TFbOSC900237j.C1.o1.fg
gtaagatgggatgatagtacagatagcagccaccaaaacagagtttctccatgggagatcgagagagttggtggcagtgtctcggttacccattccttgtcatctgggtctaagcgaaccaaattgcactttcctcaaggcagtttggatactccatttcttaatggaaatggtcacccggactccatgggaactgaaaatttccacagggtcttgcaaggtcaagaatttaggggttctaggtcccatggtgttgtatgctctgaatcacctggtgtaccaaactttcaatctcctgacaataggagattttctgctgatatgcggggctacatgatgccagcaagtgggcccccacagcggaacacagagtttacttatcagcccataggcttcagtgagtctcttggattcccagaggtcttgcaaggtcaagaaatgtcacaagtagttcctttgttccgaggagctacttttggcgctcgtacacagaatgacagagttgtctctgctaattctgtgcatagatcagctgcacagagtggattgctagcttcaactctagggcatcccatctcgcagtttactctgtcatcgtcaaaggtatcttctccctcgtcggttctgatgtttaaccaagcgacagctccaaatcatgaaacagtaagcggaaccaacaacaaaggtatgcatgtcagccagtttgcttcccaggagatgctctcagaaactgtaacctggcccggcacacaacgtcaaacgccgagcgaaatcacgagcaaccagttcgccctggcgagaatcccagctcctccaagcggagctgaatccggattgcccaagagggatgccgggagaagcagctgcagactgtttggcttctccctgacaggcaacatgctgggagaagatggagaaggcctagatgatggagccattgaagctggttgcgaaaacccgcccgtgctggagctgtttgggcacagccattctactcccggtgctcttcatgccctgtgtgctgctgctcccctgggaatgtga

SEQ ID NO: 11262 - DNA, 2190 bp, Oryza sativa
  Clone ID: TFbOSC400500j.C1.o18.fg
atggtgattagtaggacattggtggtaaggggttttgatgaactttgggagacgattcggccggttttggtttcatcagatggtccagcttccatgagcaaaaatggactgttgcttgttgtttcggaggagttttggattggcaaggtttggtgggtgagcggtgatcgcatttgggggttggagatgaaggaggtgggggaggtggaggaggtgaggtgcttggacccgcagctatggcacgcgtgcgcgggcgggatggtgcagatgccggcgccgcgttcccgggtgtactacttcgcgcagggccacgccgagcacgccgacggcggaggcggggcggcggcggcggccgcggagctggggccgcgcgcgctcccgccgctcgtgctctgccgcgtcgaaggggtccagttcctggccgatcgggactccgacgaggtgtacgccaagatccgcctcgcgccggtcgcccccggggaggccgagttccgggagcccgacgagctctgcccgctcggcgccgccggcgacgcggcggagccgtcgccggagaagccgacctcgttcgccaagacgctcacgcagtccgacgccaacaacggcggcggcttctcggtgccccgctactgcgccgagaccatcttccccaagctggactacagggccgacccgccggtgcagacggtgctcgccaaggacgtccacggcgtggtctggaagttccgccacatctaccgcggcacgccgcgccggcatttgctcaccaccgggtggagcacgttcgtgaaccagaagaagctcgtcgcgggggactcgatcgtgttcctgcgcaccaggcacggggagctctgcgtcgggatacggcgggcgaagcggatggcgtgcggggggatggagtgcatgtcggggtggaacgcgccgggctatggcggcggcggcttctcggcgttcttaaaggaggaggagagtaagctgatgaagggccatggtggtggtgggtacatgaagggcaaggggaaggtgaggatggccgatgtcgtggaggccgctagcctcgcgtcgagcgggcagccgttcgaggtggcgtactacccgagggctagcaccccggattttgtcgtgaaggctgcgtcggtgcaggccgcaatgaggatccagtggtgctccgggatgaggttcaagatggcttttgagacagaggattcatcaaggattagctggtttatggggacaatatcttctgttcaggttgctgatcccaacagatggccgaattcgccgtggagacttcttcaggtgacatgggatgaaccggacctgttgcagaatgtgaaatgtgtcagcccatggcttgtggagcttgtgtcaagtattccaccaatccatttaggaccattttcgtcacctcgaaagaagttgcgggttcccccacatcctgacttcccatttgagggtcatcttctgaacccaattttccatgggaacccacttggtcctagcaacagcccactatgctgttacccggacaccgctcctgcaggcatacagggagccaggcatgctcaatttggtttaccactaacagaccaccagcttaacaagctgcaccttggtctgttacatagcggcagttttaacagacttgatgctattactccaccttcccggatatcaaagggctttgtggtcagtagtgcaccagcccatgacaatatctcttgtttgttgtcaatcagtacaccacaggtcgcagagaaatctgatgacagaaagacgacaccccatataatgctgtttggaaaggctatatttactgagcagcagataacttcaagcggatcaacagagacactctcccctggagttactggaaatagctcacctaatggcaatgcgcacaagacaggaaatgcatctgatggttctggttcatcaatttgcattggtttctcatctcaaggtcacgaggcttctgaccttggtttagaagctggtcactgcaaggtatttatggaatcggaggacgttggtcgcaccattgatttgtctgtctttgggtcatacgaagaactgtatggtcggctggctgacatgttcggaatcgagaaagaagaaatcataaaccatcttcatttccgtgacgcagctggtgtagtcaagcatccgggtgaggtaccattcaggtga

SEQ ID NO: 11263 - DNA, 2727 bp, Oryza sativa
  Clone ID: TFbOSC401589j.C1.o17.fg
atgaagctctcgccgtcggccggcggcgtctccgaccagccgccgtcgccgccggaagttgcagaggagcagaagtgcctaaattctgagttgtggcatgcatgcgccggccctctcgtttcgctgcctgcggtcggtagtcgggtggtttattttcctcaaggccacagtgagcaggtagctgcatcaacaaataaggaaatggagtctcagatccccaactatcctaacctgccgccgcagcttatatgccagctacataatgtgaccatgcacgccgatgcagagacggatgaagtctatgcgcaaatgacgctgcagccactcagcccgcaagagctcaaggatccattcctacccgccgagctaggcactgccagcaagcagccaacaaattatttctgcaaaacgttaactgctagtgacacaagtacacatggtggattctctgttccccgtcgagcagcagagaaagtatttcctccgctggatttcactcagcagcctccagctcaagagttgatggcgaaagacctccatggaaatgaatggaaattccgtcatatctttcgtggccaaccgaagcggcatcttctgactacgggttggagcgtctttgtaagtgcaaagagactggttgctggagactctgtcctttttatctggaatgacagtaatcagctgcttctgggaattcgtcgggcaaataggccacaaacggtcatgccatcatcagtattgtctagtgacagcatgcatattggtctgcttgctgcagctgctcacgccgcatcaacaaatagccggtttactattttctataatccaagagcaagcccttcggagtttgttataccactggctaaatatgtaaaggctgtctaccatacccgcatatcggtgggcatgcgtttccggatgctttttgaaacagaagaatccagtgttaggagatacatggggacaataacaggaataagtgatcttgatcctgttcgttggatgaactcacactggcgctctgtcaaggttggatgggatgagtcgactgctggagagagacagccaagggtgtctctttgggagatcgagcctctgacaactttcccgatgtatccatctccttttcctctcagactaaagcgtccatggccaacaggcttaccttctttatatggcggaaaggaggatgacttggcttcttctcttatgtggcttcgagatagtcaaaacacaggtttccaatctctgaattttggaggacttggtatgagtccgtggatgcagccaaggctggatagttccctacttggtctgcaacctgacatgtaccaaacgatagcggcggcggcggctttacagaacaccactaagcaagtatcacctgccatgctgcagttccagcagccgcaaaacattgtcggtagatcttctcttctatccagtcagattctgcagcaagcacagcctcaatttcagcagatgtaccaccaaaacatcaatggcaactcaatccaaggccatagtcagcctgagtacctccagcaaccgcttcaacattgccaatcatttaacgaacagaagcctcagttgcagccgcagcaacagcagcaagaatcacaccagcagcaacctcagcatcaacaaatgcaacaacagaaacacttgtccaactttcagactgtaccaaatgcattgtcggttttttcacagctttcctccacccctcagtctacaccctccacattgcagacagtttcaccattctcacagcaacataatttccctgacacaaatatcagttgtctctctccatccaatgtctcatccatgcacgatacactgagatcattcccttcagaagctgcttcagacctcccaggtgtgccaagaatcacccctgtacctgtctctgacccatggtcatctaagcgagttgcagtggaatctacgatcacttctcgcccacatgacatttcatcacagatagagaacttcgacttgacaccttctagtattcctcaaaactccacgttagcaccactgcctggaagggaatgcctggtggatcaagatgggagctctgatcctcaaaatcacttcttgtttggtgtaaatatagactcacagtcacttttgatgcaagatggcattccaagccttcacaatgaaaacagttcaagcacaattccatattccacatccaacttccttagcccttctcaagatgattatccattgagtcaaacactaactactccgggctgcttagatgaatcaggatatgttccatgttcagataatgctgatcaagtgaagcgaccgcatgcaacctttgtgaaggtttacaaatctggaaccgttggaaggttgctcgacatcactagatttagcagttatcatgaacttcgtagtgaggtagggcgcctttttggccttgagggccagttggaagaccctttgagatcaggctggcagcttgtatttgttgaccgagaggacgacgttcttctagttggcgatgatccgtggcaggaatttgtgaacagtgtgtcttgcataaagatactttcgccgcaggaggttcagcagatgggcaagccgggcattgaactcttctcgacttctgcaaggagacttggcaacagctgtgacaactacatgagcaggcaggaatcaagaagcctaagcactggaatcgcgtcggtgggctcagttgagttctga

SEQ ID NO: 11264 - DNA, 1194 bp, Oryza sativa
  Clone ID: TFbOSC400860j.C1.o2.fg
atggagcaggagcaggatgaagaggaggaggaggcggaggcctcgccccgcgagatccccttcatgacgtcggcggcggcggcggccaccgcctcatcgtcctccccgacatcggtctccccttccgccaccgcttccgcggcggcgtccacgtcggcgtcgggctctcccttccggtcgagcgacggtgcgggagcgtcggggagtggcggcggcggtggcggcgaggacgtggaggtgatcgagaaggagcacatgttcgacaaggtggtgacgccgagcgacgtggggaagctgaaccggctggtgatcccgaagcagcacgccgagaagtacttcccgctggactcggcggcgaacgagaagggccttctcctcagcttcgaggaccgaaccggcaagctatggcgcttccgctactcctactggaacagcagccagagctacgtcatgaccaagggttggagccgcttcgtcaaggagaagcgcctcgacgccggggacaccgtctccttctgccgcggcgccgccgaggccacccgcgaccgcctcttcatcgactggaagcgccgcgccgacgtccgcgacccgcaccgcttccagcgcctaccgctccccatgacctcgccctacggcccgtggggcgcggcgcgggggcgttcttcatgccggcccgccacgctcttcgagcatcaccgctttcgccagggcttcgacttccgcaacatcaaccccgctgtgccggcgaggcagctcgtcttcttcggctccccagggacggggattcatcagcacccgcccttgccaccgccgccgtcgccacctccgcctcctcaccaactccacattacggtgcaccacccgagccccgtagtcaccgccggcctgcccatggttgtcgactcggtgccgcacgtcaacaacccagcggcggcatcgaagcgcgtccggctgttcggagtcaacctcgataacccacatccggacggcggccagtcgtcgagcggccacgacgccaatgcattgtcgctacggatgcccgggtggcaaaggcctgcaccattgaggtcgctggaattgcctccacacatgccggctggtgcagctggagcggagtcctctgccgcgtcgtcgccgtcgtcatcgtcgtcatccaagagagaggcgcactcctcgttggatctcgatctgtga

SEQ ID NO: 11265 - DNA, 2532 bp, Oryza sativa
  Clone ID: TFbOSC401583j.C1.o40.fg
atggctccccctcccccgccgcagggctcctccacaggggatccgctctacgacgagctgtggcacgcctgcgcggggccgctcgtcaccgtgccgcgggtgggcgacctcgtcttctacttcccgcaggggcacatcgagcaggtggaggcgtccatgaaccaggttgccgacagccagatgcgcctctacgatctgccctccaagctgctttgccgtgtcctcaacgtcgagctcaaggcggagcaagacaccgacgaggtctacgcgcaggtcatgctcatgccggagcccgagcaaaatgagatggcggtggagaagacgactcctacgtccggccctgtgcaggcaaggccgccggtgaggtccttctgcaagacgctcaccgcgtctgacaccagcacgcacggcggcttctctgtactccgccgccacgctgatgagtgcctccctcccctggatatgacccagtcgccacccacacaggagctcgtggccaaggatctgcacagcatggactggcgcttccgtcacatctttcgcgggcaaccgaggaggcatctccttcagagtggttggagtgtgtttgtcagttccaaaaggcttgttgctggggatgctttcattttcctcagaggagagaatggtgaactccgtgttggtgttagacgagctatgaggcagctgtccaatgtgccttcttcagtcatatctagccaaagcatgcacctgggagtccttgctactgcatggcatgctatcaacacgaagagtatgttcaccgtctactacaaacctaggacgagcccttcagagttcattataccatatgatcagtatatggagtccgtcaaaaacaattactctgttgggatgaggttcaggatgaggtttgaaggagaagaggcaccagagcagaggtttactggtactataattggcagtgagaatctcgacccagtgtggcctgaatcaagttggagatccctgaaggtgcggtgggatgaaccatcaactattccgcggccagatagagtctctccttggaaaatagagcctgcttcatcacctcctgttaacccccttcctctttctagggttaaaagacctaggccaaatgctcctccagcatctcctgaatctcctattcttacgaaagaagctgctactaaggttgacactgatcctgctcaagcacaacgaagtcaaaacagtacggtcttgcaaggtcaagaacaaatgaccttgaggagcaaccttactgagagtaatgactctgatgtcactgctcataagccaatgatgtggtctccatccccaaatgctgcaaaagcccaccccttgacatttcagcagagaccccctatggataattggatgcagttgggaaggcgtgaaactgactttaaggatgtccgttctggctctcaatcttttggtgattccccaggcttctttatgcagaattttgatgaggctcctaaccgtcttacttctttcaagaaccagtttcaggatcaaggttctgctcggcacttctctgacccatactactatgtatctccacagccttccctaactgttgaatcaagcacacagatgcacacagacagtaaggagttacatttctggaatggccagagtactgtgtatggtaattcgagagaccgaccacagaatttcagattcgaacagaactcatcaagttggttaaatcagtcatttgcccgacctgaacagccaagagtgattagaccgcatgcatcaatagctccagttgagttggaaaaaacagaaggcagtgggtttaagatttttgggtttaaagttgatacaaccaatgctcctaacaatcacttgagctccccgatggctgcaacacatgagcctatgcttcaaactccatcatcattgaatcagttgcaacctgtacaaactgattgcattcctgaggtatcagtaagcacagctggaacggcgactgagaatgagaaaagcggtcagcaagctcaacagagttcaaaagatgttcaaagcaagactcaggttgcttcgacgaggagttgtacaaagcacatgaagttttttcttctcgtagttgacatgctgaagttctcgttttgtaaatttcttgcaaaatctcagttttatcccctttgtggtatggtccataagcaaggcgttgcacttggcagatctgtggatctttcaaagttcagtaactatgatgaactcaaagctgagctagacaagatgtttgaattcgatggtgaattggtgtcttcaaacaaaaactggcaaattgtttatactgataatgagggtgatatgatgcttgttggagacgacccatgggaagaattctgcagcattgtgcggaagatttatatttacaccaaggaggaggtccagaagatgaattcgaaatcaaatgccccaaggaaagatgactcttcagaaaatgagaaaggttcagtgaagcgagatgatacaagagatggagggagtactccagaaagctgcctctactag

SEQ ID NO: 11266 - DNA, 2700 bp, Oryza sativa
  Clone ID: TFbOSC417639j.C1.o11.fg
atgaagctctctccgccggcgtcggcggatatgccgcaggccttgccggagaacgacggggaacaaagatgtctgaactcggagctgtggcatgcatgcgctgggccccttgtgtctttgccagtggtcaggagcagggtcgtctactttccacagggccatagcgagcaggttgcggcatcaactaataaggaagttgatgctcaaatcccaaattatccaaacttacctcctcagttaatctgccagcttcataatgtcaccatgcatgctgatgcagagacagatgaagtttatgctcagatgacattgcaaccattgagcccggaagagcaaaaggagcctttccttccaatggagttgggtgctgctagcaagcaacccactaattacttctgcaagacattgactgcaagtgacacgagcactcatggtggtttctctgttccccgccgggcagctgagaaagtcttccctccactagatttttcacagcagcctccggcacaggagctgattgcaagagatttgcatgataatgaatggaaatttcgccatatatttcgtggtcagcctaaaaggcatctcctgacaacaggctggagtgtgtttgtgagtgcgaaaagactagtagcaggagactctgttatatttatctggaatgataacaatcaacttcttttgggaatacgtcgtgcaaatcgccaacagactgttatgccctcttccgtgttgtcaagcgatagcatgcatataggtcttcttgcagcagcagctcatgctgcagccacaaatagtcgcttcactattttctataaccccagggctagcccttctgaatttgtgattccattggccaagtatgtgaaagctgtttaccacacacgtgtatctgttggaatgcgttttagaatgcttttcgagacagaggagtcaagtgtcaggcgatacatgggtacaatcaccagcataagtgatctagattcagtgcgctggccaaactcacactggcgttctgttaaggttggttgggatgagtccaccactggtgataaacagccaagggtttctctttgggagattgagcctttgacaacctttccgatgtaccccagtgcttttcctttaagacttaagcgtccgtgggcttcaggactgcctatgcatggcatgttcaatggtgggggaaatgacgattttgcacgctattcttctctcatgtggcttcgagacggaaatagaggaacccagtccctgaattttcaaggacatggagtctcaccatggcttcagccaagaatagattctccattgctgggccttaagccagacacgtaccagcaaatggctgcagcagcactggaagaaattcgatatggggacccttcaaagcagcatccagctactctgcaataccaacagactcataatctgaacagtggattaaattctctgtttgcaagccatgttctagggcaggtgcagtttcaacctcagcagtcacccctgcaagttgttcagcaaggccattgtcagaacactggtgactctgggttccttcaaggtcagcttccacggctgcagttgcataacactcagcagctgctaaaggagcaagagttgcagcagcagcaaagacagcatgttttacaagagcaatctagtcaagagatgcaacagcagctcccatctagtgatcatcatgttgctgatgtagcttctgagtctggatctgctcctcaggcacaatcatcattgcttagtggatcatcattctacaatcagaacctcttagaaggaaatagtgatccccctttacatctacacaacaatttccacaacttctctaaccaggaagcctcaaaccttcttattttgcctcgaagtagccaattaatggcatcagatgggtggccttcaaagcgattaactttagaatctgctgttcatcctgaagctccgtccatgcaccccaagattgagaaagtaaatcaccagggtatatctcattttcctggcgcctttccaccacaatcagcaagaggctgttccatcgtccaggattgcagggcagatgctgagaaccgcctactttcatcatcatttgaactccaggatggcatgacaagcatcataactgatgctaacagagaaactgatactatggccatacctttgttgagatatagtggtgcagatttgacaactgaaaacaccttagcaacctccaattgtttaggtgaatctggaacgttcaatcctcttaataacatatctgtaaatccatcacaaggagcaacctttgtgaaggtttacaaatcagggtcccttgggagatcacttgacatctccagattcagcagctactgcgagttacgtagtgagcttgagcgtctctttggtcttgaaggccaactggaggaccctgtaagatcaggctggcagcttgtatttgtcgaccgggaaaatgacattcttctcgtcggcgacgatccatggcaggagtttgcaaatagcgtatggtgcatcaaaatactctcgccacaggaggtgcagcagttggttcgtggtggagacggccttctgtcctcacctggagcaaggatgcagcagagcaatgcctgcgacgactattctgcaagccacaacatgcagaatatcgccggaaacattgcatctgtagcgcctctggactactga

SEQ ID NO: 11267 - DNA, 2352 bp, Oryza sativa
  Clone ID: TFbOSC413089j.C1.o8.fg
atgatcacgttcgcggacctggcggagccggcgcccggcgccgagcggtgcgtcgaccggcagctgtggctggcgtgcgcggggggcatgtgcaccgtgccgccggtgggcgccgccgtgtactacttcccgcaggggcacgccgagcacgcgctcggcctcgccgcgccggagctctccgcggcgcgcgtcccggcgctcgtgccctgccgcgtcgcgtccgtgcggtacatggccgacccggacaccgacgaggtgttcgccaggatccgcctcgtgccgctccgcgccgcggaggatggggacgtcgaggaggatggcgccgcggcaggcgaggagcacgagaagccggcgtcgttcgccaagacgctgacgcagtcggatgccaacaacggcggggggttctcggtgcccaggtactgcgccgagaccatcttcccgcgcctggactacgccgccgacccgcccgtgcagaccgtcgtcgccaaggacgtccatggagtcgcctggaacttccgccacatctacaggggcacgccgcgccggcacctgctcaccacggggtggagcacgttcgtgaaccagaagaagctcgtggccggcgactccatcgtgttcctccgcggcgacggaggggacctgcacgtcggcatccggcgcgccaagcgcgggttttgcggcggcggaggcggagccgaggaggcctccctgcccgggtgggaccagtacggcggcctgatgcgaggcaatgcgagcccgtgcgcggccgccaaggggcggggcaaggtgcgcgcggaggacctcgtcgaggcggcgaggctggcgaacggcgggcagccgttcgaggtcgtgtactacccgcgcgccagcacgccggagttctgcgtgcgcgcggcggcggtccgcgcggcgatgcgggtgcagtggtgccccgggatgcggttcaagatggcgttcgagaccgaggactcctcccggatcagctggttcatgggcaccgtcgccagcgtccaggtcgccgaccccatccgttggccgcagtcgccgtggcggcttctccaggtgacctgggacgaaccggacctcctccagaacgtgaagcgggtgagcccatggttggtcgagctggtgtcgagcatgccggccatcaacctctcgtctttctcgccgccgcgcaagaagccccggattctggcgtacccggagttccccttcgaggggcagctcctcaacccggcgttcccgccaaacccgctggcacacggccaccaccattaccatcacaaccacccgtccttcttcccgttccccgacgttagtgctcctgcaggcatacagggagccaggcatgcgcaatttggtccatctttatcagatctccaccttacccacctgcagtcgagcctcatgtacccggggctccgccgccccgatcatgtcggtccaacatccatcccgccaccaagaatcagcactgacctgacaatgggcagctcgccgccggcgcgcgctctgtccatgggcgccaagaagcccgacgacgccaagccgccggggctaatgctgttcgggcagaggatactgaccgagcgccagatgagccttagcggcaccacctcgccggcggccaccgggaacagctctctcaactggaacaccgagaaaggtgcctcggagggctcgggctccggcgtcatccagaacagccccaccgacaacacgtcgtcggagaggctccagtggttcagggagaacagcaccgtctccgagctcgggctggagcccgggcagtgcaaggtgttcatcgagtccgacacggtcggccgcaacctcgacctctcgtcgctggcctcgttcgagcagctctacggccggctgtccgagatgttctgcatcgacagcgcggagctgaggagccgtgtgctctaccgtggcgccaccggcgaagtgaggcacgccggcgacgagccattcagtagagatttcaacaagaaagctcaatctgcacaggtatcctactgttctcctgtatccttcttcatcatcatcaacaacgatcagctgcgtgtacttgttgattcccgtgtactacgatgcaaaaatcctgtgaccactcatcagaggcttgaatgccgcggccccttggcccaagggacaagcgcatgcagcatgcagacgcagacgcagcgctgcgccatttctgacctctccggtggcctgacctccaggctccagcctccaggcgaggcaatccctcttggttctcttgccttggcagcaagctcgcttacccatgatgatgagatttgtgatctgcatcgtgctgcgtatccctggctagtagagagctag

SEQ ID NO: 11268 - DNA, 2754 bp, Oryza sativa
  Clone ID: TFbOSC414152j.C1.o3.fg
atgaggctttcgtcgtcgtccggcagcgtcctcccggctcaggcggcgtcgccggaagctgtagaagaacaaaaatgcctgaattcggagctctggcatgcgtgtgccggtccccttgtttcgttgcctgcagtgggtagccgagtggtttatttcccacagggtcacagcgaacaggtagctgcatcaacaaataaagaaatggagtctcagatccccaattatcctaacttgcctccacaacttatttgccaacttcacaatgtgacgatgcatgcagatgcagaaacagatgaggtttacgctcagatgacgctacaaccacttagcccgcaagagctcaaggacccatatctaccagctgaattaggttctgccaacaaacagccaacgaattatttttgcaaaacattaacggcaagtgacacaagtacgcatggcggattctctgttccccgtcgagcagctgagaaagtgttccctccgctggattttactcagcagcctccagcacaggagttaattgcaaaagatcttcatggcaatgagtggaagtttcgtcatatctttcgtggtcagccaaagcgacaccttctaactacaggctggagcgtctttgtaagtgcaaagagacttgtcgccggggattctgtcctatttatctggaatgacaacaaccagcttcttctgggaattcgtcgagctaaccgcccacaaactgttatgccatcttcagtcctatctagtgatagcatgcatattggtcttcttgctgcggctgctcatgctgcttcaacaaatagccggtttacaattttttataacccaagagcaagcccttcagagtttgttatcccactttctaaatatgttaaggctgtatatcatacccgtatatctgtgggcatgcgtttcaggatgctttttgagacagaagagtcaagtgtacggagatacatgggcacgataacaggaattagtgatcttgatgctgctcgttggccaaactcacattggcgttctgtaaaggttggctgggatgaatcaactgccggagagaggcagccaagggtgtcgctttgggagattgagcccttgacaactttcccaatgtacccatctccttttccactcagactgaagcgtccatggccaacaggcttgccttcattacatggtggtaaggatgacgacttgacttcttctctcatgtggctccgagacagcgcaaatcctggtttccaatcattgaatttcgggggtctcggtatgaatccttggatgcagccaaggtttgatgcttccttacttggtctgcaacctgacatgtatcaaacgatagctgcgactgctttccaggacccaacaaagcaggtctctcccacgatattgcagttccagcagccgcagaacataggtggcagagctaatacacttctgccaagtcagattttgcagcaagtgcagcctcagtttcagcagcagcaatacctccaaaacatcaacgagaccacaatccaagggcatgctcagtctgagttccttcagcagcagctccaacgctgccagtcgtttactgagcagaagccacagctgcaaacccagcaacaacagcaagaatcacagcaacaacagcagcagcaatcgcagtgtatgcaagtcccacaacatcagcaaatgcaacagcagaagaacatgaccaactatcagtctgtacctaatgcattgtcaccgttttctcaactctcctctccttctcagtcttcacctatgacactgcaaacagtattaccattctcccagccacagagctatccagacacgagtatgagctcattgtcaccatccaacacatccaccatgcataatgcattgaggccattttcatcggaagcaccttcgcacctaagcatgccaagaccgactgcagtacctgtccctgacccatggtcatcgaagcgagttgcagtggagtctttgcttccctctcgtcctcaggttacatcgcagatggagcagttggactcaacagcacctagtataccacaaagctctgcgttggcgccgcttcctggaagaggatgcttggtggatcaagatgggaactctgatcctcaaaaccatctgttatttggcgttaacatagattcacagtcacttctaatgcaaggtggcatcccaagcctccagggtgagaatgattcgacggcaattccttattccacctccaatttcctgagcccgtcgcagaatgatttccccttggatcaaacactaagtagtgcagactgcttagatgaatcaggatatgtgccgtgttcacagaattctgatcaagtgattaatcgaccacctgcgacctttgtgaaggtttacaaatcgggaacctatggaaggtcacttgatatcactagatttagtagctatcatgaacttcgtagagaactagggcgcctatttggccttgagggccagttggaaaaccctttgagatcaggctggcagcttgtattcgtcgaccgagaggatgatgtcctcctcgttggcgacgacccttggcaggaattcgtgaatagcgtctcctgcataaagatactttcaccacaggaggtgcagcagatgggcaagccctttgagcttttgagctcggctcccggaaagaggctaggtagcagctgtgatgactatgtgagcaggcaggaatcaagaagcctgagcacaggaattgcatctgtcggctcagttgaattctga

SEQ ID NO: 11269 - DNA, 2271 bp, Oryza sativa
  Clone ID: TFbOSC404615j.C1.o10.fg
atggctggctccgtcgttgctgctgctgccgccgccggcggtggcacagggagctcttgcgatgcgttgtacagggagctatggcatgcttgcgctgggccgttggtcacagtgcctcgccaaggcgaattggtttactacttcccccagggccatatggaacagcttgaggcatctacagaccaacagcttgaccagcatctgcctttgtttaacctgccatctaagatcctctgcaaagtggtcaatgtagaacttagggctgaaaccgattcagatgaggtttatgctcaaattatgctgcaaccagaagcagatcaaaatgaactcaccagcccaaaacctgagccacatgaacctgaaaaatgcaatgtccattccttctgcaagactttgactgcttcagatacaagcacccatggtggattttcagttcttaggaggcatgcagaagaatgtcttcctcccctggacatgactcagaatccaccatggcaagagcttgtggctagagatctccatggaaacgagtggcatttccgtcacatctttcgagggtccccccaccactcccttattttaggacaacctaggaggcatctgcttacaactggctggagtgtttttgttagctcaaaaagattagttgccggtgacgcattcatctttctgagaggtgagaatggagagctacgagttggtgtcaggaggctcatgaggcaactaaataacatgccatcatcagtaatatcaagtcatagtatgcatcttggagtcctagcaactgcatcacatgctatatccaccggaactctcttttctgttttctacaaaccaagaacaagtcagtctgagtttgttgtgagtgctaacaagtaccttgaagctaaaaacagcaagatatctgttggaatgaggtttaagatgagattcgagggcgatgaagctcctgaaagaaggtttagtggaacaattattggtgttgggagcatgtcaacgtctccatgggcaaattctgactggagatctttgaaggtccaatgggatgagccttctgtggttcctcgtccagatagagtttcaccatgggaactagagccacttgctgtgagtaattcacagccatcacctcagccaccggcaagaaataagcgggctcggcctcctgcttcgaattcaattgctccagaactacctccggtcttcggtttgtggaaatcttcagctgagtccacacaaggcttctcattttcgggactacagcgaacacaggaactatatccttcaagccccaatccgatcttctcaacatcattaaatgttggattcagtacaaagaatgagccatctgctctaagcaacaagcatttttactggccaatgagagagacaagagccaactcttactctgctagcatcagcaaagttccatctgaaaagaagcaagagcctagttcggctggctgcagattgtttggaatcgagataagctctgctgtggaagctacatctccactggctgctgtttctggtgttggtcaagaccaaccagctgcctcagtagatgctgagtctgatcagctctcacaaccatcacatgccaacaaatctgatgctccagcggcaagcagtgagccatctcctcatgagactcagagtcggcaagtgaggagctgcaccaaggtcatcatgcaaggaatggcagttggaagggcagtggacctgacaaggctccatggatatgatgatcttcgctgcaagttagaagagatgtttgatatccaaggagagctctctgctagcctaaagaaatggaaggttgtttacacagatgatgaggatgatatgatgctggttggggatgacccttggcccttgatgcgttggaccctcactaccttgttgcaatgtctgatcctcctgtcgcgtgttctcgtcaatgcggccctcctgatactgtacatccaaagagctgttctcttcaacggtctgtgcttccaaatccactggatcaatgctggcggttttgggggatggaaggagggatactcgacaaagagggcaagtggtgtttgtcgagagccagtggtcgatgcaatcgatgtggaagggcctcagggcattgatatgcttgctattgcccttcggaaacattctctaaatgtagctcaaggctctaatttagaagcacttccattcattactgaactaattattgagatattggtggtccagacccaacggaaaacctacatcgaagtgctttcatga

SEQ ID NO: 11270 - DNA, 2007 bp, Oryza sativa
  Clone ID: TFbOSC900189j.C1.o13.fg
atggggattgacctgaacacggtggaggaggaagcggaggagggggcggcggcggcggtgtgcggggagctgtggcacgcgtgcgcggggccaggggtggcgctgccgcggcgcggcagcgcgctcgtgtacctgccgcaggcgcacctcgccgcggacggcggcggcggcgaggtgccgcctgccggcgccgcggccgtgcccccgcacgtcgcgtgccgcgtcgtcggcgtcgagctgcgcgcggacgcggcgacggacgaggtgtacgcgcggctcgcgttggtggcggagggcgagatgttgcagcggaacttccgcgagggtggaggtgaagatggtgcaggggagatggagggttgtgatgcagaaaagaagccccggatgccacacatgttctgcaaaactctcacagcatctgatacaagcacccatggaggtttctctgttcctcgccgggctgcagaggactgtttcccacctttggtgatacacttaaaagaaaaacttgtaacttttaatgactataagacagttagaccttctcaagagctgattgccgtggacttacatggcacacaatggaagttcaggcatatttatagaggtgatgatggccaactaagattgggtgtaaggagagcagttcaacttagaaatgaggccctctttgaacctgtcaacagcagcgattcaaagctacgcattctatcttctgttgccagttccttggaaaataaaagtgttttccacatttgtttcaacccaaggagtggtgcgtcagaattcattgtaccgtattggagattattgaagagcctgaaccatccattttccattggaatgaggttcagagtttgctatgagagtgaagatgctaatgagaggtccgctggattaatttcaggcattagtgaagttgaccccataagatggcctggatcaagatggaaatgcctactggtaagatgggatgatagtacagatagcagccaccaaaacagagtttctccatgggagatcgagagagttggtggcagtgtctcggttacccattccttgtcatctgggtctaagcgaaccaaattgcactttcctcaaggcagtttggatactccatttcttaatggaaatggtcacccggactccatgggaactgaaaatttccacagggtcttgcaaggtcaagaatttaggggttctaggtcccatggtgttgtatgctctgaatcacctggtgtaccaaactttcaatctcctgacaataggagattttctgctgatatgcggggctacatgatgccagcaagtgggcccccacagcggaacacagagtttacttatcagcccataggcttcagtgagtctcttggattcccagaggtcttgcaaggtcaagaaatgtcacaagtagttcctttgttccgaggagctacttttggcgctcgtacacagaatgacagagttgtctctgctaattctgtgcatagatcagctgcacagagtggattgctagcttcaactctagggcatcccatctcgcagtttactctgtcatcgtcaaaggtatcttctccctcgtcggttctgatgtttaaccaagcgacagctccaaatcatgaaacagtaagcggaaccaacaacaaaggtatgcatgtcagccagtttgcttcccaggagatgctctcagaaactgtaacctggcccggcacacaacgtcaaacgccgagcgaaatcacgagcaaccagttcgccctggcgagaatcccagctcctccaagcggagctgaatccggattgcccaagagggatgccgggagaagcagctgcagactgtttggcttctccctgacaggcaacatgctgggagaagatggagaaggcctagatgatggagccattgaagctggttgcgaaaacccgcccgtgctggagctgtttgggcacagccattctactcccggtgctcttcatgccctgtgtgctgctgctcccctgggaatgtga

SEQ ID NO: 11271 - DNA, 2160 bp, Oryza sativa
  Clone ID: TFbOSC1558j.C1.o2.fg
atgaccgggatcgacctcaacaccgtcgaggaggaccaagaggaggcggcggaggaagtggcggcgaacggctcgtctccggctccggcgaaggcgggcgcggtgtgcctcgagctgtggcacgcctgcgccgggcccgtggcgccgctgccgaggaaagggggcgtcgtcgtgtacctgccgcaagggcatctcgagcacctcggcgacgcgcccgcggcggcggcggccgcggccgccgtgccgccgcacgttttctgccgcgtcgtcgacgtcaccctcctcgcgaacgcggcgaccgacgaggtgtacgcgcagctctcgcttgtcccggagaaggaggaggtggcgaggcgggcggaccacggcgagggcgaggacggggacggcatgaagcagcggttcgcgcggatgccgcacatgttctgcaagacgctcacggcgtccgacaccagcacgcacggcggcttctccgtgccgcgccgcgccgccgaggactgcttccctccactggattacagccagcagcggccgtcgcaggagcttgttgccaaggatttgcacagcactgaatggaggttccgccatatttaccgaggccagccacgtcggcaccttttaaccacaggttggagtgcatttgttaacaagaagaagcttgtttctggggatgccgtactatttttgcgaggtgatgatggggagctaagactgggagttcgccgtgcagctcagcttaaaaatgggtctgcttttccagcactttacaaccagtgttctaatcttggtacacttgccaatgttgcacatgcagtggctacagaaagtgtgttcaacatatactacaatcccaggttaagtcagtccgaattcattgtaccctactggaagttcatgaaaagcctcagccaaccattttctgttgggctgaggttcaaaatgagatatgaaagtgaagatgctactgaaagaaggtacaccgggataattactggaagtggtgatacagaccctatgtggcatggttcgaaatggaaatgtttgttggtgaggtgggatgacgacgctgagttccgtcgaccaaacagggtctctccttgggagattgagctgactagttcagtgtcaggatcccatttgtccacaccccattcaaagcgattgaaaccatgtcttccccatgttaatccagaatacatggttccacgtggaggtggttgtcctgattttgcggaatctgcccaattccacaaggtcttgcaaggtcaagaattattgggttttaaatctcatggtggtactgctgctgctacttctcagccatgtgaagcaaggcatttacagtacatcgatgagcggagttgctccagcgatgcgagtaacagtatcctaggggttccaagacttggtgatagagcaccacttggaaacccaggattttcctaccattgctcaggctttggggagtctcacagactccaaaaggtcttgcaaggtcaagaattatttcgtccctaccgaggaactttggttgatgcgtctatgggtagtaatgggtttcatcaacaagatagtcctcgtgcaccaggtgtggtgaataaatggcaggcacaacttcatggccgtgctgcttttcatggaccaccagcactggctcttccatctcaatcatcatctccgccatctgtcctaatgtttcagcaagctaattcaaagatgcccaggttggagtttgggcatggacagttggacaagcacgagaatgataggcgtgttaggtttggtccttctgaaggaattgaaagaagagagcaaagaataccactccagccttatcctacttctggagaagtgatagatggacaggttacagttgagaagtctcactcccctggtcgacatggaaaggatggtccagataacaaagctgttggcacaaatagttgcaaaatatttggcatctctttgactgagaaggttccagcaagagaagaactagatgatggcgacgccaactattcactccagtctttgaagcaagtgccaaaatccctgggcaatagttgtgctaccatggtggccgagtatcagggagatggagggactgatgattctgatatttttatcttagatgtaggcgttggagcacttatcatgtga

SEQ ID NO: 11272 - DNA, 1968 bp, Oryza sativa
  Clone ID: TFbOSC401539j.C1.o103.fg
atgggcatcgacctcaacaacaccgcgagcggcggcgaggaggacgcgccggcgccggggccggtgtgccgggatctgtggcacgcgtgcgctgggccggtggtgtcgctgccgcggcggggcagcgcggtcgtgtacctgccgcaggggcacctctccgcggccggcgccggcggcgggatccgcggggaggtggcggttgccctccctccccacgtggcgtgccgcgtcgtggacgtcgagctatgcgtatttgagaggaacttgcatggtggtggaatcgaaagggaggatgacatggaggatggtgatgaggaaaggaagtccaggatgctgcacatgttctgcaaaacactaacggcctctgatacaagcacacatggagggttctctgttcctcgtcgggctgctgaggattgctttccacctctggaccacaaacagctaaggccttctcaagagcttgttgccaaggatttgcatggagcaaagtggaggttccgccatatttatagaggtcaacctcgcaggcatcttttaacaactggatggagctcctttgtcaataaaaagaaactggtctcaggggacgcggtgttatttctccggggtgatgatggtgagctaagattgggtgttcgaagagctactcagcttaaaaatgaagcgattttcaaagcttttagtagcgaaagttcaaagatgcgcacactgtcggctgtggctgattccttgaaacatggaagtgtttttcacatttgttacaacccaagggctactgcttctgagtacgttgttccatattggaagttcgtgaaaagcttcaaccatccagtttgtattggaatgaggttcaagtttcattttgagagtgaagatgttaatgagaggcgttctggaatgattgccggtgttagtgaagtagaccccatcagatggcctggttcaaagtggagaagccttctggttcgatgggaggatgctactgactgcaacagccaaaatagagtatctccatgggagattgagatagttggtggttcaatctctgttgctcattctctgtcggcatccagttctaaaagaaccaaattatgccctcagggcaatttggacgtgccagctctgtatggaaatggtcgtccagactcggtggaaactgaaaagttccccagggtcttgcaaggtcaagaattgatgggttctaggacccatcgtgctacttgttctcctcagtcaatcgacattacaaaaagtaagtcttttgatgcttggagattccttactgatacacgaagctgcatgttgggcagttcaacaagcagacttccagtgcagtactctggctatacccaccaatctgtaagcttcggtgaatctattggattcccagaggtcttgcaaggtcaagaaatttctcagacagttcctccgtttcaaggaatgttgcctgatgcatgttcagcgaaaagcagatatgaattaaagaattatgtgtgcaccccagctaccatgaatggactatcatctgcaaatgaaggatattgtctctccctgtcaactgtgccaccttctccaccttccagtcttatgttataccaaacaggggtaccacagcttgaattggcaagcaagaacaatgacaaaagtggaaatgacagccaaccagccttgcgacagcacaagttgctcagtgaaactagctgggaccagtttaaaattggaaaggcttcaacacctgggaatgctactaagcctggtaatggtggaagggaggttgacagaactagttgccgcctttttggtttttccttgaccgagaagattatcccaacagacaaagatggtgaaaaggaagtgagttatgaaactgattgccaaaatccacggatgctagacttgtttgggtacaattgcagtacgcctggtgctcttcatgccctttgtgctgctcctttgggaatatga

SEQ ID NO: 11273 - DNA, 222 bp, Oryza sativa
  Clone ID: TFbOSC8547j.C1.o1.fg
atggcgagcatgaagcagcagcagacgccggcgagctccgcggtgaccgcggcggcggcggcctcctcctccgccaccgccgccgtggccgcatgcgaaggggagcggaaggcggcggcgatcaactcggagctgtggcacgcgtgcgccggcccgctcgtgtcgctgccgccggtgggcagcctcgtcgtctacttcccgcaaggccacagcgagcagtga

SEQ ID NO: 11274 - DNA, 3168 bp, Oryza sativa
  Clone ID: TFbOSC21386j.C1.o1.fg
atgaaggatcagggatcatccggtgtgtctcccgccccaggggaaggggagaagaaagccatcaattcggagctatggcatgcttgtgccgggcctcttgtgtcgctgccgccggtgggcagtctcgtcgtgtacttccctcagggtcatagcgagcaggttgctgcttccatgcacaaggagctggacaacatccctggttatccctctcttccgtctaagctgatctgcaaacttctgagtctcaccttacatgcagattctgaaactgatgaagtttatgctcagatgacacttcaaccagtcaataaatatgatcgagatgcaatgctggcatctgaactgggcctgaagcaaaacaagcaaccagcggagttcttttgcaaaacgctgacggcgagcgacacaagtacccatggtggattttcagtgccacgtcgtgcggcggagaagatatttccaccactagactttaccatgcaaccaccagcacaagagctcatcgccaaggatctgcatgatatttcatggaaatttcgacacatttaccgaggtcaaccaaagaggcaccttctgacaactggttggagcgtctttgtcagcacaaaaaggcttctagctggtgattcagttctgtttataagggatgagaaatctcagcttctattaggcatacgtcgtgctaccagaccccaaccagctctatcgtcatcagttctatcaagtgatagcatgcacattgggattctagctgctgcagcacatgctgctgcaaacagtagcccatttactattttctacaatccaagggcaagtccatcagaatttgtcattcctttagcgaaatataacaaggctttgtatacacaagtatctcttggaatgcggttcagaatgctgtttgagacagaggattcaggggttcgaagatatatgggaacaatcacaggtattggtgacttggatccagtgcgctggaagaactctcattggcgaaaccttcaggttggttgggatgaatcaacagcatctgagaggcgcactcgtgtttcaatatgggagattgaaccagtcgcgacacctttttatatttgtccaccaccatttttcaggccaaaacttcctaagcagccaggaatgccagatgatgaaaatgaagttgagagtgctttcaaaagagccatgccatggcttgctgatgactttgccctgaaagatgtgcaaagtgcattatttccaggtctgagcctagtccaatggatggctatgcaacagaatcctcagatgctaacagctgcgtcccaaacagtgcaatcaccgtacttgaactccaatgcattggctatgcaggatgtgatgggtagtagcaacgaggacccaacaaaaagattgaacacacaggcacaaaatatggttttacctaatttacaggttggctcaaaagtggatcaccctgtaatgtctcaacatcaacagcagccacaccaactatcacaacagcagcaggtccagccatcgcagcaaagttctgtggttttacagcaacatcaagcccagttgctgcagcagaacgccattcacttgcagcagcagcaagaacatctccagcggcagcagtcacaaccggcacagcagttgaaggctgcttcaagtctgcattcagtggaacagcacaagctgaaagaacagacttcaggtgggcaggttgcctcacaagcacaaatgttaaaccagattttcccaccatcttcatcgcagctacaacagttaggtttacccaagtcacctactcatcgccaagggttgacaggattaccaattgcaggttctttgcagcagcccacactaactcagacatctcaagtccagcaagcagccgaatatcagcaggccctcctacagagtcagcaacagcaacagcaactgcaactgcaacaactatcacaaccagaagtacagctgcagctgcttcaaaagattcaacaacaaaacatgctatctcagctgaacccacaacatcagtcccagttgattcaacaattgtctcagaaaagccaggaaattctacagcaacaaattttgcaacatcaatttggtgggtctgattctattggtcaactcaagcaatcaccatcgcagcaagctcctttaaaccacatgacaggatctttgacgccccagcaacttgtcagatcacattcggcacttgctgagagtggggatccatccagttcaactgctccatccaccagccgtatttctccaataaattcgctgagtagggcaaaccaaggaagcagaaatttaactgacatggtggcaacaccacaaattgacaacttacttcaggaaattcaaagcaagccagataatcgaattaagaatgacatacagagcaaagaaacagtccctatacataaccgacatccagtttctgatcaacttgatgcatcatctgctacctccttttgtttagacgagagcccacgagaaggtttttccttccctccagtttgtttggataacaatgttcaagttgatccaagagataactttcttattgcggaaaatgtggacgcattgatgccagatgccctgttgtcaagaggtatggcttcaggaaagggcatgtgcactctgacttctggacaaagggatcacagggatgtcgagaatgagctatcatctgctgcattcagttcccagtcatttggtgtgcctgacatgtcctttaagcctggatgttcaagtgacgttgctgttactgatgccggaatgccaagccaaggtttgtggaataatcaaacacaacggatgagaactttcactaaggttcaaaagcgtggttctgtggggagatcaattgatatcacaagatatcgagattatgatgaacttaggcatgatcttgcatgcatgtttggtatccaaggtcaacttgaagatccatataggatggattggaagctagtctatgttgatcatgagaatgatatccttcttgtcggcgacgacccttgggaggaatttgtgggctgtgtgaagagcatcaaaatactctcagctgctgaagtacaacagatgagcttggatggtgaccttggtggcgtccctccacaaacacaggcctgtagtgcctctgatgatgcaaatgcatggagaggttga

SEQ ID NO: 11275 - DNA, 621 bp, Oryza sativa
  Clone ID: TFbOSC416737j.C1.o22.fg
atggagcaggagcaggatgaagaggaggaggaggcggaggcctcgccccgcgagatccccttcatgacgtcggcggcggcggcggccaccgcctcatcgtcctccccgacatcggtctccccttccgccaccgcttccgcggcggcgtccacgtcggcgtcgggctctcccttccggtcgagcgacggtgcgggagcgtcggggagtggcggcggcggtggcggcgaggacgtggaggtgatcgagaaggagcacatgttcgacaaggtggtgacgccgagcgacgtggggaagctgaaccggctggtgatcccgaagcagcacgccgagaagtacttcccgctggactcggcggcgaacgagaagggccttctcctcagcttcgaggaccgaaccggcaagctatggcgcttccgctactcctactggaacagcagccagagctacgtcatgaccaagggttggagccgcttcgtcaaggagaagcgcctcgacgccggggacaccgtctccttctgccgcggcgccgccgaggccacccgcgaccgctcttcatcgactggaagcgccgcgccgacgtccgcgacccgcaccgcttccagcgcctaccggtccccatga

SEQ ID NO: 11276 - DNA, 2163 bp, Oryza sativa
  Clone ID: TFbOSC401045j.C1.o15.gm
atgtcggtgacgagagatcggacaaagagcccaggcgggcacccgactagcccggaagagatgataactttcgtggattccgcggcgaaggagcgggagcgggagagtgacaagtgcttggacccgcagctgtggcacgcctgcgccggcggcatggtccagatgccgccggtgagctccaaggtgtactacttcccgcaaggccacgccgagcacgcgcaggggcatggccccgtcgagttcccgggcgggcgcgtcccggcgctcgtgctctgccgcgtcgcgggcgtcaggttcatggccgatccggacaccgacgaggtgttcgccaagatccgcctcgtccccgtccgcgccaacgagcagggctacgccggtgacgccgacgacggcattggcgccgccgcggccgcggcggcgcaggaggagaagcccgcgtcgttcgccaagacgctcacgcagtccgacgccaacaacggcggggggttctccgtgccgcgctactgcgccgagaccatcttcccgcgtctcgactactccgccgatccccccgtccagaccgtcctcgccaaggacgtccatggcgtggtctggaagttccgccacatctaccgcggcacgccgaggcgccacctcctcaccacggggtggagcaccttcgtgaaccagaagaagctcgtcgccggcgactccatcgtgttcatgcgcaccgagaacggggatctctgcgtcggcatccgccgcgccaagaaagggggcgtgggaggcccggagttcctgccgccgccgccgccgccgccgccgacacctgccgccggcggcaattacggcgggttctccatgttcctgaggggcgacgacgacggcaacaagatggcggcggcggccaggggcaaggtcagagcccgtgtccggccagaggaggtcgtcgaggcggccaatctcgccgtgagcgggcaaccattcgaggtcgtctactacccgagggcgagcacgccggagttctgcgtgaaggccggggcggtcagagcggcgatgcggacgcagtggttcgccggcatgaggttcaagatggcattcgagacggaggactcatcaaggatcagctggttcatgggcactgtatcggccgtgcaggttgctgaccccattagatggcctaattcaccatggaggcttcttcaggtttcatgggatgaaccggacttgttacagaatgtgaagagggtgagcccatggttggttgagcttgtgtcaaacatgccggccatccaccttgctccattctcgcctccacggaagaagctttgcgtgccgttgtaccccgagcttcccatcgacggccaatttccgacaccgatgttccatggaaacccgctcgcccgtggggttggtcctatgtgctatttcccggatggcactcctgcaggcatacagggagccaggcatgctcaatttggtatatctttatcagatctccaccttaacaaactgcagtcgagtctatcgccccacggccttcaccagcttgatcacggcatgcagccgaggatcgccgctggtctaattatcggtcatccggctgctcgggatgatatctcatgcttgttgaccattggtagcccccagaacaacaagaaatcagatggcaagaaggcgccagcccagctgatgcttttcggaaaacccatactcacagagcagcagatatccttgggtgatgctgcttcggtggatgttaagaagagctcttctgatggtaatgctgaaaatacggtgaataagagtaactccgatgtttcaagcccgagaagtaatcagaatggcaccacagataatttgtcatgtggaggagttccattgtgccaagacaacaaggtacttgatgttgggctggaaacagggcactgcaaggtattcatgcagtcggaggatgtcgggcgcacacttgatctctctgttgttggttcatatgaggaattataccggcggcttgctgacatgttcggcatcgagaaagctgagctgatgagtcatgttttctaccgtgatgcggctggggcactcaagcacactggagatgaacctttcagcgagttcacgaagacggcgcgtaggctgaatatactaacagatacaagcggcgataacttagcgaggtag

SEQ ID NO: 11277 - DNA, 3405 bp, Oryza sativa
  Clone ID: TFbOSC400589j.C1.o1.fg
atggagatggcggcgaatccaggtggttcaggaacctgcagcgatgcactattccgggagctatggcatgcttgtgctggtccgttggtcacggtcccgaagcgcggcgagcgcgtctactactttccccagggtcatatggaacagcttgaggcgtctacaaaccagcagcttgaccagtacctgccgatgttcaatctaccatccaagatcctatgcagcgtggtcaacgtagaactccgggcggaggctgattcagatgaagtttatgctcaaattatgctgcaaccagaagctgatcaaagtgaactcaccagtctggatcctgagcttcaagatcttgagaaatgcacagctcattccttttgcaagacattaacagcttcagatacaagcacacatggcggtttctctgttcttaggaggcatgctgaagaatgccttcctcagctggacatgtctcagaatccaccatgtcaagaactggttgccaaagatctccatggaactgagtggcatttccgtcacatctttcgtggacaacctaggaggcatctgcttacaaccggttggagtgtctttgttagctcaaaaagattggttgctggcgatgcatttatcttcctgaggggcgaaagtggtgagctacgggttggagtaaggagacttatgagacaagtaaataacatgccatcatctgtcatatcaagccacagcatgcatcttggagtccttgcaacagcttcccatgctatctccactggaaccctcttttctgttttctacaaacccagaacaagccggtctgagtttgttgtgagcgttaacaagtaccttgaagctaagaagcagaacttgtctgttggaatgaggtttaagatgagatttgaaggtgatgaagctcctgaaagaaggtttagtggaacaattattggtattgggagtgtgccagcaatgtcaaaatctccatgggcagattctgactggaaatctctgaaggtccaatgggatgaaccttcggctattgtccgtccagatagagtttcaccatgggaactggaaccattggatgcgagtaatccacaaccacctcagcctccattgaggaataagcgtgcaaggcctccagcttcaccttctgtggttgcggaacttcctccaagtttcgatgtggactctgatcagatctcacagccatctaatggcaataaatccgatgcccctggaacaagcagtgaacgttctcctcttgagtcccaaagtcgtcaagtgaggagctgcacaaaggtaattatgcaaggtatggcagttgggagggctgtggacttgacaaaactaaatggttatggtgatcttcgcagcaagttggaggagatgtttgatatacagggggacttgtgtcccaccctgaagagatggcaagttgtttacaccgatgatgaggatgacatgatgcttgtcggggatgatccttgggagaaattccaatgtttcttcattactgcttcctgtgctgaagacgcaacgcccttttgtcttgaattgtggtggtatttgaactgcaagtgccaggaagttcccaagactggcaagaccgcctggaagaggcattctggcaaatgcatgccgttccaaattgttttgtgttttggtaggagccttggcgttcttgtctggtgcccagatttaggcgattcggtcggcggcggcgcggagaggcggcgaaccggcggcgtggagaggcggcggagggagcccgtgactcggcggagaggcggcaaggagaggcgacgacccagctggcgggctctggcggcgaaccggcggcgcggagaggcggcaaaccagcgacgcggagaggcggcgacccagcgtggaggcagcgacccagctggcgggctccgacggcgcggagaggcggcgaaacggcggcacggagaggcggcaaaccggtggcgcgaagaggcggtgaggagaggcggcgacccatcggagaggtggcgaaccggcggcgtggagaggcggcgaagggagcccgcgactcggcggactggctccagcggcgtgggcttcttccacgcgtcgtcatcgtcgctcattgccggagcgaatggcggcagcgacggcggtggcggagctcgaactttgagttggggaacgtggtggcggcgacttggcaggctggctccgacagtggcgctgggttggtgtgggcgctggagcacgagagaggaggggattattgacgtggggaagagaatccatgtggggccaccatttggcgaggggaaccgccggcgcagcaccctcgtcctcccgcacgtccgatctgcccccttccacgccgtggttccgggagctgtggggggtcaacgccgacaaatagtagcagccgccgtcgccgaagctgatggtaatgaaaacggaaataagcatttcacttgtcacagggagaatgcaaactatggtctaaaatctgcatctgaaaataaaattgagctgctgaggggtgctcatagttgggccgacagtaatttaattgaggatgtactggcctctgtgaacaatgatgttggtgaagcatctgctttgttgaaagctatggcgtctccttgttttccaataagggaggatggactacctgatcagctttcttctgagattaataaaacacatggtttaccatcaggaaatggtacagcagaaaataatcttgtaaatgactcgcagttgttgcctctgccaatgaatatgtcgtctgtacccatagaaccggaagtggaagagctcgatgacgattactttaaccacaggaaagatgcattgaagattatgagggctgccacgaagcattctcaggctgcgagtaatgctttcttgagaggtgaccatgctgctgccaaggaactttccctcagagctcaagaagagcgatccgctgctgaagagctgaacaagaaggcagcaaaagaaatatttcgcctcaggaacagcaataatagcatttggaagctagacatgcatggtctacatgcatcagaggctgtggaagtactggaacggcatcttcacaggatagaattccagccaccagggaataatgcagcttcatctgatgaagtagctaggtctgaacccagagtgtctggtccaagcattgagcccggcccagggaaggtggtgtttgttcgtcccatacaggctatcttagaggtgatcacagggattggcaagcacagcaaagggcaggcctcactacctgttgcagtcaggggcttcctcattgaaaatgggtaccgatttgatgagctgcggcctgggcataagcttctcacttctcagcctgaagttaaaaatcacaaaggaatcaaggtgaaggaagagttcttttctatactttcttaa

SEQ ID NO: 11278 - DNA, 4293 bp, Oryza sativa
  Clone ID: TFbOSC32301j.C1.o3.fg
atgcctccccgcactcgccatggtcgtcgtgagcccacgcccgatcccgtcagtgagaatgaggattcaagcggagatgagtatgttcaaagtgatgatgacaatatggaaaatgttgagggtgatgagatggaagtaagtgatgatggtgatgacaatgagagtggaaatggtgaagatgatgaggcaagtgatgataggagtcctctcgattccaccatccaatttgtgcttaatttgaggaatgctcaacaatacactatcctccgtcatcataatcaattccgaaggcctaacgattgtaatgatccaagatttcatacacggttccaaaagtccgtgtatgcacaagtgtatgccaacaaagccttcgccgaacacaagtggatttcttggaagcacattggtgagacaccggagtttgagaatttgcaagagatgttccggaccgttgggattgatagaattgtcaccatgaagcaaccttttgatgaagatctcatccggcaattctatgccaccgtatgggtgtccggcgattgtgatgcaatgaagtggatgtcgaggaccctccgatgctctatcaaccgccgtgaatccaaggagctcttgcacattcgcttcaacaacggggatgaccttcatgatgagcacacccacaaccccttccccattgatcacttttctcagttttatgaagaagggggaaggcacacatatggcaaggtggcgggtttgagggctctcccaagtgtgatcaaccgcatagtaagggccaccatcctcccaagatgcggcaacaatgatgacatacgcggagttgcttggcatgttattgatgccattatggatggtcgtcggtttgatgttatcaaccttatgatgaaggagattgccatctcaaaggggactcttggacaaggaatctattatgctccctacataatgaggttgattcaaagcaagttgggacaaattggtcacaatttaaaagaacataaggagtacaagcctcgtctccaactctcctcccctagagctcctcgtgtgcgccaaccaacattcgatcaaggtgcaagctcaagtgcagcccccccttctcctcaagggtatgatccaagtgcttttttccatctacaatatgcctactttggaatgcaacccaatgacttcttcaacccggtccttggggctattcataccctaagtgaaagcattcaacgcttatccaccgggcatgaagcattgcatgaggatgttcgtggcttgtgcaccgatgttggcaacttgaatacttcggtgggaagattgcatactagggggcggtcagaccggccacatagtggcggtctgaccggcgtgccctggccggtggtgtgcgaggcttcgcaaatactagtggcgcattatgaatgtcctaaggtatacacgctgcacaattgcacagtacactatactgatggagtatgcaactgtgcacgatgtgagttctgtcccaaaaaaactgcttttggatacaatgcaaaggagaaggccaagacgggtgttctgagaaatgccgcagcgctgctcgacgaaatgcagctcatgggagaaacacagggtgccaagaaggtgatcaactcggagctctggcacgcttgtgccgggccgcttgtgtgcttgccgcagcgggggagcctcgtgtactacttccctcaggggcacagtgaacaggttgcagcgacaactagaaagattccaaattcccgcattccgaactacccaaacctgccatctcagttgctgtgtcaagttcacaacatcaccttgcatgccgacaaggacactgatgaagtttatgcacagatgacccttcagccagtaaactctgaaacggatgtattccctattccaactcttggtgcttataccaaaagcaagcaccccactgaatatttctgcaagaatttaaccgcaagtgatacgagtacacatggtggtttctcggtgccacgaagggctgcagagaagttgttcccacaactggattactcaatgcaacctcctaaccaggagcttattgttcgagatttgcatgataacatgtggacattccgtcacatttatcgtggacagccaaaacgacatcttctaacaactggatggagtctctttgttggggcaaagcgtctaaaagcaggggactctgtcttatttataagcatgcacattggcgttcttgctgctgcagctcatgccgcatcaagtggtagttcatttactatctactacaatcctaggacaagtccttcgccatttgtaattcctgtagcaaggtacaacaaggcaacatatatgcaaccatcagttggaatgagatttgcgatgatgtttgagacagaggagtcaagcaagcgcagatacacaggtacagttgtgggaataagtgactacgaccccatgagatggcccaattctaaatggcgcaacttacaggtcgaatgggatgaacatgggtatggagaaagacctgagcgtgtgagcatatgggatattgaaactccagaaaacactcttgtgttcccttcgtcgaccttgaattcaaagcggcaatgtcttcctggttatggagtttcagtgcctgggatggaaattggatcagcaaatatgtcatcatttccaagggctcagggtaatccctatggcagtttgcagcacattccagctgttggatcagaattggctatcatgcttctcaaccaatctggtcaaacccttgggagtccccttagttttcaccagtcctcatattctagtattatccaaaatgtgaagcaaaattatatccctcctctaacagttagcacttcagcttgtttgacaaagcaagaaagcctgccttcagatgatgcccagcaccagttccatatggcaaatatgcagaatggtgatcttgaaggctctgaagtccagcctgtcattgattcgatttctgagtcaaagttgaatgctacatcaagagatccaagaaacacagattcatacacaagtcgaagtacttcggagcaaaacagtaagggtgagcctagaggcaagactcgtaggagtaagaagggcttgcctcacaaaaccgtttcagagaaatctgacctttcttcagccccttcttggatctgtgacaatcagcaggttggtttagaatcgaaactggttggttgtgatgaacaagtaaactgtggaaatattgaagattcatcaggtgcacttactcaaggtaattttgttggacagccgcatggccatcaggttgaacaaaagggagtgctgtcgccaccaaaggtagaatcatcaaaatcacctgatggaggaaagtctgtcaattcgtttccaaaccaagggtgtttttcgcagttcattgatggtcttgattggatgactcagccttcctactaccaagactccaatgtaattcaaccagccggtgtgtcagagaacattttcagttcttctgcagatatacctccctcaatgattgctgatactatggagacttttcaggcttcatgtctttctgattgccttcctaattccatacaagaattcatctccagcccagatctgaattcactaacctttctttcacctgacatgcaaaatttggaggtccaactccagcatgatggaagcaatttgccaagcacgtccaactcgtttgtacagatgagtttttctgaagagagtgcaagtcagagtgcaaacttaagtggacttcacatggaatctacacacagaagcataaacaccacttcatgctctcaaccaatgtctactgggggctttgatgcagggatgtactcaaagttgccacgtttaaaagaatcccaaatcttgtctttgccagagattcataccaattccatgggaacatcagcttgcagtatggatgcaaccgagtacagccttgaccgaagtgcgaagccgatgaaaccaccagtgcggacatatacaaaggttcaaaagcaaggatcagttggaagatctatcgatgttacagggtttagaaattaccatgagttgagatctgccatcgcttgcatgtttggtctccaggggaaattggagcatcctggcagttcagagtggaagcttgtatatgtcgactacgaaaatgatgttcttcttgtcggagatgatccatgggaggaattcatcaactgtgtccggtgcatccggattttgtcaccttcagaagtacaacagatgagcgagaatggcatgcatgttttgaacgactgtattcaagcagcttag

SEQ ID NO: 11279 - DNA, 2592 bp, Oryza sativa
  Clone ID: TFbOSC401249j.C1.o16.fg
atgagctcgtcgtcggcggccagcatcgggccgccgcagccgccgccgccccccgcgccgcccgaggaagagaagaagtgcctcaactcggagctatggcacgcctgcgccggcccgctcgtctgcctccccaccgtcggcacgcgcgtcgtctacttcccgcaaggccacagcgagcaggtggcggcgtcgacgaacaaggaggtggagggtcacatcccgaactaccccaacctgccggcgcagctgatctgccagctccacgatgtcacaatgcatgcggatgtggagactgacgaggtgtacgcgcagatgacgctccagccactgaacccagtaaggcgcctggggtttttgcatgatgtttgcagtgctgaggttttgatgcaggagcagaacgatgcgtaccttcccgcggagatggggataatgagcaagcagccgacgaattacttctgcaagacattgacggcgagcgacaccagcacgcacggggggttctccgtgccccgccgtgctgctgagcgcgtcttccctcctttggatttcacacagcagcctccagcccaggagctaattgcacgggatattcatgacatcgagtggaagttcaggcacatctttcgaggccaacccaaacgacacctgctaaccactggctggagcgtttttgtcagtgctaagagacttgttgctggagattctgtgcttttcatatggaacgagaaaaaccagcttttacttggaataagacgtgccagtcggccacagactgtgatgccttcctctgttctttcaagcgatagcatgcacataggtctccttgcagcagcagctcatgctgctgctacaaacagccgtttcactattttctacaacccccggacatcaccccattatttatgggaattttataattgggcctctataaaaatccataatatactaatgcgcccaatgcacactttaatgaaacacaggtatatggggactataactgaagttagtgatgcagacccagtccgttggcctagttcctattggagatctgtgaaggttggttgggatgaatcaactgcaggggaaagaccaccaagagtttctttatgggaaattgaaccattgacaacctttccaatgtatccatctctgttcccactgagagttaagcatccttggtattcaggagttgcttccctgcatgatgacagcaatgctttaatgtggctgagaggagttgctggtgagggaggttttcagtctctgaactttcagtcacctggtattggctcctggggacaacagaggctccatccatccttactgagcagcgatcacgatcagtaccaagcagtagttgctgctgctgctgcttcccaatctggtggttacttaaaacagcaattcttgcaccttcagcaacctatgcagtcccctcaagaacactgcaacctcaacccattattgcagcaacaaattctgcagcaagcaagccagcaacagataattaatcctgatgcccaaaatatccaaacgatgttgagcccaagtgctatacaacagcaactccagcaactacagcaaatgcagcaagttcagaatgatcagaagcagaagattcaaccagatcaaagctaccaagttcctacaagtgcagttctcccaagtccaacatcattaccgagtcatttgcgagaaaaatttggcttctctgatcctaatgcgaattcttcaagcttcatcacctctagcagtagtgataacatgttggattcgagcttccttcagggaagttcgaaagctgtggacttatctcgatttaatcagcctgtagctagtgagcagcagcagcagcagcaacaggcatggaagcagaagtttatgggttcacagtcagtgtcttttgggggctcggttttgcataactcacccacaagcaaagatggttctgttgaaaacaaaattggtcgtgatgtgcaaaaccagtccctttttagtccacaagttgactcttcatccctcctgtacaacatggttcctaatctgacttcgaatgtttcggatggcaacttatcaacgatcccttctggatcaacttatctgcagaatgcaatgtatggttgcttggacgactcttctggtttattgcaaaatacaggagagaacgatccagcaaccagaacatttgtgaaggtttacaagtcaggttcggttgggaggtcgttggacataacccggttctctaattatgctgaacttcgagaagaactgggtcagatgttcggcattaagggtcaattggacgaccctgatagatcaggctggcagcttgtattcgtcgacagggagaatgatgtgcttctccttggagacgacccttgggaattcattaacatctatatgaatgtgagcaatgctaaaaagtcttacattatgaaacggagggagtacaatactttggtttcctggtttccacaactaatagcttatcgaggaaagactgttcttccttcaataatatgtgttggtcagtcactatatgttgatgctcagttacccaagacccttcgtgagagtaaacatcagacatga

SEQ ID NO: 11280 - DNA, 2250 bp, Oryza sativa
  Clone ID: TFbOSC101706j.C1.o13.gm
atggccacggtggaacggcgcgggagcgccacggaagacgaggaaacagctgccaccggcgggcgcaacgctgccggccgtgacgccgctggctgcgacactgctagccgtgacgccaccgggcaaggggctgcaggtacaggcaccggcgggcgaggcgccgctgccgggagaggcgctggcgggcgacgcgacgccgccgggagaggcgcaggcgagcgcggagaatcgccgggcgggagcatttcgtcttcgcacgggaacgagaggagagagaggcaggagtgtgagattgggagcgatattcgcgagaatactcgccccctcggtggcgtcgacggcgagggcgcgccatgcgcgccgcccccctcccccatccctgctggccccgcttcgtcgacggtctccgcggcgtcgagcgcgcccgctacccgcgactacctcggcgggatcactggccaccgcctcggccaggaggacgactccggcggccacgagtacacatccgtctccggcatccacgtccccagcagcagcggcgtcgccttcgtgtcgttcggccagtgtcctcaggaggtgatctccaccgacctctgcctcggcttggggcccatcgccgccaccgcaccgctgcaacctcctccacctccagcggcggcagcggcagcggggtctccgtctgctacgacgccggagccaggacatggggaagcgacaccgacgacaagttcctccgcgcagtttcagacgcaggcgcagcaggttacgcgcgacatgtggatggcctgcgctgcacccaagtccggccgtctccccaccgttggatcattggtctactacttcccggacgggcacgccgagcagtgcctgtcacgtccgcaggagccgcttccaggcagaattttcctatgcaaagtcacggacgtccgcctcggcgcagcagcaacaaacgaagccttggcaaccatctctctcgtcccgatcgccgccgacgaccatgccttccagcttcaggctcccgctgatccagaccctgctccagcccagtcccagagtctcgtttcattcgtcaagcctctcacctataccgatgtcaccaagaatcggttcatggtgcccaaggacgatgccgctgcgggagttcttcctcacatacagttgaacgatgatgtgcctctccgaatcaaggacttgagcggaaaggagtgggcgtttaactacacctggaaagctcacacccgcatgtttcgcaatggttggatggagttttctaatgccaacggcctcgtcactggcgacaatgccgtgttcatgcgtcgcggcaacggcgagatgttcatggcggtgcggcgcacgcgcaacaggccggcgcccttctcagtggaggaggtcatcgaggccgtgtggcgggcagcgcgccgcgagccgtttgaggtcagctattgcttgcgccaggatggggacgagttcgttgtaccacgtgacatcgtcgatgatggcttacgcgccaggtttgctccaggcatggctgtgaacttcgtatgggctgttgaggatggcaagctgccaaccatcgggccacagggggaggatgtatgcaacgcttgtttcagtgagcttgaagaccagctggttgcgtgctttccagagaccgtgcgaacaagcagcaaagcatgcagggcatcccggtttctggtgttctgggctgacgtcatccaagggggggctgcgctgacaggtgggccccgcttgtcagcgcacaaggggaggagagggggctcgggcaagtgggccccactggcagcggcacaaggtggccggtctaccgtggaccgggaccacgcgggtggtccaccgccggtccacgggaccgacagtccggatcggcccgaggctgatcggacggcgcgggcggcgcgcaggccatccacatgtcgtgcggagcggcggcggacggcgcgaaaggctgcggcggacgtccggagcggcggcacggccaaaggcggcggcacggccaaaggtggcggcgcacgcgggaaggggagaaaagggagggggagggagtcctcaccggaggggcggcgaccggagcgggaggggatgagcggcggcagcgcttcggaaaacggcggacgggagcggcgcgtcctgggaaaaggcggtgaaggggttagggagaagagaggagccgcggcacggcgaggagaaatggccggagatggaaacaatggcgagctcaccggcgtgtag

SEQ ID NO: 11281 - DNA, 2187 bp, Oryza sativa
  Clone ID: TFbOSC101706j.C1.o5.fg
atggcgcagccgcctgacgccgccgccgccgccgccgtcccgccgccggtagtcatcgaccgggatgtctggcacgcctgcgccgtcccgtactccggcgtcctccccggcgtcggcacactggtctactacatcccccatggccacatcgaacagtgcgccgaggatcccgcgctgctgctctcccgcctcccggaccccatccaccccgtgccctgcaccgttgccgacctcgtcctcgacgtcgacgccgagagcggcgaggcgtacgccaccatctccctccttccaggcagccacgacgacacgaccgcgcggcgccaggtccccgcccacggcgagccggggttccgcttcttcgagaagcagctgtcgccggccgacgtcaccagcaacgccctcgtcctccccgccggcgccgagcacgtccttccgccgctcgacatcgccgcctaccagaccgcccggctcttcgacgtgagggacctgcgaggcaagcgcttcgagttcgtgcacatctgggacaagaagcgctgccgctacatgctcggcgacctcggcgtcaacgacaacgacggctggagagggttcgtcaaagccaagcgcctcgccaccagggacaccgtggtcttcatgcgccgcggcggcggcgacggcgacggcgacggcgagctgcttgtcggggtgcggcgcgcgccccgcgcgcgcggcggccaccacccgaggcccggggtcgaagacaacaaggtggtgtccgaggtgtggctggcgatgcagggcgtgacgccgttcgaggtgacctactacccacgggagggcacattcgagttcgtggtgtcgcgcgacgagtacatcggcttctccttctcgccgttctaccctttcgttcccgggacgacggtgcacttgcggatgaacccgctgcagatcgcccaatcgatttcgggcaccgtcaggaccttcgaccatctacgcccatggcgcatgctcgaggttgattgggatcaagcggcctccccgatctcctacaggatacacagacaagttaattcttggcaagtcctgcgtcagcctcagccagcagcaactacttcggctgtgcgaattcgggatgccattgttgccaccccgcaagttcagataatggcgctgccgaggccgccgccgccgacgacgacgacgggaatggtgccgtccgatgattcctacgccatgatttccctctttccgggcgactgctacgtcacgcaccgcccgcttcccgccgcgcgcgaccccgtcggaggccagcgggagttctgcttcttcgacaagaagctgtcgccgagcgacgccgcggcgaacggcggcggcagcggcgccctcttcgtgatccccaagcccagcgccgccgagcacgtccttccgcggatcccggacctccgcgtgacgaacctgcaaggcggccgctgggagttcggccacacctggagcgacgccgacacggaccgccgctcctcctcccacacgctcgccgccggctggagcgcgttcgtcaaggccaagcgcctctgcgtcggggacaccgtgatcttcatgcgccgccgccccggcggcgagccgctcgtcggggtgcgccgcaagccgcacggcggcatgccggtcgggatccccgacaagcacgtggcggacgcctggctcgacgcgtcgtccgcccaaccgttcagggtgacctactgcccatggcagggcacggcggagttcgtggtgcgccgcgaggaggtggaaggctcgccgccgctcgctccggggacgagggtgcgcttactgatgaaccccgacgacgcgcgccgccgcagccagccaccggtgtacggcaccgtcagggacgtccattgccggagcgagtggcgcatgctcgaggttgactgggatcgtgactccccgctcgctcccacgatgaacagacgagttaattcttggcaagtccaacccgttcagctcgctcttccaccacagggttctgatgaggaggcggcagcagcaaccacatcgactgcgcacgccggagatgccaccacgtctgctccatcgttggcgctgcaacttcagacaatggcatcctcttcttcttcatccgcaccaattatcccgagtcgtggctccgcgtttcgcattgtaaatcctcgagatggatcacagggctaa

SEQ ID NO: 11282 - DNA, 3318 bp, Oryza sativa
  Clone ID: TFbOSC401793j.C1.o21.fg
atggcagccgctgcggcggcggcggtggtggggagcgggtgcgaaggggagaagacgaaggcgccggcgatcaactcggagctgtggcacgcctgcgcggggccgctggtgtcgctgccgccggcgggcagcctcgtcgtctacttcccccagggccacagcgagcaggcggacccagaaacagatgaagtgtatgcacaaatgactcttcagccagttacttcatatgggaaggaggccctgcagttatcagagcttgcactcaaacaagcgagaccacagacagaattcttttgcaagacactgactgcaagtgatacaagtactcatggaggcttctctgtgcctcgtcgagctgcagaaaagatatttcctccactggacttctcaatgcaaccacctgcacaagaactacaggccagggatttgcatgataatgtgtggacattccgtcacatatatcggggtcagccaaaaaggcatctgcttaccactggctggagtctatttgtaagcggcaagaggttatttgctggagattctgtcatttttgtcagggatgaaaagcagcaacttctattaggaatcaggcgtgctaaccgacagccaactaacatatcatcatctgtcctttcaagtgacagcatgcacatagggattcttgctgctgcagcccatgctgctgccaacaatagcccatttaccatcttttataaccctagggccagtcctactgaatttgttatcccatttgctaagtatcagaaggcagtctatggtaatcaaatatctttagggatgcgctttcgcatgatgtttgagactgaggaattaggaacacgaagatacatgggaacaataactggcataagtgatctagatccagtaagatggaaaaactcgcagtggcgcaacttacaggttggttgggatgaatccgcagccggtgaaaggcgaaatagggtttctatctgggagattgaaccggtcgctgctccatttttcatatgtcctccaccattttttggtgcgaagcggcccaggcaattagatgacgagtcctcggaaatggagaatctcttaaagagggctatgccttggcttggtgaggaaatatgcataaaggatcctcagactcagaacaccataatgcctgggctgagcttggttcagtggatgaacatgaacatgcaacagagctcctcatttgcgaatacagccatgcagtctgagtaccttcgatcattgagcaaccccaacatgcaaaatcttggtgccgccgatctctctaggcaattatgcctgcagaaccagcttcttcaacagaacaatatacagtttaatactcccaaactttctcagcaaatgcagccagtcaatgagttagcaaaggcaggcattccgttgaatcagcttggtgtgagcaccaaacctcaggaacagattcatgatgctagcaaccttcagaggcaacaaccttccatgaaccatatgcttcctttgagccaagctcaaaccaatcttggccaagctcaggtccttgtccaaaatcaaatgcaacagcaacatgcatcttcaactcaaggtcaacaaccagctaccagccagcccttgcttctgccccagcagcagcaacagcagcagcagcagcagcaacaacaacaacaacagcaacaacaacaaaaattgctacaacagcagcagcaacagcttttgctccagcaacagcagcaattgagtaagatgcctgcacagttgtcaagtctggcgaatcagcagtttcagctaactgatcaacagcttcagctgcaactgttacaaaaactacagcaacaacagcagtcattgctttcacaacctgcagtcacccttgcacaattacctctgatccaagaacagcagaagttacttctggatatgcaacagcagctgtcaaactcccaaacactttcccaacaacaaatgatgcctcaacaaagtaccaaggttccatcacagaacacaccattgccactgcctgtgcaacaagagccacaacagaagcttctacagaagcaagcgatgctagcagacacttcagaagctgccgttccgccgaccacatcagtcaatgtcatttcaacaactggaagccctttgatgacaactggtgctactcattctgtacttacagaagaaatcccttcttgttcaacatcaccatccacagctaatggcaatcaccttctacaaccaatacttggtaggaacaaacattgtagcatgatcaacacagaaaaggttcctcagtctgctgctcctatgtcagttccaagctcccttgaagctgtcacagcaaccccgagaatgatgaaggattcaccaaagttgaaccataatgttaaacaaagtgtagtggcttcaaaattagcaaatgctgggactggttctcaaaattatgtgaacaatccacctccaacggactatctggaaactgcttcttccgcaacttcagtgtggctttcccagaatgatggacttctacatcaaaatttccctatgtccaacttcaaccagccacagatgttcaaagatgctcctcctgatgctgaaattcatgctgctaatacaagtaacaatgcattgtttggaatcaatggtgatggtccgctgggcttccctataggactaggaacagatgatttcctgtcgaatggaattgatgctgccaagtacgagaaccatatctcaacagaaattgataatagctacagaattccgaaggatgcccagcaagaaatatcatcctcaatggtttcacagtcatttggtgcatcagatatggcatttaattcaattgattccacgatcaacgatggtggctttttgaaccggagttcttggcctcctgccgctcccttaaagaggatgaggacattcaccaaggtatataagcgaggagctgtaggccggtccattgacatgagtcagttctctggatatgatgaattaaagcatgctctggcacggatgttcagtatagaggggcaacttgaggaacggcagagaattggttggaagctcgtttacaaggatcatgaagatgacatcctacttcttggcgacgacccatgggaggaatttgtcggttgcgtgaaatgcattaggatcctttcacctcaagaagttcagcagatgagcttggagggttgtgatctcgggaacaacattcccccgaatcaggcctgcagcagctcagacggagggaatgcatggagggctcgctgcgatcagaactccggtaacccttccaatggttcatatgaacaattcgaatga

SEQ ID NO: 11283 - DNA, 1590 bp, Oryza sativa
  Clone ID: TFbOSC401200j.C1.o58.fg
atggcgcgcccgccagccgccaccgctccgcctcctcctccgccgccgccgccaccgccaccgccaccgatcgaccgcctcgtctggctcgcctgcgccgccccgctgtcccgcatccccgtcgtcggcacccaggtctcctacttcccagagggccacgccgagcagtgtcccgcccctctcccggatccgctcccctccgcccaccgattcttcctctgcaccatcaccgccgtcgacctctccgccgacaccaccaccggcgagccctacgccaccatctccctcctccctcttcgccacgacgcccccgcccccgcccccgcccccgcccccgccgccgccgaattagcagaagcagaatcacaggagttccgctactacgccaagcagctgacgcagagcgacgccaacaacggcggcggcttctccgtgccaaggttgtgcgccgatcacatcttcccggcgctcaacctggatgatgacccgcccgtccagagcctcaccatgggggacctgcagggcgactcgtgggaattccgccacatctaccgcggcacgccgcgccggcacctgctgacgaccgggtggagcaagttcgtgaacgccaagcagctggtggccggggacacggtggtgttcatgtggtgcggggccccggcccccgagaggaagctgttggtcggggtgcgacgcgcggccaggtactcgggcgagtcggcgtgcaacgcgcgggggcgggtgcagccccaggaggtgatggaggcggtccgactggcggcggagcaggcggcgttcagggtgacctactacccgcggcatggggcgggggagttcgtggtgccgcgggtggaggtggataagggattgactactccgtggaggtgcgggatgcaggtgcgcgcccaggtgatggaggccgaggacacccgccgcctcgcttggctcaatggcaccctcactaacctccgccaccaacaaatctggcgcactctcgaggttgaatgggatgcctccgccgcgtcatcttccatgaaaaacagatttgttaatccttggcaggtccagcctgttgatttccctcctcttcccatggggctaaagatttctaacaacaatattagtgcacctgtgtgcaatggggattcactgctggtgccaccgatactaatgcacccgcaacctcaacctcccgctgacattcagggagccaggcataacaatggccatgcctatgcagatataccctcttcatcaacaccatcaatggtgaggactcagcagctgttcccaagggatcttcagattttagttccccacaccgacattgtcactcctcaaaatggatcaccgcccgacaaccccgtaaacacgcctctttctgcatctgacggaatgaagaccatacagctgtttggcgtcacaataacatcacctgtgcaaggagacaccaatggcgctttcgcttcagcacaagtgaatcaggttccagagggtgtagatgatgaaactgctaccgaagaagcttctgacacaagcctacctgactctcttaccaatggccacaatcaagatggtgctaggctttga

SEQ ID NO: 11284 - DNA, 939 bp, Oryza sativa
  Clone ID: TFbOSC401166j.C1.o27.fg
atggagttcaccccaatttcgccgccgacgagggtcgccggcggtgaggaggattccgagaggggggcggcggcgtgggcggtggtggagaaggagcacatgtttgagaaggtcgtgacgccgagcgacgtggggaagctgaaccgattggtcatccccaagcagcacgccgagaggtacttcccgctcgacgccgcggcgggcgccggcggcggcggtggtggcggcggtggcggcggcggggggaaggggctggtgctgagcttcgaggacaggacggggaaggcgtggaggttccggtactcgtactggaacagcagccagagctacgtgatgaccaaagggtggagccgcttcgtcaaggagaagcgcctcggcgccggcgacaccgtgtcgttcggccgcggcctcggcgacgccgcccgcggccgcctcttcatcgacttccgccgccgccgccaggacgccggcagcttcatgttcccgccgacggcggcgccgccgtcgcactcgcaccaccatcatcagcgacaccacccgccgctcccgtccgtgcccctttgcccgtggcgagactacaccaccgcctatggcggcggctacggctacggctacggcggcggctccaccccggcgtccagccgccacgtgctgttcctccggccgcaggtgccggccgctgtggtgctcaagtcggtgccggtgcacgtcgcggccacctcggcggtgcaggaggcggcgacgacgacaaggccgaagcgtgtccggctgttcggggtgaacctcgactgcccggcggccatggacgacgacgacgacatcgccggagcggcgagccggacggcagcgtcgtctctcctgcagctcccctcgccgtcgtcctcgacgtcgtcgtcgacggcggggaagaagatgtgctccttggatcttgggttgtga

SEQ ID NO: 11285 - DNA, 1422 bp, Oryza sativa
  Clone ID: TFbOSC400445j.C1.o23.fg
atggcccagtttaggtctgcgcctgtggaaagcgaggcggagccaggcgccgatggccctgtggatgaagccaatgctgtggaagaggagaaatctggtaagggtgaggatggcattgaggaggctgccgataccgttgattccgtgaaggattcagcaaagcctgaaggcatggatgcaaaggaggaggcggtggagcaggagggtggggccgcagcggataaggcaaaggatattcctgtgactagtaacggtaagacggatgctggcggaaatgaggtggctgaaatgaaggttgaaaaattggagaatggtgatgggcatttgaaggcggacggcgatagcaatggtgataacaagggtgctgatggtgagaaacagcttatgttagcgtcagctggggaggacgtggaggacccggtgctgtccaagcttgcaagcaactccttcatgtttgattacagctgtggtggtgatgactcggggactgaggaggagcaggctgctttcatgaaggaacttgagcggttttacagggagaagcttatggaattcaagcccccgaagttctatggtgaagggttgaattgcctcaagttagtacaaggacctctttgtctgttgtggagacaagtgactgggttgggtggctatgatcagttgcatcaacaggtgacatcgtgcaaactgtggcggcaagtgggagagtctttcaaacctccgaagacatgcacaactgtttcatggaccttccgtaacttctatgagaaggcactccttgaatatgagaaacacaaaatcgaaacgggcgagtttcaagttgctgcatctaatttaacagagaggattacttctgaaagtcaggttggcatccatgcttctggttctggaagagctagaagagaatctgcaacccgagctatgcaaggctggcactctcagcgcttgcttggcaatggtgaaattgctgatccaataattaaagataaagggacggtgtctgtcttaaaaaaggataaaactcctaaaagcagcggttctgccaagaggaaaaggacaccgaccttggaagatgacaggattgtaccatataaacctgacaagctacaaaatgactcaatggttcttgaccttggccctccagctgattgggtaaagataaacgttcggagaaccaaagattgctatgaagtctatgcattggttcctggccttctgcgtgaggaggtacatgttcagtcagatcctgctggccgtttgatagttactggagagcctgagcaactagacaatccttggggtgttactccattcaagaaggttattagtttgccctcccgcattgatcctcatcaaacttcggcagttgtcactctccatggacagctatttgtccgtgcaccattcgagcagtcaaagtaa

SEQ ID NO: 11286 - DNA, 2298 bp, Oryza sativa
  Clone ID: TFbOSC900362j.C1.o9.fg
atgtcgcaaatccagagcttctcgcggcagaactgcgtgctcctcgcggtgctgtgtgggaagcacgctgagaagcgtgcccaggcgaggtcggggctggaggcgaagcggctgcggccgtcgtacccgttcccggagctcagctcgtcggggagattggaggtgcacacgctgttcaacccgacaccagagcagttcctcgaggcgcagcgcgtggttcagcccaacttcttgtacatccaggggcaacagcttgaggatgagaaggagattggctcgctcgtctggggggacaatgacgtatctgatccgcaggcgtttagttgtctcatcagcccgccatttccgaccatagtttatctggaggttccaattggtgaaaaacttgctcaagcagttcattcaaaggggattccatacgtaatatactggagaaattcattttcatcatatgcagcatcccattttcgccatgcattaatgtcagtggttcaaagttcggtgagccatacttgggatgcttttcagcttgctcatgcatcctttcgattatactgtgtaagaaacaaccatgtacaaagtgttaagcttgggcctcgtctactaggggatgctccaaagataaatataacccctcctgagaatgagatggttgaggaggaaggttcttcagatgtgtttccagctataaaaatttatgatgatgacatcaacatgaaatttcttctttgtggagttcctagcacaccggatccttgtttgttaggttcattagaagatggcctgaatgcacttctgaatattgaaattcgggggtgcaaacttcagaatcgaatcagtgcttctccaccaccacttcatgctgcatccttaccacgtggaatggttacaatgcgttgcgacatcactacgtgcagttcttctcatgtgtcacttcttgtttctggtagcgcacaaacttgttttgatgaccagcttttggaaagccacatcaaggatgagatcattgagaagagccaactagtccatgctctgccaaataatgatgataagttatcatcaagtgtgcctttcacttcaatgtccacagcttgtggggcttctacctttgaagtttggatgacccttcctaagtgggcagcacaggttctgaagcatttagcgccagacatctcatacaggagcttagtggcacttggaattggttgtataaatggcacgcctgttgcttcatttgataggcgagatgcagaccgccttcttttcttttgtacaaatcaacacaaagatttggctattgaaaatggcccatactttcatctgccaagatggtcagcatctcttaccaaggaaagagtgaaggtgggtctggaatcgaaaccaaatttgttaggtgcgaatggaattcctgaggacaagaaacgtctgatcgaagggccttcctcatcttccaaggcaaaattgaagcctgcaactatgaggcccattcctcactctagaaagcaacaaatgcatccttttatgggtttcctggaagctactgttcatgaaactagtcaggttaagccaaacttgccagctgctcccccagtgaagcataattcggtacctgctgctccagcaacacatagaaaatcaacttcagggccatctcatgctcagtcaatcattcaactgaacccactgcctctgaagaaacatggatgtgatcggttgcctattcagatgtgctctgaggaggacttcttgaaggatgtcatgcagtttttaattcagaggggtcataatcgactcgtacctcatggaggactagctgaatttcctgaggccgtccttaatgcgaagcgccttgacctatataacttgtacaaagaggtggtgtctaggggtggcttttatgtaggcaatggtataaactggaagggtcaagtcttctcgaagatgcgtaaccatactgtgacaaatagaatgaccggtgttggaaacacactgaaaagacattacgaaacatatttactggaatatgagctagctcatgatgatgtagacggggaatgctgtttgctttgccacagtagcgctcctggagattgggtgaactgtggtttgtgtggtgaatgggcacattttggttgtgacagacgacaaggcctaggcactttcaaggattatgcaaagacagatgggctggaatacatctgccctcactgtagtctagcaaactataagaagaaacctcctccccaaaaggtagctaatggctttgcgaatacagtgtctgtatcacgaaatgtttag

SEQ ID NO: 11287 - DNA, 1677 bp, Oryza sativa
  Clone ID: TFbOSC4861j.C1.o5.fg
atgagcgcggcggcggaggaggcggctgcggcggcggcggcggaggaggtggagggggtggaggcggggaagaagggcgtggcggatgcgaaggggaaggggaaggagaaggtggtggtggcggaggaggattctgcggtggcggcgggctccgggggaagcggaggcgggaggaggacgttggtggcgtacccggcgcgggttgcggggtacaaggacgtggtggcggacgcggcggtcttcaggagggcgctcgaggggttgcacgcccagatggggacaaagctcaaggtgccaattattggtggaaaagaccttgatcttcatcagctgtttaaggaggtcacttcacgaggtggcattgataagaaatactacatgtcactattataccattttgagaggctatacttgtttgaggcacaaggctggtatcaagaaactgcagattccagaagcatttcctgtatagaaatgaaagctgaaggtcaagcttcccggaaaaggaaaagaggaagcaattcttgttcttcagaccctccaattaacttagagtggaccctttgttcaacaccattgatgaaggtgccgaggtacaacatcttggcgccaaccatacacttcggttctgagaaaggccaagctggcatgaagtccacatggtccgcgcagaaggtgttggcgctaattggccaaaagctgaccattaaaataagagaaataaaagggaaaaactcacagcttgaacactcgaacccaggatgtcgaggaaatcatgaggccatcaaaccactagaccacttatcagcttgttacctattgtaccccacaagccttttaagcttcctatatggtcagcgccaagagttagttcctttgactttgtcagacctagctgcttctttggataatgatgtacaagtgataattgatggtaagtttgaacatggctacatagttaccgttatcatgggctcaaaatcaacgaaagcggtactctataattgcaccgaagaacctgcagtgccaactgcggtgcctcatgttgcaattgacagcgctgagggcatacgtcctcgccgccgccgccgtaggaagaagttaagtacaacagaccccaaccatcctaaaccaaacaggagcggctacaatttcttcttccaagatcagcacaggaagctcaagccagaatatcctggacaagacaggcttatcagcaagatgattggtgaacgatggaacaatttaggccctgaagataaagcagtatatcaagaaaaaggtgtagaggacaaggcaaggtaccagagacagttagctctttacagagaacagagaacaggccagccaatcagcaacgcggtgcctatccagcagagacttcctcagaaagaagtgacgattgatgaggtggactctaaagtcagtgaaggtgatatcctgctgtccaaccaaggatacagcagcagtaccagtagcagtgatgaaaccgctgattcgggagaaaaaaatgtggaagatgatgaagagtttaacacagagacatctcctgagccgagcatggaaacaacagattctcatggacagcctgatccttctgctgatggggagcgctttgaactgcgccgcagggagaaccctaagattgatgagaaacgtgacatgccacctaattaa

SEQ ID NO: 11288 - DNA, 3303 bp, Oryza sativa
  Clone ID: TFbOSC101541j.C1.o11.hg
atgaacggcgccacggccggctccggctccggctccgaccacgacgacgcgcgcgccgccgaggaggccagaggggaggaggcggcaggccgtgccgtggaggttgaggaggaggaggaggaggaggaggcggtgcccgtggcggaggagagggccgcgtggggcggcggcggcactcccccgacccccgagccgaagagcgacgcggacgcggagggcgcgggctcgctggatcgggtggagctcaatgcaggggcgggcggcggccgtgagcgcgaggacgacgagggggaggacgaggccgtgggggcgaggggggtggagatgaacggggaggacgccatgagccacgacggccacgacggcgatgaggatggcgatgacgaggaggacggcgacgacggcgaggaggaggaggaggaggatgatgatgaggaggatgacgatgacgactccacccccgatgcgtcgccgagggcggaggcgaaggcggagggcgagagctccaccgtgatggcgggctgcgccaaccagcccgctgagcccgaccccttcctcgacggtgacgactctggaacggaggaggagcaggcggcgttcatggtggagctggagcgcttccacagggagcacggcctcgagttcaagcctcccaagttctatggcaaaggtctcaactgcctcaagttatggaggcaggttgcccacctgggaggccatgagcaggtaacaatttgtaaactatggcgtcaagttggagagactttcaggccgccaaagacgtgcactactgtatcgtggtcgttccgaattttctatgagaaggcacttctcgagtatgaaaaatacaaagtccgaactggccagcttcaagtaccattgtctgctttaccacagcctggtggtactggccgtgaggaaaaagattcagtcccttcttcaagtcgtggtaagaacctaaaggatgactcaatggtcactgatgttggagaacctgccgagtgggtgaagattaatgtacgacagactaaagattgtttcgaaatctatgctctggttcctggacttctacgcgaagaggtgcatgttcagtcagatcctgctgggcgtctggttataactggggacccagagcagcctgataatccttgggggatcactccattcaagaagggcccatcaattagtagtgaaacaaatccggtggtgggcccgattcgcaattcgccaaacggcagggacccgacgcgaccgcatcggcatcgcggcagcggcagcgtgcggtgccgacttgtgggaggagccgcctcctccgcctccgactatataacaaaaatcctcccgcacccccggcacatcgtccccgctagtcgccgccagtcaccaagccccgagcccacccccccaagctaccagcacagaacgaatcggagcgccgcgccgcgccgcgctgcgtcaccggcgatggactccgactacggcgtgccgcgcgagctctcggaggtgcagaagaagcgcgcgctctaccagcccgagctgcccccctgcctccagatctgtgtgcttccggaccgcgcggcgccagatcccgcgccgctccggcgtccggatcagtccatctcaccggcgctggtcgtgtatactggcaccactgtgagagtggagtatggtgacgctgcaattgctgctgatcctgcaggcgctcatgtgatcagccacgcgttcccccacacatacgggcagcccctggcccattttctccggaagacggctaatgtccccgatgctactgtcatatcagagcatcctgttgtcagggttggtgttgttttctgcggaaggcagtccccgggaggccataatgtcatctggggactccatgaggcaattaaggctcacaacccaaacagcaaacttattggttttcttggtggaagtgatggtcttctcgcacagaaaactttggagatcaccgacgaagttctttcttcatataaaaaccaaggtggttatgatatgcttggccggacaaaggatcaaattagaacaacagagcaggtcaatggtgccatggctagttgtcaggctttgaagttggatgctttagtaatcattggaggtgttacatccaatacggatgctgctcaacttgctgagacttttgctgaggctaagtgtgcaacgaaggttgtaggtgttcctgtaactttgaatggggaccttaagaatcagtttgttgagacaaccgttggttttgataccatatgcaaggtgaactcacaacttataagcaatgtatgcaccgatgctctttcggctgagaagtattactactttattcgcatgatggggcggaaggcttctcatgtggcattggagtgtgctcttcaatcacatccgaatatggttatcctaggtgaggaggttgctgcatcaaaacttaccatctttgatatcacgaagcagatatgtgatgcagttcaggcaagggctgagaaggataagtatcacggagttgtacttattccggagggactcgtggagagtattcctgaattatatgctttgcttcaggaaattcatgggcttcacggcaaaggtgtttccatggagaatatctcctcacagctttcaccttgggcatctgcactatttgagtttttgcccccatttattaggaagcagctgcttctccatcctgaatctgatgactcagctcaactttctcagattgaaaccgaaaaacttttggcccaattagttgaggatgaaatgaacaggcgtatggttcttgggcacgtgtgctaccacatcttagctgctggtttgaatggttacatggctactgtgacaaatcttaagagtcctgcgaacaaatggcgatgtggtgcggctccgatttcgtctatgatgaccgtgaagagatggtcacgtggtcctgcggctactcaaatagggaaacctgctgtccatatggctactgtcgacttgaaaggcaaagcattcgagctattgaggaacaattctaccagcttcttaatcgacgacatctacagaaacccaggaccactccaattcgaaggagcaggtgctgattcaaagcctatttcactgtgcgtggaagatcaagactatatgggcaggatcaagaaactccaggaatacttggagaaggtgaaaagcatcgtgaagcctgggtgctcgcaggatgttctcaaggcagcgctgagcgctatgtcatctgtgaccgagacattggcgatcatgacatcgtcttccactggccagggaaccccactctga

SEQ ID NO: 11289 - DNA, 5196 bp, Oryza sativa
  Clone ID: TFbOSC402966j.C1.o6.fg
atggggatctccgccgcagccagaggcagcggcgttggatcttccgtccctgaggctccggtgttccgccccacggaggaggagttcggcgaccccctggcgtacgtggcccgtatccggcccctcgccgagccatacggcatctgccgcatcgtcccgccgccctcctggtctcctcccccggcactcgacgtctgcaccctctctttccccacaaagaggcagcccatccaccgcctcctcgcccgcctcgcccccgctgatcccgacaccttcctcctcgattaccgccgtttcctccaccgacaccgaggccgcaagaagccaaagccaaagttgcctgccctctccgacggacgcccgctcgacctctgccgccttttccacgctgtcaagcgcttcggcggctacgacggcgcctgcgcggggaagcgctgggccgacgtgctccgcctcgttgatgacaaggcgccgaggcatgccttctccgtctccgagcacgtcatcgcgcagctctattatgagcatctctatcaatatgagcacttcacaaacagattgccatcacaatcacatgatgatcaaccgccggtttctgcttcctctgctaatattagtattaggcgccagaagaaaaggcttaggaaaaccagcaacacaatgggacactgtggaggcagcactagtgccaaaactgcagcatctgctcccaagcagaaaaggagaaaggttgatgcaacggctactgtggtcaatgaggcaatggatcaggtctgtgagcagtgtaatagtggcttgcatggggaagtcatgctgctctgtgatcgctgtgataagggatggcatctatattgcttgtctccaccactcgagagtgtgcctccgggaaactggtattgctcagagtgcatgaactctgataggaattgttttggatttgtccacaggaggaagacttgccaagttgaaactttccggaaatttgaggagagggtgagaaaaaggtggtttggacacaagaatcccagtcgtgttcaggttgagaagcaattttgggagattgtagagggaaaggtaggagagcttgaggttatgtatgggagtgatttggacacttcaatttatggaagtgggtttcctcgcctttgtgatcccgtgccatcgtcggtggacccagttatgtggcacaagtattgctcgagcccatggaatctgaataatttcccaaacctaccaggctcagttcttcagacagtccgggataacattgctggtcatctgatgtctaatcatagagccgctgtgagtgctagtctttttcacctacacagttactccatgcacgtgggtgagccgaaatgttggtatggggtacctggagcagaagcaaatgcttttgagaaggcaacactgagacttgttatgttagaatacttaaccttttgtgatctgcaggttatgcgcaatgctttgcctgatctatttgatgcacagcctgacctgctttttcaccttgtcacgatgctgagtccatcgattttacaagcaaatggtgttcctgtttatagtgtgatacaggaacctggtttaaattgtgctgaggctgtaaattttgctcctgccgattggttacctcatggtggcattggtgctgaactatatcgcctgtaccgtaaagcacctgttttgtcacatgaggagcttttgtatgtggttgcaaagaacggcgtggacaatgaatcacttccctacttacaaggagaaatagagaggctatttgtgaaggagaaaaaatgtcgtgaggagctatggattactgggattgtcaaatccaatctgatgccaccgaagaataatccaaacttcattggaagtgaagaggtagacctactagtatatcgccatctcatgtcatgtgacattgacagtgcactcatcccattgatattagccaagtttattaagagcattttctctttttcccagcactggaagcacctttgtgaatgcagtccagagaaacatcgcttactttaccgccatacccttgcagagttgggtgatttagtttgtgaggtctcaaaggctaatctaccaagggagaatgttaagcagaactcccttttacatagtgatgtttttttgccaacgagaaaggacaaagatcagtatatgtcatatacacaacttgcagaagactggctttcaaaagctgaccatattctccatatgccatttttagatactgcatatgccactgccttagaagatgctgaacagtttctttggggtgatcataatatggattctgtgcggaatatgtcagcaaaattaatagaaggtaggaaatgggcttccagtgttagaaaatgcctctctcaaattgatggctttcttcattgtaaagagaattgttccgagaaagtaaattatgtggaaatcaaagaattagctgctgtaagatgcaaaccatgttatgaaccaagtcttgcacaattgcaggtatatgtggacaaaggagaaataatgattaatgagataaacaatgcattatcatctcgctcaaaggttgattacttggaaacactgtactctagggctttagagttcccggttgaactaacagaaacatcagcactgtcttgtgagatttcttccgcaaagtcctggttgaagaaagcatgtgattgccttgaacagaataaacggggcatcgtcgacatagatttcctaaatgaactgaaatctgaggagttggagagcttccttcttgtggtggatggtgccaacttcagtattccagagctgaacattctgatgcaacggtattcaggtgcttgctcatgggtcaatcatgctaataacatagtcggcaaacttcttgaaaggaatgattatgacaacattgttgaggagttgactggcattctgaaggatggagaatcactaggagtaaaaggcatgttgtttgaggaattttccgttgttgaggaagagctaaagaaatccttctgcaggaagcaagcatccgaggctcttgcaacacaaacatctatggaggtggtcaaagaagtgctgaaagaagcttccatattaaccattgaagaggagcaaccatttgttgatctgtcccataacctcaaagctgccatcacttgggaagagaaggctagctttattcttgagcactcagctgctctccctgagtttgaaaaccatattctgtgctcagagaacatacatgttatccttccatctgaactggatatgaaagcagaggttgctactgctaagttgtggatggacaaatgtcaggcctatctgaggcctagaagtgataaacctgcatctggaggttttcttaatgttgatgacctaaaggatttaatcggccagcctgcaagtatgaaagtcattcttgacacttctgcaattaattctgttctcaacaatgtcatagaatgggagcataattcactaagtctgatacacagttcaagatccttactggattcaaatgtaatcgactctactattgatccacttaaaagaaaactagaggagctgcaagataaaattaatgcagaaatagaaaaaggactatctctcggttttgaatttaaggttgttcatgagctgaaggattcttttttcacacttggatggatattgaatgcattgtctttctgcggtgtgactcctttgttgcaggatgctgaaaaattaattcaacaagctgtcaaccttcctgcctcattgtcggattgttccttagctgaactattggtgaggggatcatcttggctaagaaaagcacttatgtttcttcctggttcagaaatgtctgaaacatccagattgttaaatgttgaaaatattttagcggagtataaggcaagtatttcaaagttcaaactgatatatctcattttccatgcacttgttggtgatcaggaaattgctgttccttatcctatgatgattgccaaacttgaggatgctatcaacaagcacaattcatgggcagaacaatgcaatgccttcttcatgtttcctgatcatcaatcttgggatggactattaagcttgagagacagtggtcagtctgtggcattcgattgtactgagatggataaggtggttgctgagattaaaaagatcgaggagtggcttactcactgccactgtactctgtttcctgatggcaataacagtgattctttgctctccgcgcttctgaagattagaggatcaatggacaatgcttgtatgttatattccgactgtaaccagaaaggattatgtgccatctgctcttgtgatgtgggagatcatattacccctagatgtatgatatgtcaagcgaggtatcatagctcctgtgtcgaaccactgcctgcttctacacaagtgactcgtgaatggacctgtcctttttgctttcatttagaaagtggggacccattacagaatagactacaggagaagatatctaaagggaatcgtccagcacttcctgcattaatcgggctccgctcttttgccaagggtttctattcagggattgaggagttggatttattagaagaaattgctgagaaagctcataaatttaagtcctaccttatgcaaatattgcatgatgcagactcttaccatggagaagatcttagtgtcatgcacagatctcttttgattgctctaaaggcaacatcggctgctggcttatatgatcaccagatcagttgcagaattgagtcaatgttgagcagatattcctggaaaaaacgaatacatattctcttgtgtggtggaaaaaagataccgatccaacaagtactgatgcttgataatgagggttcaagtttagagatatgtggtgaagatttcttcaagttggagattaataaaataaaggaaactagtctgcagtggctggccaaagcagaaaagactacacttgattctggtaagctcgcccttgaccttgtgtatggacttattattgaaggcgaaagtcttactgtgcatgttgagaaggaactgaagttactacgagaccgcagtgttctatattgcatttgccatcaacgaccgaagcaggacctcacacccctccggcatcttgtgaagcagcaggaagagtgggagctatccagtgcaacagtagtagccaatgggagaaaacacatgtaa

SEQ ID NO: 11290 - DNA, 921 bp, Oryza sativa
  Clone ID: TFbOSC900124j.C1.o5.fg
atggctgagaagctgctgtacccaccaccgcttctctcccacgaggaggtcgccaacgacagagcggccttcatggacaccctcaggcgcttccattccctcatgggcaccaagttcatgatccctgtgattggaggcaaggagatggacttgcacgctctctatgtggaggtcaccagcagaggcggcctcgcgaaggtgatggaggagaggaaatggcgggaggtgatggcgcggttcagttttcccgcgacgacgacgagcgcgtcgtacgtgctgaggaggtactacctcagcttgctccaccactacgagcaggtctacttcttccgcgcccatggcgccctcctccgccctgctgcgtcggcgctgacgaagacgccgaggaggaagatgagaggaacctccgatcagtcgccggcggcggcggaggccgggaagagaatggcgctcccggagcggctaggcggagagccctgcagcttcagcgtgaccggctccatcgacggcaagttcgagcacggctacctcgtcaccgtcaagatcgccgccgagacgctgcgaggcgtgctctaccgcgtcgcaccaccaccaccaccaccagcagcaccaccaccaccgccaccgccggcgaggggccggcggcggcgagggcggcggcagcgcgacccggcgcagccgaggccgaacaggagcgcctacaacttcttcttcaaggagaagcacccggagctgaaggcgacccacccgcacagggagagggagtacagcaggatgatcggcgacgcctggaaccgcctcgccgccgacgacaagatggtttactacaggcacagtgcagaggacaaggagaggtacaagagggagatgcaggagtacaacgagaggctcaagcttgcgccgtcaacaatggctggatga

SEQ ID NO: 11291 - DNA, 352 bp, Oryza sativa
  Clone ID: TFbOSC401571j.C1.o5.gp
gggctccatgcaggttaaagctattggagatagagctgtagacaagtcttctgttagtttaatgccagacaaaccttttatttcaacaggttttttcctaggtcgccctctaccttttcttggagttgattccacaggattaacagttggcatgggacaagctattgcaacgtcacatgaaacaactgctgaactgacaagaggatcaataagagcaaactcttgacttgtgtcgttttgggatgaatcttccaatttggcaattggcagcggatattttcttggtctgccccttggtcttttgacacttggttccaagtgatcagaatttgtgatggtctttcttggtcta

SEQ ID NO: 11292 - DNA, 355 bp, Oryza sativa
  Clone ID: TFbOSC400259j.C1.o61.gp
gggctccatgcaggttaaagctattggagatagagctgtagacaagtcttctgttagtttaatgccagacaaaccttttatttcaacaggttttttcctaggtcgccctctaccttttcttggagttgattccacaggattaacagttggcatgggataagctattgcaatgtcacatgaaacaactgctggactgacaagaggataaataagagcaaactcttgacttctgtcgttttgggatgaatcttccactttggcaattggcagtggatattttcttggtctgccccttggtcttttgacacttggttccaagtgatcatcagaagttgtgatggtctttcttggtcta

SEQ ID NO: 11293 - DNA, 646 bp, Oryza sativa
  Clone ID: TFbOSC406953j.C1.o3.np
cctcgacttcccgcctccgccgccgccggtgaacgttccggcggcggctccggcgggggccgcgtcgccggagagcaagcagcaggcggcggcgggggccatcgtgccgctgcggcggccgagggggaggccgctggggtcgaagaacaagccgaagccgccggtgatcatcacgcgggacagccccgacgcgctccactcccacatcatcgaggtggcgccgggggccgacgtggcggcgtgcgtcgcggagtacgcgcggcggcgcgggcgcggggtgtgcctgatgggcgcgtcgggcgccgtcgcggacgtcgccgtgcgcggcgcggcggcgccgctcccgggaaggttcgagctcctctccgtaacgggcaccgtgctcccgccccccgcgccgcccggcgcgtccggcctctccgtgctgctctccgccggccagggccaggtcgtcggcggctgcgtcgtggggcccctcgtcgccgccggccccgtcaccctcttcgccgccaccttcgccaacgccgtctacgagcgcctcccgctccaggccgaggaggccggagagccgcacgcggaggcggagcagcaggcccagccggaagccgccgcggcatctagctagctcggagctggtttgtcaaca

SEQ ID NO: 11294 - DNA, 951 bp, Oryza sativa
  Clone ID: TFbOSC900202j.C1.o3.fg
atggatccggtcacggcatcaatacacggtcaccatcttcctccaccgttcaacacccgcgacttccatcaccatctccagcagcagcagcaccagctgcatctcaagaccgaggatgaccaaggcggcggcactccgggtgtcttcggcagccgcggcaccaagcgcgaccacgacgacgacgagaacagtggcaacggccatggaagcggtggtgacggcggtgacctcgcgctggtacccccctcgggtggcgggccggacggcgccgggagcgagagcgccacgcgccgcccgaggggacgcccggcggggtccaagaacaagccgaagccaccgatcatcatcaccagggacagcgccaacacgctccggacgcacgtcatggaggtggccggcggctgcgacatctccgagagcatcaccacgttcgcgcgacgccggcagcgcggggtttgcgtgctcagcggcgccggcaccgtcactaacgtcacgctgcggcagcccgcatcgcagggagcggtcgttgcgctccacggccggttcgagatactctccctctccggctccttcctcccgccgcccgccccgccggaggccacggggctcaccgtctacctggccggaggccagggccaggtcgtgggcggcagcgtcgtcggcgcgctgaccgcggctgggcctgtggtgataatggcggcgtcttttgcgaacgcggtgtacgagcggctgccgttggaggacgacgagctactggcggctcaagggcaagccgacagcgctgggttgctcgccgcggggcagcaagcggcgcagctcgccggcggggccgtcgatccaagcctcttccaaggactaccaccaaacctactcggaaacgtgcagctgccgccggaagccgcctacggatggaaccctggagccggcggtggccgcccggcgccgttctga

SEQ ID NO: 11295 - DNA, 777 bp, Oryza sativa
  Clone ID: TFbOSC24712j.C1.o1.fg
atggggagcatcgacggccactcgctgcagcagcatcaggggtactcccacggcggcggcgcgggagggagcaacgaggaggaggaggcgtcgccgccgcccggcggtggctcggctacggggtcggcgggccgccggccgagggggaggccgccgggctccaagaacaagccgaagccgcccgtcgtggtgacgcgggagagccccaacgcgatgcgttcccacgtgctggagatcgccagcggcgccgacatcgtcgaggccatcgcgggcttctcccgccgcaggcagcgcggcgtctccgtgctcagcgggagcggcgccgtcaccaacgtcacgctccggcagcccgcggggactggggccgccgccgtcgcgctgcgggggaggttcgagatattgtccatgtctggcgccttcctcccggcgccggcgccgccaggggccacggggctcgccgtgtacctcgccggcgggcaggggcaggtggtgggtgggagcgtcatgggggagctgatcgcgtcgggccccgtcatggtgatcgcggccacgttcggcaacgccacgtacgagaggctgccgctggaccaggaaggcgaggagggcgccgtgctgtccgggtcggagggcgccgccgcgcagatggagcagcagagcagcggaggcgccgtcgtgcccccgccgatgtacgccgccgtccagcagacgccgccgcacgacatgttcgggcagtgggggcatgcagcggtggctcggccgccgccgacatcgttctag

SEQ ID NO: 11296 - DNA, 1171 bp, Oryza sativa
  Clone ID: TFbOSC24712j.C1.o2.gp
tgaaggagcaagtgagcaaccactgccgatcttgatacgcacagtaattttacattcttcaaactctgaagaaaatggaacgataagatcacacgagtacttatgcattacatagcacattaattaacatggtaaatgattaattaacctactcaaacaactagggaaagaagtggaaggctaactagctaggtagagagacattgattaaccggtgccagtgctagaacgatgtcggcggcggccgagccaccgctgcatgcccccactgcccgaacatgtcgtgcggcggcgtctgctggacggcggcgtacatcggcgggggcacgacggcgcctccgctgctctgctgctccatctgcgcggcggcgccctccgacccggacagcacggcgccctcctcgccttcctggtccagcggcagcctctcgtacgtggcgttgccgaacgtggccgcgatcaccatgacggggcccgacgcgatcagctcccccatgacgctcccacccaccacctgcccctgcccgccggcgaggtacacggcgagccccgtggcccctggcggcgccggcgccgggaggaaggcgccagacatggacaatatctcgaacctcccccgcagcgcgacggcggcggccccagtccccgcgggctgccggagcgtgacgttggtgacggcgccgctcccgctgagcacggagacgccgcgctgcctgcggcgggagaagcccgcgatggcctcgacgatgtcggcgccgctggcgatctccagcacgtgggaacgcatcgcgttggggctctcccgcgtcaccacgacgggcggcttcggcttgttcttggagcccggcggcctccccctcggccggcggcccgccgaccccgtagccgagccaccgccgggcggcggcgacgcctcctcctcctcgttgctccctcccgcgccgccgccgtgggagtacccctgatgctgctgcagcgagtggccgtcgatgctccccatcccctcggccggatcgccggccggccaccggtttgccagccctactattttcgcggtcggaaagtcgcaccaacaatctagcttctccacgccaatcgctgaagccagcgtcgctcccgtctccaagcaaaagcaaagcaagcaagcgaacccacccacttaattagctgc

SEQ ID NO: 11297 - DNA, 3267 bp, Oryza sativa
  Clone ID: TFbOSC400259j.C1.o38.fg
atggcggcgccgccggaggcgacgggggcgccgccccagactgaaggagaggaggttaaggatggcgtcgaggtctgcgtatttgacgagtcaccggaggtcttctccagagcggtgcacgccatctcggagctcacaaccggggagcacgagccgaacttccctgacgccgaagtcgagcggctcgcctcctcaataactttcctcagagaatggaggcacttctcttatgagccaaaaaatgttagtttcacttgtgacgccagatcagctccatccagagttgacacacacaagataaacttaccacagttctcgtctgcatctgtcccccagatcacacacctagacaatgggaaggctaaaacagacagcttttgcagctcagatttcgttatatttgccggaggcaatgtttgggcgttggactggtgccctaggttgtgtgacaggcctcattctcccataaactgtgagtatcttgctgttgctgctcaccctcctggttcttcttaccataaaattggcatgccgttaatcgggagaggtataattcaagtttggtgtctcctagcaccatctgaagagggtcatcctcatcagtcattggttgcatgcaataaatataatccatccaatcaaccaaaacaaaggggtagaccaagaaagaccatcacaacttctgatgatcacttggaaccaagtgtcaaaagaccaaggggcagaccaagaaaatatccactgccaattgccaaagtggaagattcatcccaaaacgacagaagtcaagagtttgctcttatttatcctcttgtcagtccagcagttgtttcatgtgacattgcaatagcttatcccatgccaactgttaatcctgtggaatcaactccaagaaaaggtagagggcgacctaggaaaaaacctgttgaaataaaaggtttgtctggcattaaactaacagaagacttgtctacagctctatctccaatagctttaacctgcatggagcccaagaaaaaaagggggaggccccgaaagtatcctgctccaagcaacagcaagcatcttccaggcactgatactgaattaggaaatgattctgtctgtcagcctggttcaattgattttggtttgggtcccactgaaaatactgggtctggtgctaatataactcatgctgcagttgatgcagcctccccagttccattgtcaggtcagaggggtagagaacagccagaaaaggaagtaattcatattgagaattccatgcaatctggacagtctgacataggatccatgttgcctacgtatattttacctgaatcaggcaacaagagtaactcaactggtctgaggcggaggggacgacctaggaagaaaccatttccgagtacaaccagttgtgtatttgttcctggtactgagaccccaaagaaaggttctactctgaccaattcaaataatctcgtggtcttggccaagagtaattgtgacattttagcaaatgatattggtccatcaagctgtgctatagagaacagtgtccatttgagtgttggaacatctcatgctgcaacaccagcacagggcatatgtcttgcaaaatgcaaggaagaatcaagtgccaagaagggtagaggcagacctagaaagcagccaatttcaacggaatgcggttgttctaaagcatgcaggggtgaagaacaaaaaactcagacaattcccaagtcaagcgacaatgcgtccttggttgaaaattgcaagaaagaatcatgtcccggaaagggcagagtgcaagataaaaagaaatctgtttcaaatgaaagaagttcagtagtgcttagtgttgaagcacagaacatggacggatcttctgcatcaactgcatatacttcatgttgtactcctgcttgtaactttgaaaacgcagagacaaatcaggctgtatctgttccttccgaaaacagtgctcaggttattgatgaactaaaagatacagaagtggctcgattcaaagaatcaactaaagatgataatatgatttgttctgcagaaaagaccctttctcgtgtcccaaaagacatttctctaccaagggttgtcttatgtttagctcataatggaaaagttgcttgggacgtaaaatggaaacctccttcagcaaatcagtcagaacataaatcatgtttgggttttcttgcagtactcttggggaatggctcgcttgaagtcattcccttgacagttgattggtcaccctctcatgatatgatattggcgggatgtcacgatggaacggttgctttatggaagttctctgcaaacctgtcatttcaaggttcaaaaccttttatgtgtgtaactgctgaatctgctcccatcagaaccgtgtcgtgggcaccatctgtgagtaaggaaaacgtgaatacctttgtcactgctggagaggatggtctgaaattctgggatttaagagatccatatcgtcatctttgggagttaactactgctccaagggccgtaataagtcttcaatggttgaaggatgcaagaggtgttgtcatatcattggaagatggcacattaaagttcgttagcttgtcaagaatcgcaaatgatgttccttttactggaaggccatttgttggaacgaaaactcagggtgtttctacctatcaattgtctgaatatttgatctggagtgtccatgcctcagaaattacaggctatgcggcttattgtgtggctgatggaactgctgtttgctttgagcttactccgagattctgggaaaaggaacctgggaggaaccgtgtaccatattttctttgtggttcattatcagaggagggaacaaccattaaaattggtatcgcattaccaaactctcctttgtcaaatgttcctctggggaccaaacgggctactaaaacttgcaaagatgtagctcaattgcatgttatagaagaagggaaacttcttaccaactcagaatacaatggtgctataaatccgagcatcagagatggtcaacaagatgaacctgatgaaggacaagaaaccggtgccatagttttagctgctccttcaatgcaagagaattttgacacaagcaccagcaggggtagtgaatcccctgaaaattttgaggtctttcctcctaaagctgtagcattgcatcggttgagatggaacatgaataaaggtagcgagaaatggttgtgctatggaggtgctgcaggcattatccggtgtcagaggatctaa

SEQ ID NO: 11298 - DNA, 3534 bp, Oryza sativa
  Clone ID: TFbOSC400506j.C1.o9.fg
atggctgaccacgccgccgcctccgccgccgcggacgcggacccctcgctccgtcagggcggggacgctgctgatgctgatgaggaggaggaggaggaggaggcagcgccttcgtcggcggcgggggtgggggtgggggtgggggtggaggagaggtgcagggcgatgatggaggtggtgaagaaggacgcggtcggggggaagtggagggtgtcgaagctggtggtggagcacaaccacgaggtggaggtggcgccgtgcggggagggggagggggaggtggccgcggcggtgccggtgatggggatggagttcgaatccgtgcacgccgccaaggggttctactacggatacggcgagagggtggggttcaaggcgcgcacgggctccaatcgccgatcggttggtaatggcgtcatgatcatgcagaggttcctctgctccagaggaaattacgccaatcggaggaacaaggcaaatggtttggatgagttgaaagaggaggaggtgcaggatggtgctgcaggcaagaggaagaggggcgccaataataagaggaatcccaaccctgtgaaaaataactcagaggtgatcgaagtggagagctctgcggagaagggtgtcgggacagcagtcccaaataacgggcaagaggcgcgcaagatgaggggttctaagaggggtaggactaaaaaggatgttacagagaaggatgagaagcctgttgtcgaattggaggccgaaaaggaggacgaggtggtggcgcaagatggtgatgatgttgaggagcagaaaggggaaggggaggaggaaatggaagaggaggtacaagtggaagtgcaggaaaagagagggaggggaaggccgaggaaagcagatgccgagggcaatgccctgcaggcacgtgtgctgagggaactcggtttgagggcatcacagtacactaatgaggagaggaagaagatagttagtaagtacctctcaaagcgacagagcagacctgtttcggcaaggcctgccaagatcgcctcacatcaagctttggctgaaagacgaaaacgtggtgatggaggtagatttctgtcaagcgaaggactgacgcaaccttcggaaaggcgctctaaacgtcttgaaaagcaaaatctcaaaaaagaagataagggtgagagtaaagaagatgaaataattgaaggagaaccagatccagaaatggaagtagttgctggacctggaggagaaccaaaagttggaatggttttcctgaatgaagacaaggcctatgactgctatgtcacctatgctggaactgtggggttcagcgtccgaaaaggatggttggaaaaaacagcaacaaatactacaaaatctcgggcatatgtctgttctaaagagggattccgctctaaaagtgtcagtactgatcccaagaagccacggccagaaacaagaactggttgtctggcacacatgactattaaaatcactgtgagtggcaaatatgtagtgactgagtatgtggctgatcataatcatgatcttgaaactcctttggtggacatccaggttctgagatcacataagttattagcaaagttacagcagcctccagatccaccaagagttgttttgataccaaatgattataaaaattatgtaaggacaaggcacacaaaagatatgcaattaggtgatacccaggcaatttatgaatatttgcagaggaagaaaggtgaacatccttctttcttttatgccatccaagtggatgaagatgaccagttgacaaatgtattctgggcagatgttaagtcgattctggattaccactactttggtgatgtactgtgtgttgacacaagatatagcacaagtgatcatagtaggcctctattgttgtttattggtgttaaccatcataagcagccagtcatatttggtgcagcattggtttatgatgaatcagttgaatccttcaaatggttgtttgaaactttcaaatctgcaatgagtggcaagcaaccaaaaacagttatgatcgatcaatctacagcaatcagtgaagcagttgcttctgtttggccaaggaccacccagcgcttttcactgattcatttatataaaaatgccactaagatattaagggatgccttccaagcctcggaaacttttgcagacgattttagcatgtggttgtatggctatgaggaggagggggatttcttgtcaagctgggaaatcctctcagataagtacaatctaaaggacaatgagtggctaggtaaattgtatgcagatagagaaagatgggctttaccttatggacgtgattcattctgtgcagatattgcagccgcactccgaagtgataataacactgatgctatactggcagatcttctaaagaaagaaacggatttcccatccttctttaacaattatgacaaacttttggagaacaaacgcctagctgaacaacaagctgactaccttggggttcaaatggcacagagagtagcacctctgcggatgctttggcaagctgctaatgcatatactcctacactttttgagatgttcaggttggaatttgaactgaccttgacttgcatggcttattgctgtggtgagattggaccaatatctgagtatgaggtaactgtcaaaaacaggccccgtgaccattttgttagatttgactcatcagaatgtatggttgtttgtagctgtaagaaatttgaattcacaggtattccatgttgccatgtactgaaagttcttgaggtaagaaatattaaagaacttccaccacactacattttgaaaagatggagaaaggatgctcagagtgaatctccgagggagaactatggttttgaagctgtagatgaagatcccaggttcttgttgtctaaacgatacagcatgttgtatcgaacgttctacaaaattgcagcaaaagctgccgaaaatattgaagcttatacatacatggagagccaatgtgatcagtttatagagcaagttgaacttctattgcaagcaaagttacatgataaatcttcattgagcactatactgaaagttcaacagccaaatttgtttccgaatgaagccagcaacagtgaaactcgcagacagcaaagtcctcttcaatcaaataagaagaaaaagggtagacaaggtctaccggagcctgaggaggctgaagttccgcttagggttgatcctcctacaatatcaaatgacattccaaatcatctgagaactccaaccagtcaatttcttgcaacaagccatataatgcaggcaccgtatattgcacagcaattcggacttagctctcttcagggatttcctggcatatcaccatttgggcagttgcaggaaccagcacctgctcctctccagcaacctcatctacagcaaccaccctttcatagcggtccacaaatcccccaggtgattgttataacttacacccatgttcccttcccaagggatttcactttcacagattccattagcaattactag

SEQ ID NO: 11299 - DNA, 801 bp, Oryza sativa
  Clone ID: TFbOSC101556j.C1.o2.fg
atgggcttgccggagcagccgtccggctcgtcgggccccaaggcggagctcccggtggccaaggagccggaggcgagcccgacggggggcgcggcggcggaccacgccgacgagaacaacgaatccggcggcggcgagccgcgggagggcgccgtggtggcggcgcccaaccggcgcccccgcggccgcccgccgggctccaagaacaagccgaagccgcccatcttcgtgacgcgcgacagccccaacgcgctgcgcagccacgtcatggaggtggccggcggcgccgacgtcgccgacgccatcgcgcagttctcgcgccgccgccagcgcggcgtctgcgtgctcagcggcgccgggacggtcgccaacgtcgcgctgcgccagccgtcggcgcccggcgccgtcgtcgccctgcacggccgcttcgagatcctctccctcaccggcaccttcctccccggcccggcgcctccgggctccacggggctcaccgtctacctcgccggcggccagggccaggttgtcggcggcagcgtcgtggggtcgctcatcgccgcgggcccggtcatggtgatcgcgtccacgttcgccaacgccacctacgagcgcctgccattggaggaagaagaggagggctcaggcccgcccatgcccggcggcgccgagcccctcatggccggcggccacggcatcgccgacccttcggcgctgccaatgttcaacctgccgccgagcaacgggctcggcggcggcggcgacggtttcccatgggcggcgcacccccgcccaccgtactga

SEQ ID NO: 11300 - DNA, 4137 bp, Oryza sativa
  Clone ID: TFbOSC401571j.C1.o5.fg
atggcggcgctgccggaggcgacgggggcgctgccccagactgaaggagaggaggttaaggatggcgtcgaggtctgcgtatttgacgagtcaccggaggtcttctccagagcggtgcacgccatctcggagctcacagccggggagcccgagccgaacttccctgacgccgaagtagagcggctcgcctcttcaataactttcctcagagaatggaggcacctctcttatgagccaaaaaatgttagtttcacttgtgacgccagatcagctccatccagagttgacacacacaagataaacttaccacagttctcgtctgcatctgttccccagtatcttgctgttgctgctcaccctcctggttcttcttaccataaaattggcatgccattaatcgggagaggtataattcaagtttggtgtctcctagcaccatctgaagagggtcatcctcatcagtcattggttgcatgcaataaatataatccatccaatcaaccaaaacgaaggggtagaccaagaaagaccatcacaaattctgatcacttggaaccaagtgtcaaaagaccaaggggcagaccaagaaaatatccgctgccaattgccaaattggaagattcatcccaaaacgacacaagtcaagagtttgctcttattgatcctcttgtcagttcagcagttgtttcatgtgacgttgcaatagcttgtcccatgccaactgttaatcctgtggaatcaactccaagaaaaggtagagggcgacctaggaaaaaacctgttgaaataaaaggtttgtctggcattaaactaacagaagacttgtctacagctctatctccaatagctttaacctgcatggagcccaagaaaaaaagggggaggccccgaaagtatcctgctccaagcaacagcaagcatcttccaggcactgatactgaattaggaaatgattctgtctgtctgttgcctggttcaattgattgtggtttgggtcccactgaaaatactgggtctggtgctaatataactcatgctgcagttgatgcagcctccccagttccattgtcaggtcagaggggtagagaacagccagaaaaggaagtaattcatattgataattccatgcaatctggacagtctgacgtaggatccatgttgcctacgtatattttacctgaatcaagcaacaagagtaactcaactggtccgaggcggaggggacgacctaggaagaaaccatttccgagtacaaccagttgtgtatttgctcctggtactgagaccccaaagaaaggttctactttgaccaattcaaataatctcatggtcttggccaagagtaattgtgacattttagcaaatgacattggtcgatcaagctgtgctatagagaacagtgtccatttgagtgttggaacatctcgtgttgcaacaccagcacagggcatatgtcttgcaaaatgcaaggaagaatcaagtgccaagaagggtagaggcagacctagaaagcagccaatttcaacggaacgcggttgttctaaagcatgcaggggtgaagaacaaaaaacacagacaattcccaagtcaagcgacaatgcggccttagttgaaaattgcaagaaagaatcatgtcccggaaagggcagtgttcaagataaaaagaaatctgtttcaaatgaaagaagttcagtagtgcttagtgttgaagtacagaacatggacggatcttctgcatcaactgcatatacttcatgttgtactcctgcttgtaactttgaaaacgcagagagaaatcaggctgtatctgttccttctgaaaacagtgctcaggttattgatgaactaaaagatacagaagtggctcgatttaaagaatcaactaaagattatcatatgatttgttctgcagaaaagaccctttctcgtgtcccaaaagacatttctctaccaagggttgtcttatgtttagctcataatggaaaagttgcttgggacataaaatggaaacctccttcagcaaatcagtcagaacataaatcatgtttgggttttcttgcagtactcttggggaatggctcgcttgaagtatgggaagttccatcaccaagcatgattcagaaaatatattcctcttcttcaaaggagggtactgaccctcgatttttaaagctgaagcctgtgtttagctctgccaaagttgctttatggaagttctcagcaaacttgtcatttcaaggttcaaaaccttttatgtgtgtaactgctgaatctgctcccatcagaaccgtgtcgtggacaccatctgtgagtaaggaaaacatgaatgcctttgtcactgctggagagaatggtctgaaattctgggatttaagagatccatatcgccatctttgggagttaactactgctcgaagggccgtaataagtcttcaatggttgaaggatgcaagaggtattgtcatatcattggaagatggcacgttaaagttcgttagcttgtcgagaatcgcaaatgatgttcctgttactggaaggccatttgttggaatgaaaactcagggtgtttctacctatcaattgtctgaatatttgatctggagtgtccatgcctcagaaattgcaggctatgcggcttattgtgtggctgatggaactgctgtttgctttgagcttactccgagattctgggaaaaggaacctgggaggaaccgtgtaccatattttctttgtggttcattatcagaggagggaacaaccattaaaattggtattgcattaccaaactctcctttgtcaaatgttcctctggggaccaaacgggctactaaaacttgcaaagatgtagctcaattgcatgttatagaagaaggggaacttcttgccaactcagaatacaattgtgctataaatccgagcatcagagatggtcaacaagatgaacctgatgaaggacaagaaactggtgccatagttttagctgctccttcaatgcaagagaattttggcacaagcaccagcaggggtagcgaatcccctgaaaattttgaggtctttcctcctaaagctgtagcattgcatcggttgagatggaacatgaataaagggtgtacccacatactgccctcgtctggtatcggttggttctcgagtgtaggctgcgtgttcacggtggtatcatttgcaggggtcccttggttctttgagttcatccggtctggaaatgtaacaagatcagtctcaaaacctcatgggcggaacttgtttctgcaaagcttagttgaagaagggcagaatccaagcactagcaatggtgccagcaactcccagaaaagtgttgaagataaggacctgatcgactgtctagagaatggcgtcaacttttggacggattattcaaaagttcagtatcatcctcagagtttatatgagttacatgggtcatggacagactttgacaagtttgataactatggcagcgcacaagaggttgtttcagactggtcgcaaatagaggaaatgaatgagaggctaaggttctttgttgaagaatgcgaccatattcagatagagatgctattggggaacatagagatgaagctgcactctttgacccctgaaatcagcgacgaggacgaagatccttattcagttgaatcgctggtggttcatggagctcttgatagaggtgggcaaaggacttccatatcacaagtgaaagactcggtatgttcagtctacgaagccagagagacaaagccaaaattttcccatctctcagcatctctttgccccctccctgtcccccttccgttcccgtcaatcttcagaggcaacattggccggcacggggagatccttagcgaccatgcagaagaatcccagccaaagggctcactcgatattgaatcgataccgatggcggcacgattacgatcaagcagcactgtcctgcctttcatagagaggcgatcggggagcctccagaagcacggtgtcgcaagaggtgccatcgggtctttggtcctccgtgactggggcttcgggagggaggaggtggatgacatgggggagcacctagcaaagttactccgcccgtttcaccctgaaatggatcttacttcggattctgactag

SEQ ID NO: 11301 - DNA, 4137 bp, Oryza sativa
  Clone ID: TFbOSC900057j.C1.o13.fg
atggcggcgctgccggaggcgacgggggcgctgccccagactgaaggagaggaggttaaggatggcgtcgaggtctgcgtatttgacgagtcaccggaggtcttctccagagcggtgcacgccatctcggagctcacagccggggagcccgagccgaacttccctgacgccgaagtagagcggctcgcctcttcaataactttcctcagagaatggaggcacctctcttatgagccaaaaaatgttagtttcacttgtgacgccagatcagctccatccagagttgacacacacaagataaacttaccacagttctcgtctgcatctgttccccagtatcttgctgttgctgctcaccctcctggttcttcttaccataaaattggcatgccattaatcgggagaggtataattcaagtttggtgtctcctagcaccatctgaagagggtcatcctcatcagtcattggttgcatgcaataaatataatccatccaatcaaccaaaacgaaggggtagaccaagaaagaccatcacaaattctgatcacttggaaccaagtgtcaaaagaccaaggggcagaccaagaaaatatccgctgccaattgccaaattggaagattcatcccaaaacgacacaagtcaagagtttgctcttattgatcctcttgtcagttcagcagttgtttcatgtgacgttgcaatagcttgtcccatgccaactgttaatcctgtggaatcaactccaagaaaaggtagagggcgacctaggaaaaaacctgttgaaataaaaggtttgtctggcattaaactaacagaagacttgtctacagctctatctccaatagctttaacctgcatggagcccaagaaaaaaagggggaggccccgaaagtatcctgctccaagcaacagcaagcatcttccaggcactgatactgaattaggaaatgattctgtctgtctgttgcctggttcaattgattgtggtttgggtcccactgaaaatactgggtctggtgctaatataactcatgctgcagttgatgcagcctccccagttccattgtcaggtcagaggggtagagaacagccagaaaaggaagtaattcatattgataattccatgcaatctggacagtctgacgtaggatccatgttgcctacgtatattttacctgaatcaagcaacaagagtaactcaactggtccgaggcggaggggacgacctaggaagaaaccatttccgagtacaaccagttgtgtatttgctcctggtactgagaccccaaagaaaggttctactttgaccaattcaaataatctcatggtcttggccaagagtaattgtgacattttagcaaatgacattggtcgatcaagctgtgctatagagaacagtgtccatttgagtgttggaacatctcgtgttgcaacaccagcacagggcatatgtcttgcaaaatgcaaggaagaatcaagtgccaagaagggtagaggcagacctagaaagcagccaatttcaacggaacgcggttgttctaaagcatgcaggggtgaagaacaaaaaacacagacaattcccaagtcaagcgacaatgcggccttagttgaaaattgcaagaaagaatcatgtcccggaaagggcagtgttcaagataaaaagaaatctgtttcaaatgaaagaagttcagtagtgcttagtgttgaagtacagaacatggacggatcttctgcatcaactgcatatacttcatgttgtactcctgcttgtaactttgaaaacgcagagagaaatcaggctgtatctgttccttctgaaaacagtgctcaggttattgatgaactaaaagatacagaagtggctcgatttaaagaatcaactaaagattatcatatgatttgttctgcagaaaagaccctttctcgtgtcccaaaagacatttctctaccaagggttgtcttatgtttagctcataatggaaaagttgcttgggacataaaatggaaacctccttcagcaaatcagtcagaacataaatcatgtttgggttttcttgcagtactcttggggaatggctcgcttgaagtatgggaagttccatcaccaagcatgattcagaaaatatattcctcttcttcaaaggagggtactgaccctcgatttttaaagctgaagcctgtgtttagctctgccaaagttgctttatggaagttctcagcaaacttgtcatttcaaggttcaaaaccttttatgtgtgtaactgctgaatctgctcccatcagaaccgtgtcgtggacaccatctgtgagtaaggaaaacatgaatgcctttgtcactgctggagaggatggtctgaaattctgggatttaagagatccatatcgccatctttgggagttaactactgctcgaagggccgtaataagtcttcaatggttgaaggatgcaagaggtattgtcatatcattggaagatggcacgttaaagttcgttagcttgtcgagaatcgcaaatgatgttcctgttactggaaggccatttgttggaatgaaaactcagggtgtttctacctatcaattgtctgaatatttgatctggagtgtccatgcctcagaaattgcaggctatgcggcttattgtgtggctgatggaactgctgtttgctttgagcttactccgagattctgggaaaaggaacctgggaggaaccgtgtaccatattttctttgtggttcattatcagaggagggaacaaccattaaaattggtattgcattaccaaactctcctttgtcaaatgttcctctggggaccaaacgggctactaaaacttgcaaagatgtagctcaattgcatgttatagaagaaggggaacttcttgccaactcagaatacaattgtgctataaatccgagcatcagagatggtcaacaagatgaacctgatgaaggacaagaaactggtgccatagttttagctgctccttcaatgcaagagaattttggcacaagcaccagcaggggtagcgaatcccctgaaaattttgaggtctttcctcctaaagctgtagcattgcatcggttgagatggaacatgaataaagggtgtacccacatactgccctcgtctggtatcggttggttctcgagtgtaggctgcgtgttcacggtggtatcatttgcaggggtcccttggttctttgagttcatccggtctggaaatgtaacaagatcagtctcaaaacctcatgggcggaacttgtttctgcaaagcttagttgaagaagggcagaatccaagcactagcaatggtgccagcaactcccagaaaagtgttgaagataaggacctgatcgactgtctagagaatggcgtcaacttttggacggattattcaaaagttcagtatcatcctcagagtttatatgagttacatgggtcatggacagactttgacaagtttgataactatggcagcgcacaagaggttgtttcagactggtcgcaaatagaggaaatgaatgagaggctaaggttctttgttgaagaatgcgaccatattcagatagagatgctattggggaacatagagatgaagctgcactctttgacccctgaaatcagcgacgaggacgaagatccttattcagttgaatcgctggtggttcatggagctcttgatagaggtgggcaaaggacttccatatcacaagtgaaagactcggtatgttcagtctacgaagccagagagacaaagccaaaattttcccatctctcagcatctctttgccccctccctgtcccccttccgttcccgtcaatcttcagaggcaacattggccggcacggggagatccttagcgaccatgcagaagaatcccagccaaagggctcactcgatattgaatcgataccgatggcggcacgattacgatcaagcagcactgtcctgcctttcatagagaggcgatcggggagcctccagaagcacggtgtcgcaagaggtgccatcgggtctttggtcctccgtgactggggcttcgggagggaggaggtggatgacatgggggagcacctagcaaagttactccgcccgtttcaccctgaaatggatcttacttcggattctgactag

SEQ ID NO: 11302 - DNA, 1560 bp, Oryza sativa
  Clone ID: TFbOSC409220j.C1.o4.fg
atggctggacaaggttcccaaaagaagaaatcttgtgattggtccaaaagatatgtggaccatttgaatggaaagatgaagtgcttccacctgcaaatgagtgctaattttgggcatagcatgaccataccaaacaagttcttggaccattttggtgggacgttgtcaagaaccattgaactagtatcccccaagggtattgtgtatattgtcaaagtcaccgagcacatgaataagacaatcctacagtgcggatgggaggcatttgtagatgcccatcacatagaagagaatgactccttattgttccgtcacattgagaattcccgctttgaggttctgatccttgattctgatggttgtgagaaagtctttacctgtgctggcataaaaaagacttctagtgttcaagaaagaaatgcagctccagttgatatttcaaggagcactcatgatgaaaccacacaatcatcagggagtaaaaaatttgttagatgccaaagggctagtgacagtcagcgtggaaaaactgcaaaattggcagaaacatcttcgtctggggaatcaggagaggagggcactgacagcagtacttctgaagatgagtcatcctatgagctagatgatcctcagatgcctccaggacgtaattatgtcttatcgcgttggactagtctatctgaagcacaggaagaaaaagtagatatgcttgtccaggacattcaacctgaaattcctgtatttgtggctatcatgaagcatagcaatgttaactcacgtcgtgcttgtcttgtaattcctaagcgctatgcatctgcacacttcccacttgaaagtcaaaccatcacacttcagcggcaaggcaagaacaagaagtggtatcccatgttttacattaggaaagatggatctggatacatgctttatgggtgttggaaaaactttgttcgtgacaaccatgtgaaggagggagacatgtgcatctttcacctaacaaagtttactgggggggaattcggagcaacagtccatctactccgtgaaacaaaatctggttccttaggttcattccatactagtcataaaaggtttgacttaagggatggcagaacgtggccgaaagtgactggtgttagaagagtaagttctaggccttacctgacagcagacagagtttctctgactgaagaacaggtcaggaaagtggaagaagttgttcactccattcaatctgaaggtcccatgtatgtgtcaataatgaacaagagcaatgttggtaccgatgggctctacatcattatctttggcaggcaattcgcgacaaggtacctcccggaaggggagcaaactttgacgcttctgatgacggggaagagcaatgcatggcaggtcaagatgcgccctcggagcggcgatgcgcagatgatcaccacaggctggcgccattttgtccatgacaaccatctgcaaattgaagacatctgcctcttccagctgatgaatgatgagagtaagcttaccatgacagtccatatcattcgtcgcaacgagaagagctag

SEQ ID NO: 11303 - DNA, 1617 bp, Oryza sativa
  Clone ID: TFbOSC409221j.C1.o1.fg
atgaagaaatactgtgattgctgcaaaagatatgtggaccattccaatggaaagatgaaatgcttccacaggcaaatgagtgctaattttgagcatagcatgatcataccaaacaagttcttggaccaattcggagggaaaatatcaagaacagttgaactagaatcccccaagggcaacgtgtatgtcgtcaaagttagcaagcacatgaataagacagtcctccagtgtggatgggaggcatttgtagatgcccatcagatagaagagaatgactccttattgttccgtcacatcaagaattcccgaagggcctctggtgttcaagaaagaaatgcagatcctatcgatgtttcaagcagcacccatgatgataccgtgcaatcatccgggggtgaaagatttgctagaagtgaaagtggtagtgacagtcagcatagtaaaaccgcgaaattggcagcgacatgttcatctgggggatcagaatgcacaggagaggaggccaaggagagcagcagttctgaacatgagtcatcctatgatctagttgatcctcagatagctccaatgcctggttatgtcttgtcgcgcgggactaatctatctcaagcacatgaggagaaactagatatgcttgtccaggaaattcgacctgaaattcctctatatgtgactaccatgaagcatagcaatgttaactcacaccatgcttcccttgtaattgctaagcattatgcatgtgcgtactttccgcatacgagtcaaaccatcacacttaagtggcatggcaagaacaggaagtggcatcccaaattttacattaggaaagatcaagttgggtacatccttcatgggcgttggatagactttgttcgtcacaaccatgtgaaagagggagatatctgcatctttcacctaaaaaattttaatgggagaaaattcagggcaacagtgcatctactccgtgaaacaattcctcactcctttggtgcactccatattcctaaaaggtttgaatcaaggaatggcagaatgaggctgaaaatgactgatgatagaagagtaagctcaactgaatgtaggagagggacaatggaaccttctacaaccaatgtcaagaaggaagcggacaatgaacaatgcaacaatggtcaaggaaagcgtcaggaacctctcaattttgatgtttctgtggggagttctaagccttacttgacagcagacagagtttctctgactgaagaacagttcatgaaagtggaagagaatgttcactccattcaatctgaaggtcccatttatgtgtcgataatgaacaagagcaatgttggtaccgatgggctctacatcattacccttggcaggcagtttgctataagatacctcccggaaggggagcaaaccttgacgctcctgacgacggggacgggcaaggcatggcaggtcaagatgcgccctcggagcggcgacgcacggatgttcaccctcggctggcgcgatttcgtccgcgacaaccgtctgcaaactgaggacatctgcctcttccagctgacgaagaacagtgagagggggcttgccatgaaagtccacatcattcgtcacaacgagaggagctag

SEQ ID NO: 11304 - DNA, 2214 bp, Oryza sativa
  Clone ID: TFbOSC409221j.C1.o7.fg
atggccccattcctggcttcccccatacgccttcacccctgtcctctcctcttctcccaccctcacctcttcggatccgactactttgcctttagcgtaaaaggcagaggtgcacatttagaaagtatgcgtgtggaaaataagagagggaatagaagttggggaacagatgctaaaagaacacaccctaactcaatatttaaccagttagtgcgatatggttacatcggaaccggattccctgacatgaactgctccttgacgtggtcactgataggtgggccctcaacactgtctcttccttccttctttccctctgctcatctactgctctcacttgctctcttcttcttcttgtgcattcagagtaaccacaggatgagcaagtctggttgtgagagatgcagaggacggggtttttgggatacggatgatcaggacacgtatttcttcaaggttatgattggtggtttccgacgtcaaatgaccataccatacaagtttgcagaaaatttcagagatcagatccaaggaacaatcaaactgaaggcacgtaatggtaacacttgcagtgtccttgttgacaaatgttcaaataagttagtccttacaaaagggtgggctgaatttgccaactctcatgacattaagatgggtgacttcctggtattcagatacactggcaattctcagtttgaagttaaaatctttgatccaagtggttgtgtgaaagcagcatcacacaatgctgtgaacattggccagcatgcccaaaacatgcaaggagaccctattgaaattttaagctgctctgatgaacatctgcgagcgcaatcgctaacaaccgaaaggcaaaatcaacctgaaaaggatgtcattgacaattgtaacaagaagatgaagacagagcatgcttcttcttcagaagatgatcaggaaacacctactgctgaggtgcacaggatgaaagtagaagagatggtccgagctattcattccaaccacccagtttttgtggctgtcatgaaaaaaagcaacgtcactcgacaaccttgctatgtggcaatctccaggaaatatgccaatgaatattttccaggaggggaccaaatgctaacgcttcaacgacatggcaagaggtggcaagtgaagttttgtatcagcaaacgcaaattgagaatgctttcaaaggggtggagaaaattcacaagagacaacgagctgcagcactgggctcctctggctctgttcatcactctgtttttttcccctcattttcgaaagatgaaaaagtgtggtcagaagatgaggaagctgaacacaagatccacggctagggatgatcaagaaaagtatttcttcaaggtcatgattggtgacttccataagagaatgaccatacctgataaatttgcacgccacttcaaaggggtgatatcaaaaactattaagctagagcctcgcagcggttacactttcgatgttcaagttacaaagaagttgaatatattagttttgggatctggatgggagtcatttgttaatgctcatgacttaaacatgggtgacttcctggtgttcaaatacaatggggactttctgttgcaagtgttaatctttgatcctagcggttgcgagaaatcgacttcatgttctatggaaaatgctattgatcatgttggacaagggtggaaagaacacaatgatatctcaacaagttatcatgatcaaccaaaaggaaataaacattggatgcaaaaggatagctcatctaaagggaataagattggcaataccaggtcatcaaacaccccatctaagttttcaggttgcattctccctcgtggaacctgtcttcctgtggttcaggagaagaagatgaaagaaaagatccaagctatacattccaaaaccccaatgtatgggaatgtcatgacaaaatgcaatgtttctggaagcccttgtgttcttgaaataactcaactatatgatgatgcgtatcttccattcaataatggccaagagctgatgcttcgacaccgagacaagagttggaaagtgcggttttacagattcaagaacaaatctagaaagctcactcaaggttggaaaagatttgtgcacgacaactacctgcggatgggagatctatgtctctttgagatattaaagaataaatacacaatgaatgtccatataattcgcaaatgctaa

SEQ ID NO: 11305 - DNA, 921 bp, Oryza sativa
  Clone ID: TFbOSC409222j.C1.o4.fg
atggtgaaaatcttaaaaacaacattaagggcaacaacaatgcttaaggtcttggtgaaaataaggttgagcctatttttaacatttagtgtcttatgtctaatgcctataatgtatatggctagtcataagacaataccgaatgaatttctacataatttcgggggcaaaataccaaaatctattaagctggaaacacgcagcggcctcacttttgatgttcaggttaccaagaattctggcagagtagtccttcaatcaggttgggcatcatatgtcagtgcccatgatctgaaaattggggacttcttggtattcaagtacagtggtgactctcaactgaagactctaatctttgattcgagtggttgcgagaaagtatgtgaaaaacctgttgacatgtcaggcagatcttacgatattgccatgagaaactcacaagatgaaaagaagaaacggaagcaaagggatatctcaaggcaggggacagtgaagccatcagaagaaggtctgaaagcggaacttgtaccgggttgcatcctcccatcccggaccgatcttactcgtttgcagaagaatatactgatagagaaggtgaaagctattaattctgaaaccccaatctatgggtatgtcatgaacaatagcagtattcatgggattccttgtaccgtggaaatttctaagaaatatgccgatgtatatctcccatttgaggatggaacagtcgtgcttcaacatcatggcaagagttggaatgtgcggtgttgtcttactaagcaaaactcgaaaaggtttttgaaagggtggagacagtttgcaggtgacaacaagctgcacctgggagatatctgcctcttcgacctactgaaagacaagaagaaatatgtgatggatgtccatatcattcgcagaaaatga

SEQ ID NO: 11306 - DNA, 986 bp, Oryza sativa
  Clone ID: TFbOSC409222j.C1.o1.fg
caagttcactttataagatgagaaggcctggtgcgagatgcagggaaggacatgcacatttcaacgggaaccacatagatgggcaatataagaatttcttcaaggttatgattggtcgctttcgtgagagaatgatcataccaaacgaatttcttcaatatttcaggggtaaaataccaagaactataaagctgcaattacgcgatggttgcacttatgatgttcaagtcactaagaatttgggcaaaatatcccttcaatcaggatggaaggcatttgtgactgctcatgacttgcaaatgggagattttctagtattcagttatgatgggatctccaaattgaaggttctgatctttggtccaagtggctgtgagaaagtgcattcacgctctacattaaaaaatgctacacattgtggtgagaagtgggaagaacccctgcacatttcaagcaattcgcatgatcttcctgtgaaatcaccacaaaatgtaagcaaatctgagaaacaatgggatagctcagaacaagaaaacgacaccgcgaatatcgaagaagttgcattgcaaggagatgatctccaagggcatccggttctgaattgcatcctcccaaagcacacccgccttacagatatgcagaagcagcagctggaaagcaaagttggagctattcattctgaaatccccatctatgggtgcatccttaggaagagtcgcgtccacggaaaatctcaaaccgtagacatatgtcgagaatatgcagatgtatatcttccattcaaggagttaaacatgacgcttcaacgtcatggcaaaaattgggaggtgctatgtcgcactaaggatacaagaaccaaaaggctctcgacagggtggagtcggtttgcacaggaaaacaatttgcaggtgggagatatctgcctctttgagctactgaagaagaaggaatactcgatgaatgttcatatcattcccaaaaaatga

SEQ ID NO: 11307 - DNA, 619 bp, Oryza sativa
  Clone ID: TFbOSC8898j.C1.o1.gm
atggccatgcaccctctcgcccaggggcacccccaggcgtggccatggggtgtagccatgtacaccaacctgcactaccaccaccactacgagagggagcacctgttcgagaagccgctgacgccgagcgacgtcggcaagctcaacaggctggtgatccccaagcagcacgccgagaggtacttcccgctcggcggcggcgactccggtgagaagggcctcctcctctccttcgaggacgagtccggcaagccatggcggttccgctactcctactggaccagcagccagagctacgtgctcaccaagggctggagccgctacgtcaaggagaagcgcctcgacgccggcgacgtcgtccacttcgagcgcgtccgcggcctcggcgccgccgaccgcctcttcatcggctgcaggcgccgcggcgagagcgcgcccgcgccgccgcccgccgttcgcgtcacgccgcagccgcctgccctcaacggcggcgagcagcagccgtggagcccaatgtgttacagcacgtcgggctcgtcctacgaccctaccagccctgccaattcatatgcctaccatcgctccgtagaccaagatcacagcgacatactacacgcag

SEQ ID NO: 11308 - DNA, 918 bp, Oryza sativa
  Clone ID: TFbOSC900066j.C1.o8.gm
atggccatgcaccctctcgcccaggggcacccccaggcgtggccatggggtgtagccatgtacaccaacctgcactaccaccaccactacgagagggagcacctgttcgagaagccgctgacgccgagcgacgtcggcaagctcaacaggctggtgatccccaagcagcacgccgagaggtacttcccgctcggcggcggcgactccggtgagaagggcctcctcctctccttcgaggacgagtccggcaagccatggcggttccgctactcctactggaccagcagccagagctacgtgctcaccaagggctggagccgctacgtcaaggagaagcgcctcgacgccggcgacgtcgtccacttcgagcgcgtccgcggcctcggcgccgccgaccgcctcttcatcggctgcaggcgccgcggcgagagcgcgcccgcgccgccgcccgccgttcgcgtcacgccgcagccgcctgccctcaacggcggcgagcagcagccgtggagcccaatgtgttacagcacgtcgggctcgtcctacgaccctaccagccctgccaattcatatgcctaccatcgctccgtagaccaagatcacagcgacatactacacgcaggagagtcgcagagagaagcagacgccaagagcagcagcgcggcgtcggcgccgccgccgtcgaggcggctcaggctgttcggcgttaacctcgactgcggcccggagccggaggcggatcaggcgacggcaatgtacggctacatgcaccaccagagcccctacgccgcagtgtctacagtgccaaattactgtgacccacacacccttggctactgggactaccagaacctgacccacaaaactggatgcagccatgcaggggcccaactcaaaaaccggacctacaagacgctatga

SEQ ID NO: 11309 - DNA, 600 bp, Oryza sativa
  Clone ID: TFbOSC401196j.C1.o40.fg
atggccaccattgttgcatgggagagtagaaacctgcagctgcaaggaggaggaggtggccatggcggtggcggcggcggtggcggcggcgagcggcgggagtacatgttcgagaaggtggtgacgccgagcgacgtggggaagctgaacaggctggtggtgccgaagcactacgccgagaagtacttcccgctggggccggcggcgaggaccagcccggcgggcaccgtgctgtgcttcgaggacgcgcggggcggcgacagcacgtggcgcttccgctactcctactggagcagcagccagagctacgtcatcaccaagggatggagccgctacgtccgcgacaagcgcctcgccgccggcgacaccgtctccttctgccgcgccggtgcccgcctcttcatcgactgccggaagcgcgccgcctccgtgtcgtcctcgtcgctggtgccaccggccttgatcaaggtgcagctgccgccgtcgcggcctgtcgtcgacgaggaggaggctgcgtgtggccggcggtgcctccggctgttcggcgtggacctccagctccgcgccgatgcctcgccggcgctggatttgcagctttga

SEQ ID NO: 11310 - DNA, 124 bp, Oryza sativa
  Clone ID: TFbOSC32158j.C1.o1.hg
atgttaagtgctagtgatgctggacggattggtcgtttggtgttgccaaagaaatgtgctgaggcgtacttccctgccatctctcaggcagaagggcttcccttaaaagttcaggatgctactg

SEQ ID NO: 11311 - DNA, 1657 bp, Oryza sativa
  Clone ID: TFbOSC401603j.C1.o6.np
tattgtgtctgctctcagcataagcatgcattgcatggtttcgaggcccatgtcgtcgccggcgcagccgcccccgacgcggccgccggtggccgccccgcaagcgcaattgcgcaatggaaggcctagaatggatgcaaaggcgagatctcagttgcttccacgctattggcctagaataacagatcaagagctacagcacctatctggagactcaaattctgttattacccctttgtttgagaaaatgttaagtgctagtgatgctggacggattggtcgtttggtgttgccaaagaaatgtgctgaggcgtacttccctgccatctctcaggcagaagggcttcccttaaaagttcaggatgctactggtaaggaatgggtgttccagttccgcttttggcccaataataacagcaggatgtatgtattggagggtgtcacaccttgcattcaatcgatgcagttacaagcaggcgatacagtaacctttagccgaatagatccagaagggaagctggtcatgggatttcgaaaggcaacaaatctttctgcagaacagcctccagaagcaaataataaagttgttgtcccagattctagtcctaatgctgctgtacctcgaccaattaaagtcaacacagagagcaaaagttccagccctgtggaacaagccactgcctgtaaaattgacaaaggtgcattaccacaaaaggaagggccaggaacttcaagttcctccccactacctgtcaagagaaaggcaacttctgttggtccgaagatcaaacggttccacatggacagtgaggaatccatggaattgaagataacatgggaggaagctcaagaattacttcgtcctcctcctaaggccccttcaattgttgttgttgatggccatgagtttgaggaatatgaggagccaccaatacttgggaggaggacatattttgtgacagaccaatcaggtgagaatcatcaatgggctcaatgtgaggattgctctaagtggcgtaaactgccggtggacgcccttttgccctctaagtggacctgctctgacaataaatgggattctgaaaggtgacctgctattttagaaccattcagccttttgtatgctgtatttatgattagctacaatagaaaaagtgctgcaaaaaagaccaaagggaaggtagatactgacaatattgatgtttcagatgggctggacacactcgcaaatcttgcaattcttggtgaaggtgaatctctcccttcccagccaaccacaaggcatccccgccatcgccctggctgctcatgcatagtctgcatacaaccacccagcggaaagggaccaaagcacaaacagacgtgcacttgcaacgtctgtatgacagtgcgacgccgtttcaggacgcttatgatgcggcgcgagaagcgccagcagtcagagaaggactctggggtgcctcgcaaaagagagccaggtcaatccagcgagccagttccacaaacaacaagaggacctcctctcctgtcaagaaccagattgacctgaacagtcagcctgagcgggaagacgacctcgagatcgtgaagttctcctccgcttcctccgcctccggcgccgtcttcaccacctccggcaccgtcacctccacgggaa

SEQ ID NO: 11312 - DNA, 819 bp, Oryza sativa
  Clone ID: TFbOSC4900j.C1.o12.fg
atggcggcttctccgccactgcctacttccatcgatggtggtcaagtgctagatgacatggaggtcgtggagatgaagtacctgtttggcaaggtcctgatgccaagcgacgtgtcctgggacaccgaacagctcgtgatcccggacgagcacgtcgggaaactactggacatggtggtgatgaaccggccggaagggggcttcttcgtcgtcgtcgtcgaggatggcgaggtgactgggaagctgtggcttttcaggtactggaaacgcgacgacgtccactgcctcaccaagggctggggttgctacgccagggagaagggcctcagagccggagacaccgtctccttcttccacagcaccgcgtgcggtcgcttcttcatctgctgcaggtgcacctgcatgagtttcttgtcactacccacaacatcgcatcgcattcacggctcgtctgtactgccgcaaccgcgggctgcccaggaggcgcaccatccattctcaggacacgccacattgtgtctcggcaacaaagctagtgatcacagcgcgccggcaaggcatgccactgcctccttagggtgtgcggcggcgcagcctccgcaggtgccgccgacgccgacgccgcgtcgtcgacggcgcagtatgatggttcacccagaaccaccggagcacacaacggacggcatgcctgtgattctcgagtcgatggcactcgtatccaccccgcccgtggcgaaacgcgtgcgcctttttggagtctacatcgacgttcctccactgcgcccaggcggcgaggcaacacaagatttcaacccatga

SEQ ID NO: 11313 - DNA, 1593 bp, Oryza sativa
  Clone ID: TFbOSC100940j.C1.o8.fg
atggctgatgctaggggctcctcttcttcttccggcgatggcggtggcggcgagggcaagggcggagcaggccatggtgactttgtggggggcggccagcacaactggtaccatgggatccttggggccgtgccgccgcccaacgttgggcgacaaaacatcgtgcaccatcagtaccctgctgctagcttgatccagcagcaccaccagtcgccaacaatgccgctaccgatggcgcagctcccctacgtgccccaatacaccgtgctgcctacgcccgccgtgctcccgtcgcaccaccaccaccacggccagtcgcagatatctcaagaaaacttccaagactgggttccctccaacaatgttgcagctccgcatgttcccagcgcttttcaggattggaggcaaatgtgcaatgggtcggcattcatgccttttggccaaactgctgccaatagcaatgttttttaccagaatctgaccttcaattcatggactagcaataacatgccgaggaaccctgtctacactagtttccaccctgctgcaattgaggatcaccatgctcctctattccatagcaacaatcatgacatagacccagagtttttgggaaaccgacacttgcatggagttgacatcgccggagctccacccgcaaaagccacctcacctgccaccgccggaggtctgctcacgaacacagcccctgccaccgtgtcacagatccatgcgagatgccgccgtcgccaaatctaccgctgctgtggccttcttccgcgagcacctccaccatcagatccgtgtgcgttcgcgagggccaccatcaccgctgccagatccgcccgcggcctcctctctcatttgtacggtggcttggtgttttggcttgttgggaaaaggaagctgggggagaaacgagagaggaagagaaaagtggtggctgggatggatccaccaattgtcttcagaaggagcgatatggagagcgaaaaaaacgatgataatccagatcaaactccggttagtgagcctccaagcatgaatcagaacggtgaaaatcttattattagattcaactgtagagaataccgtgttatcttgcgcaaggagttaacaaacagtgatgttggtaatattggaagaatcgtgatgccaaagagggatgcagaggctcatcttccagcattgcatcaaagggaaggtgtgacgctgaaaatggatgacttcaagtttgaaactacatggaattttaagtataggttctggcccaacaacaagagcagaatgtatgtcttggaaagcaccggtggttttgtgaagcatcacggtctccagacaggcgacatattcatcatttacaaaagctcggagtctgggaaatttgtgagctccgtgccatttacttccacaacgtacggagaatccgacggtgaggactacaacggtgatagaagcggccccggtgccggagaggtggccgacgaagatttcagaaagcctgagtttggttggtattgttgcgcgaagataaacaggaaagaaagtgagatcagggaacaagtgtctaaggagaaagtgaactccaactga

SEQ ID NO: 11314 - DNA, 2187 bp, Oryza sativa
  Clone ID: TFbOSC400964j.C1.o49.fg
atggacgcctccgccggctcgtcggcgccgcactcgcacgggaacccggggaagcagggtggcggcggcggcggcggcggcggacgggggaaggccccggcggcggagatcaggggtgaggcggcgagggatgacgtctttttcgctgacgataccttcccgttgctcccggacttcccgtgcctttcttccccgtcaagctcaaccttctcgtcgtcgtcgtcgtcgaactcgtccagcgctttcaccaccgcggcgggagggggttgcggcggtgagccgtccgagccggcctcggcggcggacgggtttggtgagctcgccgacatagaccagctcctcgacctcgcgtcgctgtccgtcccgtgggaggccgagcagccgctgttcccggacgacgttggcatgatgatagaggacgccatgtccgggcaaccgcatcaggcggacgactgtaccggcgacggcgatacgaaggcggtgatggaggcggccgggggaggagacgacgccggcgacgcatgcatggaggggagtgatgcgcccgacgatctgccggcgttcttcatggagtggctcacgagcaaccgtgagtacatctccgccgacgacctccgcagcatccgcctccgccgatccaccatcgaggcggcggccgcgcggctcggcggcgggcgccagggcaccatgcagctgctcaagctcatcctcacctgggtgcagaaccaccacctccagaagaagcgcccccgcacggcgattgacgacggcgccgcgtcgtcggaccctcagctccccagccccggcgcaaaccccggctacgagttcccctccggtggccaggagatgggctccgccgccgccacatcctggatgccctaccaggccttcacgccgccagccgcgtacggcggcgacgccatgtacccaggcgccgccggcccgttccctttccagcagagctgcagcaagagcagcgtggtcgtgagcagccagccgttctccccgccgaccgcggcggcggcgggcgacatgcatgcgtcgggcggagggaacatggcctggccgcagcaattcgcgccgttccccgtctcctccacgagctcctacaccatgccgtcggtcgtgccaccgccgttcaccgccggattccccgggcagtactccggcggccacgccatgtgctctccacgcctcgccggagtcgagccgtcctcgacaaaggaggcccggaagaagcggatggcgaggcagcgccgcctctcctgcctgcagcagcaacgtagccagcagctcaacctgagccagatccacatctccggccatccacaggagccctcccctcgcgccgcgcactcggcgccggtcaccccgtcgtcggccggctgccggagctggggcatctggccgccggcggcccagatcatccagaatcccctatcaaacaagcccaatcctcctcccgccacgtcgaagcagccgaaaccctcgccggagaaaccgaagccgaagccgcaggcggcggcgacggccggagcggagagccttcagcgctcgacggcttcagagaagcggcaggcgaagacggacaagaacctgcggttcctgctgcagaaggtgctgaagcagagcgacgtcgggagcctcggccgcatcgtgctccccaaaaaggaagcagaggttcacctgccggagctgaagacgagggatggtgtctccatccccatggaagacatcgggacgtctcaggtgtggaacatgcggtaccggttttggcccaacaacaaaagcaggatgtatcttctcgaaaacacaggtgattttgttcgttcaaacgagctgcaggagggtgatttcattgtgatctactccgatatcaagtcaggcaaatatctgatacgtggtgtgaaggtgaggcgcgcggcgcaggagcaaggcaactcgtcgggggcggtaggtaagcataagcatggctcgccggagaaacccggcgtctcgtccaatacaaaggccgccggcgccgaggacggcaccggcggcgatgacagtgccgaagccgcagcggcggcggcggcaggcaaggctgacggcggcggctgcaagggcaagtccccgcacggcgtgcggcgttctcgccaggaggccgccgccgccgcctccatgagccagatggcggttagcatctga

SEQ ID NO: 11315 - DNA, 804 bp, Oryza sativa
  Clone ID: TFbOSC4900j.C1.o11.fg
atggcagcctctctgccactgtcagctgccatcgttggagccgaagagtcggttgacaaggaggtcttggagatggagtacctctttgagaagtttttgatgccaagtgacttgtgcagcaatactgaatggcttgggatcccagaagaacatgttaggaaatttggcatgatgttggaggacagggacggttactccgtcattttctttcaggacggtgtggtgcctgggaagttgtggtgctttaggtactggaaaagcaatggagtccatggcttgaccaagggctggaggtgctttgttagggagaagggcctcaaagccggagacaccatctccttcttccgaggatctgcatgtggccgtctcttcatctgctgcaggttaggcacccatgcaacctttgcgtcatcctccaccttgcatcatggcttttctatgcccccaccacctgcccgcccgctggtgggtcttcaatctggcatgttggcaagagatgtcccatcattaggacaagctaggttgcatgatggaaatcaagatggaggcggtgcaccatcaagacatgttccatcctcaggacgacgtgtggaggcacagctatcacgtgtgtcgtcgcgccgtcaacgccgtactatgaagcactcgataccagagcccacgatagagacgccaccaattcttgagtcgatgttcctcatagccgcaccaccggcagtgaagtgcttacggctttttggcgtcaacatctatgtgttgcctgtgtcctctagtggccagccaaaacaagaatccagcccataa

SEQ ID NO: 11316 - DNA, 267 bp, Oryza sativa
  Clone ID: TFbOSC404812j.C1.o6.hg
atgcagagattggtgggggggcggctgacctgggggcgcgttggagcgtttccttggcgcgatcacgccggccctctcggcgagcgcggccgcagcgacaaaccctccaactgccgccaccgctgctgccccgaccccgccgggagtttctccacctgtgactcgtccaggaacagcagccagagctacgtgctgaccaagggatggagccgattcgtgagggagaagggcctctgcgccgacgagctgctcttcatcgactgctag

SEQ ID NO: 11317 - DNA, 807 bp, Oryza sativa
  Clone ID: TFbOSC400044j.C1.o70.fg
atggccggggtcaccagcaagcgccgatcctcctccgcctccacctcctcctcctccggcgacggcgccgccgtctccgaccggccgcggggggtgacccggaagcgcaggtccggcggccgttgcccccgccccgccgcctccctgaggccggccgcgccccgaccctcctctagcgatgcacgtgcaagaactaggcacaaatcggggatatgtgttcttagtggagtaatttctattactaatggtgggtataactggtgtaggaaggtaaacatgttggatttgaatagagctatccttgattcagatcaccacactgctggattgagagtaattctgcaaaaggaactacggtacagcgacgtaagccagctagggagaattgttctcccgaaggtattggcccaacaacaagagcaggatgtcatcggagcaaagaaggcaggtgatcaacaagctgccactgtgccacaagttgacgagcatatctctaccctcttccccatttttccaattgcacaagtcgatgactatctctctcccatggcaccacaagttgatatctctgccttcgtgccacatgctgatgagaaccatgagatatttgacgggatactgaattctctgccagagataccagtagccaatgtgaggtattctgacttcttcgacccattcgatgatggtatggacatggcaaacactctgaacgccaacgccaaccagtctgctagtctgcatgtcactgatgataagtctgggcattccttgattcccaacccaaagtctgggcctcacatgtga

SEQ ID NO: 11318 - DNA, 3645 bp, Oryza sativa
  Clone ID: TFbOSC900160j.C1.o1.gm
atggcggatgagggggagagagtctgtataattgttgatgaaatggagagggaagattcggataatgaggaagcggacgacgacgcatcatccgatgaggaaggtgatgtaatggccactaattgggcaaatgaggacttctctggacttgttatatcagagggtgatcatgtaccctgggagtataaggagaacgaggtaattgagggtgcaaggtatgctcataaggatgagatgaaggaggcgaacggttgggatgagaagggacttccagctaagtggcctgatattcggagtcggtggtgcatgcgtcacatgggtgcaaatttctacaagcaattcaagaacaagcatcttatggagctctttaagaggctctgtgcacagaaccaagagaagaaatttaatgagttgtgggacaagttggatgagttgacaacgaagcaaacagatgagcaatctcgcagaccacaagttgaaggtgacgagcctcccatacctcttggtgcattacatgatgacccaccaacaatgagaagtaggtcagggtcgtccatcagaaatttcactcagtggattgagaatgagcctaaggagaagtggtctctattgttcgacaccgatggatctcgcaagtgtgatctgcgcggccatacttacaagaaatgcccgaagaatgcagaagttccaagcggcgcagatgctagtccatctagacaggcaagtgatggtatggcgtacgacacaccggcgctgttgaaccgtgggattgacaggaaccaccgctcgttcccgtcagcagtcgagggtgcacagctcggcaccttccgtccacgcacgtcgcgtgagtggttgcgtgtcgacccccgtcacgttccttggtacgcgcttgttgaggcggcggcggacgaccgtgacccagcgaagcggtgggatgcagaccggtcactccttgccgctctggtagaccgctggagacctgagacgcacacgttccaccttccctgtggggagatggctccgacactgcaggacgtgtcgtacctgctcgggctaccgctggcgggagcaccagttggtcccgtggacggtgttgttgggtggaaggaggatatcactgcgcgcttcgagcagacggaccttctgcaccctgacgctgatgattactcggtccgacgctcccttgaggcgtacctgttgtggttgttcgggtgggtgatgttcactagcacccacgggcacgctgtggacttccggctggtccactacccacggtccatcgcggatgctcagccacaggacgtgccgcagtggagctggggttctgccatgctagcagccacgtaccgtgccctctgtgaggcgtgcacgaagactgacgcgggagcgatcatcgctggctgccctatgttgcttcagctttgggcagccgagaggtttgccataggtcgaccagtggtggacagcgcaccctacggggttggtcgcagcacgcagtggccagaggacggtcccacgatggggacttactggtgtcgacgtgggcgtcgttacgctcacgtccaggtgagacgaggttacccggacttcgtgttcgagtttgaccgtctccagccgagcgacgtcatctgggagccgtacacagaagaggccgtcgctgcgagagcaccgctaggactttcgtccttgtgcacacgcgatcaggcttactggctcaccatcctgccgatggtgttcgacattttcgttgagcctcactgcccgcagcgtgtgatgagacagttcggacttaggcaggtgtttccgggtaacgtgcagccgaccgtcctccctgccgaccactcgttgactcgacggggacagctagcaggcgcactttgggctccacgtgtacagcagtacgttgacgactgggtgttagctacagaggaggtgatcaacgagctcttcccacacacggaggagaactaccgtgactaccttcgctggtaccttcctcgcactcgtgcgcgtgtgaccttcactccagacgccccagagccgcacgttgccgctgtcacggacgcgtatcccacgcaccgtgaccgagactacttcgtgggggctgatgccgcacgggatatcagtgccgatatcaccgcagtccaagtgaggttgaacagagcgccgtggacgtcgtacctccagctggtccggtacaaccacggcctcgcgcgcctaccgtcggagcaggacctcgacctacggcacctgtttcgcacggacctcgtttgccttcgagcgcccctagcttcggagcagtgcgacctacagcaccggacctcgtctgccttcgagcgcgttcgcaggcacgaccggcgcttccgcgagctccgcaggggcgttcgccacctcttcgggcgcgttcgccagctcttcctctcacggagcgtcgatccctcgcccacacgccgggatcttcggtactggggcctcttcgtctcacgccgcttggaggagctccagaggcgcacactcaggagcagccagaggtcacacctgtataggcaggacgggttgcccgtgccgtacccccggaccgactcacgtactcccaggggcacattagggcacagggaactctcggatggtgaggaagtgtctgatggtgagtatcaggccggcgacgatttctctggctacgcggtccggggccgggggttcgtcgagaaggagcacatattcgacaaggtggtgacgcccagcgacgtcgggaatctgggccggctggtgatcccgtggcagcacgcggagtgctacttcccgcgggacgtacccgcgaacgagagggagggcgtcgtcctcagattcgaggacgatgccggcaattcatggcgtttcctctaccgcggcagcagcttgacgttgggatggagccacttcttcaggaagaaccgcctcgacgccggggacatggtctccttctaccgtggcgccagcgaggccacccgtgaccgcctcttcatccactcgaagcgccggatgcacattctccctactctaggctactcagaccctcaggttcatatcaatcgcctctttcagctgctggttcgggtaagaaccatggtttcatccttcggtaaatctgggtcgccgtcgccgcccaattctccgcttcctacagttcaaaatttcacctacaaagcgctaaaagattgcctccaagatctgcactactacagcctcctgtccatgatggggagaaaccacaaaagtcagtcaacatccgcaaagatccgtgatactattcctacgcttgatgctttgatacaattacgaagcctgtcagatccagtttttcgtattcccgccgcagcgacgtcgcattgcatcctcttatgccgtggtgttttggggatcatgggcttcctatgctctgatgagaatatgaaggaggatcaccggatgcttcaggttcctgcttttgatgatctgaactactctgcccaagacaagattaccaggatgaaagaacagacaatgccatcatccctggctgaccccatttatctgttgcccacagcaatcaggaacctgctgtatttggacctctcaaattgcagtgacattgctgttggatttgtcgggctgtcgcagtcttag

SEQ ID NO: 11319 - DNA, 966 bp, Oryza sativa
  Clone ID: TFbOSC400021j.C1.o6.fg
atggggcaaatggacggcggcgacggcggcggcggcggccacccctaccactaccaggctctcctggccgccgtccaccagcagaccgtcccctttcccaatcccttccccgccccctcctccggagccgagcccccccacccgcacaaccacaaccacaaccacaatcacaaccacaatattcacaattctcacaatcacaaccacaatcacaatgctgctcctcacccttgtcacactcccactcccactcccactcccagaggtttcgccgactggagcgcctccaccagcgccttcacctcccttgccgcgcactcttctactgcccccagcaatgccgttcactacagcttctccccctgctatgccttctggacacattacatgctcaacaagaacgcctaccccacctccttccctgcgccacacgacgaccacctgcgccttgccaacaacaatcatcctagagacgcaccaggtcctgcatccagctacggggtcgagtcttttacttcaccgtccatggcaccgaatatttgcacccacatgcctcccatagaaggacccatatctgccaaggaagataagaaaccagagattttgcctagagtggttaagagcagtgatgaattggaaaccagaaacagcaatgttgaatttcactctgagacagttggtactctccctgagtcgaagcaaggccatgacagtcgtgctactaaactactcaactcgggagaataccaagtcattctgcgcaaggagctgacaaagagtgatgttggaaatgttggaagaattgtgctacccaagaaggatgcagaggctagtcttccacctttgttgcaaagggatcctttgatactgcacatggacgacatggtgctcccagtgacatggaagtttaagtacaggtactggccaaataacaaaagcagaatgtacatcggatttcgcaggtga

SEQ ID NO: 11320 - DNA, 1302 bp, Oryza sativa
  Clone ID: TFbOSC900266j.C1.o5.fg
atggctgacacgagaggctccacttcctctggcggtggcgatgacaggggcagagaaggccacgatgacttcacagggggcggccaatacaacaggtaccataggatccttgaggccgtgccgtcaccccttgttaggagtgagaatgttgtgcatcatcagtaccccactggcctaatccaccacccgtcgtcgacaatgccggtggcgccatgctcctacgtgccccggtacaccatggtgccaacatccgccatgctcccgctgcagcaccaccaccgccaattgcagatatctcaagaaaacttccaagaccgagttccctccaataatgttgcagctccgcatcttcctagcaattttcaggatttgaggccaatgtgcaatgggccgccattcatgtcttatggccagactgcttccaatagaaatgttctttatcagaatctgacgccatactccttcaatgcatgggctagcaataacatgccgaggaaccctgtctacactagttaccaccctactgcaattgaggatccccatgctactccattccacatcaacaatcatgacacagaccaaggtttcttcaccgtttctactagcttcagggtggatcaatcatttgtacatgctccttcaccctttccaccagtgtcttcatcatcccgcagtttctcttcagctcaaatttcaaatggaccgacagacgctaagaaagccaagaaatcagatataaaagatcaaccaattgttttaagaagaagtgatacagagagtgaaaaaaatgatgaactaaatcaaactccggctagtgagccttcaagcatgagtcataacagtgcaaattcgactattagattcaactgtagagaataccgtgttatcttgcgcaaggagttgacaaatagtgatgttggtaatattggaagaattgtgatgccaaagagggatgcagaggctcatcttccagcattgcatcaaagggaaggtgtgatgctgaaaatggatgacttcaagcttgaaactacttggaattttaagtacaggttctggcccaacaacaagagcagaatgtatgtcttggaaagcacgggtggctttgtgaagcagcatggtctccagacaggggacatattcatcatctacaaaagctcggagtctgagaaattagttgttcgtggggagaaggccattaagccgaatgtcatcatgcctattgtggactgcagctgcaaaaatgatctcaacaacagcgaagaatgcgggttcgctatcagcctgctgactaagaaaacctga

SEQ ID NO: 11321 - DNA, 864 bp, Oryza sativa
  Clone ID: TFbOSC401138j.C1.o1.fg
atgtacatggacttaaccctaggaggagcactgctgcaggtagaagaagccactgaggaagaagaagaagaagaagaggaggagcaagctctaggtcaagaacctgcaccggctgcggcggcggcggcgctggtgctaggtcgtcgccacggcgtcgtcgtcggcggcggcggtggtggagtggtggtggcggcggagcgggagcacatgttcgacaaggtggtgacgccgagcgacgtgggcaagctgaaccggctggtggtgccgaagcagcacgcggagaggttcttcccggcggcggccgccggcacgcagctgtgcttcgaggaccgcgccgggacgccatggcggttccgctactcctactgggggagcagccagagctacgtgatgaccaaggggtggagccgcttcgtccgcgccgcccgcctctccgccggcgacaccgtctccttatcccgcgccgccgacggccgctacttcatcgactaccgccactgccaccgccacggcggccgcgacatcagcttcgcctccgccgccaccgccatgccggcggcggcgtggccgctcttcggccgggtgcaaacggcggcgccggtcagctacggcggcggccatgggagtgcggccgcagcaacgatgttcttggacacggtggcgcccgtcgccgccgccggcggccaccgcggcgaggtggggccctccggacagaggagcttcaggctcttcggcgtcaatgtcgagtgcggcggcgacgtcgacgcggcggcggaagaggaggatgccgacgacgacgtcgacgacggtgatcatcgccgaggtgaagaaatggagcttgtgatgtggacgaaccataggtag

SEQ ID NO: 11322 - DNA, 942 bp, Oryza sativa
  Clone ID: TFbOSC900015j.C1.o21.fg
atggccatgaaccaccctctcttctcccaggagcaaccccagtcctggccatggggtgtggccatgtacgccaacttccactaccaccaccactacgagaaggagcacatgtttgagaagcccctgacgcccagtgacgtggggaagctgaaccggctggtgatccccaagcagcacgccgagaggtacttccccctcggcgccggcgacgccgccgacaagggcctgatcctgtcgttcgaggacgaggccggcgcgccgtggcggttcaggtactcctactggacgagcagccagagctacgtgctcaccaagggctggagccgctacgtcaaggagaagcgcctcgacgccggcgacgtcgtgcacttcgagagggtgcgcggctccttcggcgtcggcgaccgtctcttcatcggctgcaggcgccgcggcgacgccgccgccgcgcaaacacccgcaccgccgcccgccgtgcgcgtcgccccggctgcacagaacgccggcgagcagcagccgtggagcccaatgtgttacagcacgtcgggcggcggctcataccctaccagcccagccaactcctacgcctaccgccgcgcagcagatcatgatcacggggacatgcaccatgcagacgagtctccgcgcgacacggacagcccaagcttcagtgcaggctcggcgccatcgaggcggctcaggctgttcggcgtcaacctcgactgcgggccagagccggaggcagacaccacggcagcggcaacaatgtacggctacatgcaccagcagagctcctatgctgccatgtctgcagtacccagttactgcagacatggatggggaggtttcaggaaacatcaagttgaaaaggagaggggaattgaagagacaggcagagagctatgcaattatgcaatgcttccatttgttgcaatccaatag

SEQ ID NO: 11323 - DNA, 1593 bp, Oryza sativa
  Clone ID: TFbOSC900266j.C1.o4.fg
atggctgatgctaggggctcctcttcttcttccggcgatggcggtggcggcgagggcaacggcggagcaggccatggtgactttgtggggggcggccagcacaactggtaccatgggatccttggggccgtgccgccgcccaacgttgggcgacaaaacatcgtgcaccatcagtaccctgctgctagcttgatccagcagcaccaccagtcgccaacaatgccgctaccgatggcgcagctcccctacgtgccccaatacaccgtgctgcctacgcccgccgtgctcccgtcgcaccatcaccaccacggccagtcgcagatatctcaagaaaacttccaagactgggttccctccaacaatgttgcagctccgcatgttcccagcgcttttcaggattggaggcaaatgtgcaatgggtcggcattcatgccttttggccaaactgctgccaatagcaatgttttttaccagaatctgaccttcaattcatggactagcaataacatgccgaggaaccctgtctacactagtttccaccctgctgcaattgaggatcaccatgctcctctattccatagcaacaatcatgacatagacccagagtttttgggaaaccgacacttgcatggagttgacatcgccggagctccacccgcaaaagccacctcacctgccaccgctggaggtctgctcacaaacacagcccctgccaccgtgtcacagatccatgcgagatgccgccgtcgccaaatctaccgctgctgtggccttcttccgcgagcacctccaccatcagatccgtgcgcgttcgcgagggccgccatcaccgctgccagatccgcccgcggcctcctctctcatttgtacggtggcttagtgttttggcttgttgggaaaaggaagctgggggagaaacgagagaggaagagaaaagtggtggctgagatggatccaccaattgtcttcagaaggagcgatatggagagcgaaaaaaacgatgataatccagatcaaactccggttagtgagcctccaagcatgaatcagaacggtgaaaatcttattattagattcaactgtagagaataccgtgttatcttgcgcaaggagttaacaaacagtgatgttggtaatattggaagaatcgtgatgccaaagagggatgcagaggctcatcttccagcattgcatcaaagggaaggtgtgacgctgaaaatggatgacttcaagtttgaaactacatggaattttaagtataggttctggcccaacaacaagagcagaatgtatgtcttggaaagcaccggtggttttgtgaagcatcacggtctccagacaggcgacatattcatcatttacaaaagctcggagtctgagaaatttgtgagctccgtgccatttacttccacaacgtacggagaatccgacggtgaggactacaacggtgatagaagcggccccggtgccggagaggtggccgacgaagatttcagaaagcctgagtttggttggtattgttgcgcgaagataaacaggaaagaaagtgagatcagggaacaagtgtctaaggagaaagtgaactccaactga

SEQ ID NO: 11324 - DNA, 1911 bp, Oryza sativa
  Clone ID: TFbOSC401605j.C1.o26.fg
atggcgaaggaggaggacggcggcggcggcccggagttcgtgaggtggagggaggacttcgtgtcgcaggagaggggcagccgcgtcgtgcattactacctcgaggacgccgcgggcgcgtcgcacctcgccgtcgtcggcacggagcggagcctgcgccacatgctctatgtggtctcggaggatttccgggaggcgcagggtgccgatggcggcgggccgggggtgtttgcgcgcaagtggcggtcacgccgtgaggtggtggattggctcgcctccttccttccggcgaagtccctcgcctcgaaactttcaaaatttggatcacatatgggtaatgacattggattggatggatacagtgaacctgatagctttatgggtcacaatctggggaaagcctgtagctcggacattatgtggtctggttcgtcctggacttgtggcaagcagctttaccactataaagctttttgtcgtaatggtaccacaatatctacccactcttttgtgcttgtcatgtctgaggaggaaagtcgctatcttgcatacttggaagatatgtacgaagataagaaggggcagaagaaggttaaagtgcgatggtttcatcaaaaccaggaatttgcttgcgctatacctcctccccctcctcatccttgcgaagttttcatcactccttattctcaagtaatcagtgtggagtgtgtcgatgatattgcaactgtgttaactcctgagcactatgaaaaatgcgtcaatacattgccaaattcttctatggtgggaatccgtttctgctttcgccaatacagtaaaaataagtttaaacgttttgacctgagatcattgcgtggatattttagtcaagctgttgttttgtccttaaaacttcccccagagcaagaaaaggatgatggttctgatatcataaaaacttttgagcaatggacacctgggaagacaaagtttcctaagcagtttgagaggctttactcaaaatgtttgggaactaaaatctgccgaggcccacaagaagactccatagcatcttatcagaaaccaagcagtaagcaatctcccagaaaacatctctcagtcaagttcatagggccccagaatcagcgtatgccaacctacaatgttggtgacagaatagaggtcttgtctcaggacagtgggattgtaggctgctggttcaggtgtacagttctcaagtcatgtactaatcataacaaattgaaggttcagtatgatgatctccagaatgctgatgatagtgggagattggaggagtgggtacctgtatcaacattggctcgtcctgataaactgggattgagatgcccagagcgacgcagagttaggccacgccctcaacaaaatagtttggctgacggaactaatcttttacctggagctgctgttgatgtatggcaatttagtggctggtgggaaggagttctagtcagtgcagacaacatttcagctgatagcctacaaatatattttccaggcgagaacttctttagtgtatgccagctaaagaatttaagaatttcgaaagattgggtcaagagccactgggttgatatagaaatgaaaccagatgtgttatcgaaaataccttcggttggtgttcaaacaaggcaacctgataatctgacatctgttgagaggccggactccagaaattctgcaatgtctgaccaagagcttgcagccatacaaacaaactctagtgaagataaacaaacaggagctgatcagccagcagaagttagtttgactgatatggcctctgcttttgcagaggaccagaaacaaacagttctaggaaagcgacctagggatgatgatgctgaacaacattgcaatggggaagtaggcatagatgttggcaaattgtga

SEQ ID NO: 11325 - DNA, 2136 bp, Oryza sativa
  Clone ID: TFbOSC2508j.C1.o1.fg
atggaggtcgaggcgggaggtcgtggactggctgtcctccctcgtttccggattatggagaatacatgtgtgacccagtggaagccgctgcaggtttccctttttgggtcgattgtgttcaatgaaaatccatatgatgacattgagttcactgatgttgctgcttcaaaggatgtttcacatacatcatcagtaaggaataactcaaaagagttcacatggttaggtcctgcatggctttgcgaaaagcgatggaagcactacagatctttctgccgtaaggggattactatttcggtgcataattttgtctacatcctgagtgaggaaaagaagaggctcatcgcccaagtggaggatctgtatgaagatactaattcaaccaacgttgtcatggtacgatggttcgacaaagttgatgaggttggtgtcgaattgccacctgatgttggtgacagagagattttcttttcccctggtctgcaagatctcagtgttgaatgcattgatggattggctgcagtcctgagtgctcaacacttcgagaagttccagagtagtccaaaacatagctattggcagccttatatttgtcgccgacagattgatgaagatggcgtcaaaccttttgatgtaacccaattgcaaggttattggagtcaagaagtgcttaggacaatgttcaatgcagcttcttctcttaaggtacgtttcaaggtcactaaaggtgcttctagttcagatggggcacaaaagaggaagcgtgatgcattcagtgaaaccgatccacagcagtgtgttccttccgctgcattcggttctgatagtctcaagaatgatttggaacataaaactcaaaagcagctatatcctggtagccgtgctgaagtcctatcacaggacagcggtataaggggctgctggtttagatgctttgtattaaagaggcgcggagacaaaatcaaggtgcgatatgaagatcttcaggatgctgatgagacaggaaatctggaggagtgggttttgctaacaaggattgctaaacctgatcagttgggtatacgcatccctgaaagaccaatggtgcggccatatcatgtacatagcaaggatccatgctctttcgatgctggttccattgttgatgcatggtggaatagtgggtggtgggaggggattgtattgcagcagggaaatgacagacgccttcaagtttattttcctggagaaaagcagattgctgatttttgtgaagatgatttgaggcattcacgtgagtgggctggtggcaaatggaattccttgggggaaagaaaagatatcacacacctgttgccccccacttcagttcatgaagagggaggtttgcttagcaaacctgtttcacaagaaggcaatccctcttcaaaattagaatctgacaagaggtgtgatgacaaatcattgggcaccaagatttcacatgatcagaagcatcagaagcgtgttctggctgatctcacaaatgctctgaaattcgataacctgaaatggaggccaagaaagcggagcagaagatctggttccaaaaggcagtcagacactagcagtggcagtggcagcagcagccagggcgacatggaggagtccagcccctgcggaagttttgcagtgcttaattcagcgcccgatgaagaagtatgcaagagcagtggagaacctcttttcatgagggtttccaacctgacaactttgctctatggttttgccagattcttctaccgttctctcttctccggcgagccggaagccgacgaccggtcgtcgcgcgccgccgccaagtggacagacggtgttcatgagtggcaaggtgattatggtgaattggaagtgcagagggggaatggtgtgttctactgcatgaccgtcaggatgagcatcgactgcaatgggtgctaccagaggatcaggagggcactcctccagatgcaagaagatctggatagccacctgatcgaccggaagcagcagcgggtgagcgtctgcggcgccttcgtgccgcaggacgtcgccatcaagctccgcaagaagaccaaccgccgcgtcgagatactggagatcaaggagatcgacgccggcgacggccaccggctgtga

SEQ ID NO: 11326 - DNA, 2451 bp, Oryza sativa
  Clone ID: TFbOSC400493j.C1.o35.fg
atggacgagctcgcggcggcgtcggcggcggcgaggaggaggtgggtgcagtgggaggaggtcgtggtgtcgaacgaccgggggaggcgcctcgtgcactactacctccggggagcggccgcgggcggcggaggagggggagaggtgagggagcttgcggtggtggggcgggagcggagcccgcggcacatgtcgtacgtggtgcaggggcggttcctgcggtcgctggcggcggcgggggtgggggtgggggtgggggtgggggcggcggtgggggcggtggtggcagtgccgtcgccgtcacggtcgccgctgccggcttccgcggagggcggggcgccgaggaaatggaggtcgaggcgggaggtcgtggactggctgtcctccctcgtttccggatgtaattacggatcttcttcaatgtctaataggttcaatgaaaatccatatgatgacattgagttcactgatgttgctgcttcaaaggatgtttcacatacatcatcagtaaggaataactcaaaagagttcacatggttaggtcctgcatggctttgcgaaaagcgatggaagcactacagatctttctgccgtaaggggattactatttcggtgcataattttgtctacatcctgagtgaggaaaagaagaggctcatcgcccaagtggaggatctgtatgaagatactaattcaaccaacgttgtcatggtacgatggttcgacaaagttgatgaggttggtgtcgaattgccacctgatgttggtgacagagagattttcttttcccctggtctgcaagatctcagtgttgaatgcattgatggattggctgcagtcctgagtgctcaacacttcgagaagttccagagtagtccaaaacatagctattggcagccttatatttgtcgccgacagattgatgaagatggcgtcaaaccttttgatgtaacccaattgcaaggttattggagtcaagaagtgcttaggacaatgttcaatgcagcttcttctcttaaggtacgtttcaaggtcactaaaggtgcttctagttcagatggggcacaaaagaggaagcgtgatgcattcagtgaaaccgatccacagcagtgtgttccttccgctgcattcggttctgatagtctcaagaatgatttggaacataaaactcaaaagcagctatatcctggtagccgtgctgaagtcctatcacaggacagcggtataaggggctgctggtttagatgctttgtattaaagaggcgcggagacaaaatcaaggtgcgatatgaagatcttcaggatgctgatgagacaggaaatctggaggagtgggttttgctaacaaggattgctaaacctgatcagttgggtatacgcatccctgaaagaccaatggtgcggccatatcatgtacatagcaaggatccatgctctttcgatgctggttccattgttgatgcatggtggaatagtgggtggtgggaggggattgtattgcagcagggaaatgacagacgccttcaagtttattttcctggagaaaagcagattgctgatttttgtgaagatgatttgaggcattcacgtgagtgggctggtggcaaatggaattccttgggggaaagaaaagatatcacacacctgttgccccccacttcagttcatgaagagggaggtttgcttagcaaacctgtttcacaagaaggcaatccctcttcaaaattagaatctgacaagaggtgtgatgacaaatcattgggcaccaagatttcacatgatcagaagcatcagaagcgtgttctggctgatctcacaaatgctctgaaattcgataacctgaaatggaggccaagaaagcggagcagaagatctggttccaaaaggcagtcagacactagcagtggcagtggcagcagcagccagggcgacatggaggagtccagcccctgcggaagttttgcagtgcttaattcagcgcccgatgaagaagtatgcaagagcagtggagaacctcttttcatgagggtttccaacctgacaactttgctctatggttttgccagattcttctaccgttctctcttctccggcgagccggaagccgacgaccggtcgtcgcgcgccgccgccaagtggacagacggtgttcatgagtggcaaggtgattatggtgaattggaagtgcagagggggaatggtgtgttctactgcatgaccgtcaggatgagcatcgactgcaatgggtgctaccagaggatcaggagggcactcctccagatgcaagaagatctggatagccacctgatcgaccggaagcagcagcgggtgagcgtctgcggcgccttcgtgccgcaggacgtcgccatcaagctccgcaagaagaccaaccgccgcgtcgagatactggagatcaaggagatcgacgccggcgacggccaccggctgtga

SEQ ID NO: 11327 - DNA, 968 bp, Oryza sativa
  Clone ID: TFbOSC10018j.C1.o1.fg
atgttgcatctgatgaagttgcaatttgtaacaatgatggcaaagatgctaaacttgctaatatctccacaacaaagggctcttcatcatcaactgctggaaatgattcaggggatttcaaatggttaggtcctgaatcgcattctaaaaaagggaagagctacaaatccttctggcgaaggggatttacattcatggttcacgattttgtttacatcttggtccaacatggcaacaaacttgttgcttatgtggaagaactctatgaggataaccatgcaaacaagatggttcagatacgacggttccgcacactcaactccaccggtattcaactttctccaggtgttaatgatagagagatcctccactccgacaatttgcaagacatcggagttgaatgcatagatggattggcttcagtcctgaacgaagaacactttgagatgtttcaggcaattgccaacaacaccaacaggcaaccctacctatgcatccggcatatcgacaataacagcaatgtcaagacctttgacattgcacaactgcaagggtattcagaacaggagatatttagaatagtctcaggcacacctcccgtgaccgtgcatcccgacgcatctgaaggcagcaagaacacaccaagatcatcagccagaggtcatcatcatcatcggaccatggagaaccccactgctagtgatgagaccaatgttcaggccacaacaatcaatgtccttgcacgcaatgctgcaccaacagagtctgcttctgctctgataaactctgccctggagaagtatcttgagcagtacttctctcatggttgccttgtggaatgcctaagccaggacagtggcattaggggctgttggttcatcggttcagtgattaggaggtgcggagatcgcatcaaggtgaggtaccaacacctccaagatcccgaaacgccaagagcaaacctagag

SEQ ID NO: 11328 - DNA, 2193 bp, Oryza sativa
  Clone ID: TFbOSC900127j.C1.o10.fg
atgggaaacgatggagaaaaggcatcaaaactatgcaaggaggcaggagggcctagcctagattcaaatcttgctccaaccatcgtgctagcgctcaccaccgtccccatggggtgggataaccgtaggaggaaacaagcgagtacgataatgaatgcacgtggccgaggggctaggaatggaaacgggcccaaccgggggcgtgggggtggaagggctcattcagatgtggtggttggagcaaacaccaccgtactagcaacaaggaggtgggttgggttggagatagattccgtgccaggtaatgaggggcaacgtgacattgtgaactactacctccgttgcgccactggcgttggtaatggggagagggagctggcggtggtaggaacacaccatagcaataggagggtgacttatgtggtgcatgagccattcctacagtccctcaaggagctgcaggtggctgcggttgttggagttgaacgactcatgtggaagtcgaggaaggatgtggtgcactggctcaacatgctcatctcagatgttgcatctgatgaagttgcaatttgtaacaatgatggcaaagatgctaaacttgctaatatctccacaacaaagggctcttcatcatcaactgctggaaatgattcaggggatttcaaatggttaggtcctgaatcgcattctaaaaaagggaagagctacaaatccttctggcgaaggggatttacattcatggttcacgattttgtttacatcttggtccaacatggcaacaaacttgttgcttatgtggaagaactctatgaggataaccatgcaaacaagatggttcagatacgacggttccgcacactcaactccaccggtattcaactttctccaggtgttaatgatagagagatcctccactccgacaatttgcaagacatcggagttgaatgcatagatggattggcttcagtcctgaacgaagaacactttgagatgtttcaggcaattgccaacaacaccaacaggcaaccctacctatgcatccggcatatcgacaataacagcaatgtcaagacctttgacattgcacaactgcaagggtattcagaacaggagatatttagaatagtctcaggcacacctcccgtgaccgtgcatcccgacgcatctgaaggcagcaagaacacaccaagatcatcagccagaggtcatcatcatcatcggaccatggagaaccccactgctagtgatgagaccaatgttcaggccacaacaatcaatgtccttgcacgcaatgctgcaccaacagagtctgcttctgctctgataaactctgccctggagaagtatcttgagcagtacttctctcatggttgccttgtggaatgcctaagccaggacagtggcattaggggctgttggttcatcggttcagtgattaggaggtgcggagatcgcatcaaggtgaggtaccaacacctccaagatcccgaaacgccaagagcaaacctagaggaatggttgcttgtgacaagaaccgctaatcctgacacgctacgcatacgcctctctggaagaacaagaattcgtccccacaatatgtcggagagggagaacccctctacgatcagtgttggcaccgtcattgacggatggttgtatgatggttggtgggagggaattgtgctgaaggtgaacgatgcaaggaggctgctagcttacttaccaggggagaagaagatggtgctattccgcaaggatcaactgaggcattcactcgagtggattgataacgagtggaagaattttgctcaccgggaagatatcgcacgtcgaatccctagtgcggaagatcttagaataagagtcattactgcacgagaagttcttacaagagaagaagtaatgaagcaattggaaggcctgaaaacaaacaaaggtggttcaaactctgcaaaaccagctgcagagaagggaagtagcagctctgctactaagaaaaccacacctgatctcattaggcatgcaacaaatgatctaggatctttaaacttcaagcatgtcggtgttcctgcctctgaagaaattagaactgataacaagggatcgcaagttaatcttgaaaatgtcctaaagtcggacagtctaaaatggaccgagcgtaaggctagaggatcttttggtccaagaatgtag

SEQ ID NO: 11329 - DNA, 1674 bp, Oryza sativa
  Clone ID: TFbOSC3380j.C1.o2.fg
atgaaggatggccgggatgaggaagttgccactgatgcggttggtgctggtggagttgatgtgggcggtgagacatcaaaattgattgatcaagactgcatggcaatactcgacgtgctggcgaggaggcttatgagtggtgagtctgaaccttacattggaaagataataaagatatggcagcaaaatcaggctaagaaagtaaagattctttggttttttctcccggatgagattcgaaaacatttaagtggccctgtaatggaaaaggagatatttcttgcttgtggtgaaggcgttggccttgctgatatcaacccactggaagctattggtgggaaatgcactgtgctttgcatttcaaaggatgagaggaatcgtcaaccttcccccagggaactagcaatggctgattatatcttctacaggttttttgatgttaacagttgcacactttctgaacaattacctgagaaaattgcaggggtggaaggaatctttttgcttattccaaaagttgagcaagtgacatcctgttcagaccaggaagtgcatggtgttgatcagaagatgcttaatgtcccagttccccttccccagtcaacggttatggaggatgaaagtccagttgctgcagtttcccttcccccgtcagtattcaaggaggaaaatgtggcttcagccattccctttccccagccagtggtcaaggaggaaagtgcggctgctgccattccccctccccatgtagcactgaaaaaggagagtgtgtccaaatctacagagaacattaccaaacctgcacagaaagttctccctggggagaggccaccaaagagggtcaaattttctgaaaatgttacagtgcaaaatgtgccattagatgttcctgaaagaccaagtcgcactggacctttggaactagcaggtagacaagctgacagaagcaaatggttcaagattccatgggataccagactacgaaatgctgatgagcaagggacacttgtgtacattcaaaatcttgacatacagtttgcagctgctgacatagaggagcttatacgtgatgctttacaactaaattgtatcgctaagcctattaaccacccaacttatgatgatccaaacaatggaaaagcatatgctatattcaaaacaaaaagtgccgcagactctgctatttcaaaaattaattcaggcttggtggtcggtggaagacccctttattgcagcaaaggattgcttaaggttccaaaaccttcagaaactcttctcgggcacttaacaatcaacaatattagaatgggtataagacaacgagaagaacaggtgctgatgttgtcctatgaagtttgctctatttcttttctctgtcttaatatttttgcacaaccattattctttctccagaagaaggcagtttcaacctcgcattgttctcaacccaatacaatggagtatgatttggccttggattggatgcttgtccgagcaaagcaagaaacgaaatttaggacacttcacaagctcctgaatgcagccaccggcctcggtaggttaaaaattgacaccgcaaattctggtgatcgcctggtaggtattgttggtatagctaaagatgatcatgtcttcgttttggatgctcttggtgaaccatatgctggttcttga

SEQ ID NO: 11330 - DNA, 1674 bp, Oryza sativa
  Clone ID: TFbOSC4791j.C1.o11.fg
atgaaggatggccgggatgaggaagttgccactgatgcggttggtgctggtggagttgatgtgggcggtgagacatcaaaattgattgatcaagactgcatggcaatactcgacgtgctggcgaggaggcttatgagtggtgagtctgaaccttacattggaaagataataaagatatggcagcaaaatcaggctaagaaagtaaagattctttggttttttctcccggatgagattcgaaaacatttaagtggccctgtaatggaaaaggagatatttcttgcttgtggtgaaggcgttggccttgctgatatcaacccactggaagctattggtgggaaatgcactgtgctttgcatttcaaaggatgagaggaatcgtcaaccttcccccagggaactagcaatggctgattatatcttctacaggttttttgatgttaacagttgcacactttctgaacaattacctgagaaaattgcaggggtggaaggaaatcttttgcttaattcaaaagttgagcaagtgacatcctgttcagaccaggaagtgcatggtgttgatcagaagatgcttaatgtcccagttccccttccccagtcaacggttatggaggatgaaagtccagttgctgcagtttcccttcccccgtcagtattcaaggaggaaaatgtggcttcagccattccctttccccagccagtggtcaaggaggaaagtgcggctgctgccattccccctccccatgtagcactgaaagaggagagtgtgtccaaatctacagagaacattaccaaacctgcacagaaagttctccctggggagaggccaccaaagagggtcaaattttctgaaaatgttacagtgcaaaatgtgccattagatgttcctgaaagaccaagtcgcactggacctttggaactagcaggtagacaagctgacagaagcaaatggttcaagattccatgggataccagactacgaaatgctgatgagcaggggacacttgtgtacattcaaaatcttgacatacagtttgcagctgctgacatagaggagcttatacgtgatgctttacaactaaattgtatcgctaagcctattaaccacccaacttatgatgatccaaacaatggaaaagcatatgctatattcaaaacaaaaagtgccgcagactctgctatttcaaaaattaattcaggcttggtggtcggtggaagacccctttattgcagcaaaggattgcttaaggttccaaaaccttcagaaactcttctcgggcacttaacaatcaacaatattagaatgggtataagacaacgagaagaacaggtgctgatgttgtcctatgaagtttgctctatttcttttctctgtcttaatatttttgcacaaccattattctttctccagaagaaggcagtttcaacctcgcattgttctcaacccaatacaatggagtatgatttggccttggattggatgcttgtccgagcaaagcaagaaacgaaatttaggacacttcacaagctcctgaatgcagccaccggcctcggtaggttaaaaattgacaccgcaaattctggtgatcgcctggtaggtattgttggtatagctaaagatgatcatgtcttcgttttggatgctcttggtgaaccatatgctggttcttga

SEQ ID NO: 11331 - DNA, 2160 bp, Oryza sativa
  Clone ID: TFbOSC26838j.C1.o4.fg
atggcgcccagctccccgtcctccgccgccgcgcccacgcgtaccttcacgcgtaagcgcgccgcctccgccttcgccttcgccaaggccaccgacgagccctccaccaagcgcacccgcaggcccaaggcggagaccaagcccaggaagaagaaggacgaggtaaaggaggaggagaagccgcccatggaggacgacgcctgcggggaggagccggatgcggaggagatggccttgggggaggaagccgaggccgaagaggcggaggcggagcaaaagcagctggacgcccccgcccccggtgtggcgaggaagcgggtggcgcagcccagcagggtccgacacggcagcgacggcgaccacgacccggagttcgtcggcgaccccttccccgccaaggaggcgcgcgacaagtggccgcagcgctaccagcgcaacgccgccaccaggaggcccgatgaggaggaggacatcaaggcgcgctgccactacagctccgccaaggtcgatggcacgctctactgcctccacgacgacgtctatgtcaaggctgaggaagataaggccgactacatcggtagaattactgagttctttgaggggactgaccactgccactattttacctgccgttggttctttcgggcggaggatacggtcatctcatccataatgatggagaatgctgatgatgaaaagcatgatctcaagcgtgtttttctttctgaagaaaagaatgacaatgtgcttgattgcatcatttcaaaggttaaaatcgtgtatattgatccaaatatggaatcagaagccaaagctcgacggttggctgattgtgatctgtactatgacatgtcgtacaccgttgcttattcaacatttgctaatatcccacttggcaaagttgtctctgattcagaggcatcttcagtgggaaaggctacactccttgatctgtactctggttgtggcggtatgtctactgggctctgtttgggtgcggcacttgctggactcaatcttgaaacgcgatgggctgttgatttcaatagttttgcgtgcgagagtctcaagtataatcatccaagaactgaggtccggaatgaaaaggcggatgagtttcttgctcttcttaagggatggcatagcctttgtgatgaatatgtcaagaaagatattgatttcagttcagctggtgcctcagagaacgaagaggatgatgatgagcctcttgaaaaggatgagtttgttgtggagaaactagctggaatctgctacggtggcagtggtagagaagatggcctctatttcaaggtacaatggaaaggctatggccgtgaagaggacacttgggagcctattgagaacctcagggattgcccattgaaaattaaagaatttgtgcaagaaggatacaggagaaaaatcttgcctcttccgggtgatgttgatgtcatttgtggtgggccaccatgccaaggaataagtggtttcaatcggttcagaaaccgcaaagagccactaaaagacgagaaaaacaaacagatggtgacattcatggatattgtggcatacctgaagcctaagtatgtcctgatggaaaatgttgtagacatactgaagtttgcagatggttaccttggacgttatgccttgagccgtctggtggctatgaagtaccaagcacgacttggaatgatggttgcaggttgttatggcttgccacaatttaggatgcgtgtgttcctctggggagctcttcctaccatggtgctgccaaagtatccgcttcccactcataatgttgttgtccgtggtggtgccccaaatgctttttctgtaaacaaccatcagcctaatgaagtgatggaatatggttcttcccccaaaacagaattccagcgctatatccggcttagccgtaaagaaatgctggatagttcttttgaagggaaggatggtccagatctaggcaagcttttggatcaccagcccttaaagctaaataaggatgaccatgagcgtgtgcagcaaattccagtaaagaagggagccaacttccgggacctgaagggtgtcagggttggggcaaacaacatcgtggagtgggatccagacgttccccgtgtatatttatcttctggcaagcctttggcaccttga

SEQ ID NO: 11332 - DNA, 2529 bp, Oryza sativa
  Clone ID: TFbOSC400269j.C1.o65.gm
atggcgcccagctccccgtcctccgccgccgcgcccacgcgtacctccacgcgtaagcgcgccgcctccgcctccgcctccgccaaggccaccgacgagccctccaccaagcgcacccgcaggcccaaggcggagaccaagcccaggaagaagaaggacgaggtaaaggaggaggagaagccgcccatggaggacgacgcctgcggggaggagccggatgcggaggagatggccttgggggaggaagccgaggccgaggaggcggaggcggagcagaagcagctggacgcccccgcccccggtgtggcgaggaagcgggtggcgcagcccagcagggtccgacacggcagcgacggcgaccacgacccggagttcgtcggcgaccccttccccgccaaggaggcgcgcgacaagtggccgcagcgctaccagcgcaacgccgccaccaggaggcccgatgaggaggaggacatcaaggcgcgctgccactacagctccgccaaggtcgatggcacgctctactgcctccacgacgacgtctatgtcaaggctgaggaagataaggccgactacatcggtagaattactgagttctttgaggggactgaccactgccactattttacctgccgttggttctttcgggcggaggatacggtcatctcatccataatgatggagaatgctgatgatgaaaagcatgatctcaagcgtgtttttctttctgaagaaaagaatgacaatgtgcttgattgcatcatttcaaaggttaaaatcgtgtatattgatccaaatatggaatcagaagccaaagctcgacggttggctgattgtgatctgtactatgacatgtcgtacaccgttgcttattcaacatttgctaatatcccacttgaggcatcttcagtgggaaaggctacactccttgatctgtactctggttgtggcggtatgtctactgggctctgtttgggtgcggcacttgctggactcaatcttgaaacgcgatgggctgttgatttcaatagttttgcgtgcgagagtctcaagtataatcatccaagaactgaggtccggaatgaaaaggcggatgagtttcttgctcttcttaagggatggcatagcctttgtgatgaatatgtcaagaaagatattgatttcagttcagctggtgcctcagagaacgaagaggatgatgatgagcctcttgaaaaggatgagtttgttgtggagaaactagctggaatctgctacggtggcagtggtagagaagatggcctctatttcaaggtacaatggaaaggctatggccgtgaagaggacacttgggagcctattgagaacctcagggattgcccattgaaaattaaagaatttgtgcaagaaggatacaggagaaaaatcttgcctcttccgggtgatgttgatgtcatttgtggtgggccaccatgccaaggaataagtggtttcaatcggttcagaaaccgcaaagagccactaaaagacgagaaaaacaaacagatggtgacattcatggatattgtggcatacctgaagcctaagtatgtcctgatggaaaatgttgtagacatactgaagtttgcagatggttaccttggacgttatgccttgagccgtctggtggctatgaagtaccaagcacgacttggaatgatggttgcaggttgttatggcttgccacaatttaggatgcgtgtgttcctctggggagctcttcctaccatggtgctgccaaagtatccgcttcccactcataatgttgttgtccgtggtggtgccccaaatgctttttctgtaaacaaccatcagcctaatgaagtgatggaatatggttcttcccccaaaacagaattccagcgctatatccggcttagccgtaaagaaatgctggatagttcttttgaagggaaggatggtccagatctaggcaagcttttggatcaccagcccttaaagctaaataaggatgaccatgagcgtgtgcagcaaattccagtaaagaagggagccaacttccgggacctgaagggtgtcagggttggggcaaacaacatcgtggagtgggatccagacgttccccgtgtatatttatcttctggcaagcctttggttcctgactacgcgatgtctttcatcaaagggagatcactgaagccatttgggcgcttgtggtgggatgagacggttcctacagttgtgacccgagcagagccacacaaccaggcgagagttctgaccgtaagggagaatgcaaggttgcaggggttcccagactactacaagatgtttggccctatcaaagagaagtatatacaagttggcaatgcagttgctgtacctgttgctcgtgcattgggttactcccttgggcttgcataccagcgtgagtcggaggggagcagccctctgttcgtcctgccagacagcttcacggaagtcgggcgacaggcggcgccggcaagagcatcctctgttggtatccctgttggcgaggttgttgagcaatag

SEQ ID NO: 11333 - DNA, 684 bp, Oryza sativa
  Clone ID: TFbOSC402051j.C1.o12.fg
atggccaagaccaagcagggcaagcgggacgtcgactcctacaccatctccggcaccaacaaggtcgtacgagtgggggactgcgtgctgatgcggccggtggactcggacaaccagccgtacgtggcgcgggtggagaagatggagctggacgggcgcgggagcgtgcgggtgcgggtgcggtggtactaccggcccgaggagtccaagggcgggaggaggcagttccatggcgccaaggagctcttcctctccgaccacttcgacatgcagagcgccaacaccatcgagggcaagtgcgtcgtccactccttcaagaactacaccaagctcgacaacgtcggccccgaggacttcttctgccgcttcgagtacaaggccgccaccggcgccttcacccccgaccgcgtcgccgtatactgcaagtgtgagatgccatacaacccggatgatctcatggtgcagtgcgatgactgcaaggactggtttcatccttcatgcatgagcatgacgattgagcaggccaaaaaactagatcactttgtgtgctcagattgtgtcaaggaaaacggtgcaaagagaccttcacatgcatatgcaggttcaacaaagtatgagcctaagtggattcaaggttttagcttgtcaactggtatcagcctactattatttccttttctttga

SEQ ID NO: 11334 - DNA, 1878 bp, Oryza sativa
  Clone ID: TFbOSC400543j.C1.o17.fg
atggggcggcggcggcgattcgcgcagctcgccaccaccagcgacgacgacgacgacgacgcccccgccgccgacgcgccgcccaaggcgaagcccccgccgccgccctcctcctcctcaggccccaagaagccgaagcagcgccgcctttcctccgcggcggccgacgacgacgacgacgtcgaggaggacgacctggagctcgaggaggaggaggaggacgagaaggatctggaggagatgcggaggaacgaggaggaggagcggcgggaggagacgcagacccgccgccgccgccgccgccggggccgcaagcccaagcgccccgccgaggagagcgaggaggacgaggaggaggaggaggaggaggccaaggcggaggaggcccgcgaggaggagaacaccgaggcggtccccatcggggagcccgtcaagatcaccggcagggggaagaagcagcgcaagcattacacctccttcgagtacgagggcaacaccttcgagctcgaggacccggtgctgctcacgcctgaggatagcaaggagaaaccttatgtcgccatcctcaaggatataacagaaactgagggaagcttatcagtaactggtcagtggttttatagaccagaagaggctgacaaaaagggtgggggaagctggaaagcaagtgacacgagggagttattttatagtttccatattgatgatgtgccagcagagtcagttatgcacaagtgtgtagtccatttcattcctcaacataagaaaattcccagccggaaggaacaccctggattcattgtccaaaaggtctatgacacagttgcgaagaaactttggaacctaacagacaaagattatgaggataacaagcaacatgagattgatcttctcgttaagaaaacaatagaccgtattggacagctttctgatattgaacctgcagatgctcctggtgacaacaatgatcagctctcaaacaagcgaggactgcggaagagacctgtgcttcctatagatgtttcaagagatgatgctttagcaggcaaatcagagcaatttggaaaagcagagacacctggaagtgataagctaaagaattatgccacccttgtcaagtataaagctgttactggtgatcaatatcgtgataggtggcttgataaattagtggatactattccactaacatcaaaggaaagtgctggggcttctcatgctgatcctggtggtgctaccaaaagttcaactaatggttcatctgcaaaggaagacaatgaaaaatcttattcacctgatgtgattgtttcaataatggcctccttagaaagatctacttatgaagctcttggttctgacttccagaagtataaccagaaattgagacagttactgttcaacatcaagaatagccctgtactacggaaccggctgatgaacaaggagcttgatcctccagtcctgttaacaatgtctcctgacgaactaaaggttggcttgacagcagcagagagaacatctgaacctgaagaatcaaggaagttgcagatgactgatgcacgatgtgtaagatgtgcagaaaaggaagtaggtgtatctgatattattcatgctggtcatggagatcgctatcagaaggtggtggcatctagaagagagaacgaggtcgttaacgtaggtggcgataggaccttgaggctagcgaggctagtggccagcggcaagatcttaagggtgtgtgacgtgctgaaggaaagttttcaacggtggagatggcctaggatgtcattgatagatcttgtaggacaacacaggatggagtgggaggtcgttgctagtggcttagatgtccgagtggagcttgtgagggcatggtag

SEQ ID NO: 11335 - DNA, 177 bp, Oryza sativa
  Clone ID: TFbOSC27144j.C1.o1.fg
atggccaagaccaagcagggcaagaaggacgtcgaatcctacaccatcaagggcaccaccaagatcgtccgagtgggggattgcgtgctgatgcgggcgtcggacacggagaaggcgccgtacgtggggagggtggagaggctggagacggacgggagggggagcgtgcgggtgcgg

SEQ ID NO: 11336 - DNA, 2535 bp, Oryza sativa
  Clone ID: TFbOSC400897j.C1.o16.fg
atggatctctccgccaccccgtccagatccaaatccggcctcagatcctccccgaggaagcccgtcgccgcccccgccgtggcccagatggacctctccaccccgtccaagccgacccccaggcggaagcccaaggcgccgccggtggcggctccgatgtcccccgtgaccccgtcctccgtccgccgctcctcccgcctcctcgagacgccgaccaaggtaacttccgagacccccgtgaagcccaccccaaccccgaagcggaagcgcgccgcgccgtcgccgtcgccgaagacgccgacccagtccgagcccaagcggcagcggcagaggcagaggcagaggcagcagccgaagaagccgaagaagagggcgtactaccggaaggtggtgtacgacggcggggagttcgccgccggggacgacgtgtacgtgaagcggcgggatggcgcggagtccgacgcggaggacccggaggcggaggagtgccgcgtgtgcttccgcgccggcgccgcggtgatggtggagtgcgacgtgtgcctcggcgggttccacctgcggtgcgtgcgcccgccgctgcggcgcgtgccggagggggactgggcgtgcccctactgcgaggccgagcgcgcggggaaggccatcgagaggcccaagccgccggaggggaagcgcatcgtgaggaccgccaaagagaagcttctctccagtgatttgtgggctgcacgaatcgagagtttatggagggagccagatggaatattctgggcaaaggtaagatggtatattatccctgaagagactgcagcaggaaggcagccacataatttgcgtagggagctgtaccgcaccaatgatcttgcagacattgagatggaaacaattcttagacattgttatgtcatgagccccaaagaatttaaggatgctagtgatcaaggagatgacgtattctactgtgaatatgaatatgacatacactggcataattttaagcgtctggcagacatcgatgatgaacctgagacaaaggaagatcctggcgacgagccatacaatgctggtaatgattatgtcagtgactcggatgaagattctgaatatgatgaggaggaagaacctactaaatgtagttctgctagaacacatcaatcacatgcgttggctgcgaatctgcggaaagggaggacatatggcctacaaaaaattgggatccgtaaaattcctgaacatgtccggtgtcatcaaaagaccaatctggagaaggcaaaagcaaccctgttattggcaactcttcctaagtcgttaccttgtagggataaagaaatggaggagatatctgcatttgtgaaggatgcaatttgcaatgatcaatgtctaggacgctgcctttatattcatggtgtaccaggcactggcaagactatgagtgtacttgcagttatgaggaggctaagatccgagcttgattctgggaatctgaggccttattctttcatagagattaatggtcttaaattagcttctccagagaatatctacaaggttatatatgaacagttgagtgggcatagggtagggtggaaaaaagcccttcattatttaaccgagcacttttcaggtggcactaaaattggcaaacaagcaaaccagccaattattttgctcatcgatgagcttgatcttcttttgacgagaaatcagtcggtgctgtataacattcttgactggcccaccaggccaaattcaaacctagttgtcataggtatagcgaacacaatggatcttcctgaaaagttattgcctcgtatttcaagtcggatgggtatccaacgactgtgttttggcccatataattatcggcaactgcaggagatcattacaagccgtctaaagggcattgatgcctttgaagaccaagctattgaatttgcttctagaaaggtagctgctatgtctggtgatgcaaggcgagccttagaaatatgtagacgtgcagcagagtttgcagattaccgcgttaaacaatctgggcacacttctgtgaatagaggaaaaaatgttgtttgcatgggtgacatagaagctgctattcaggaagtctttcaggcaccacatattcaagtaatgaagaactgcccaaaatttggaaagattatattggtcgctatggttcatgaattatacagaagtgggctaggtgaagtgatgttcgataagctggcagcaactgtcctctcttggtgccatgtcaacagagaattattgcctggctatgatactcttctgaaaatctgttgcaagcttggtgaaggtaagataattctctgcgaggaaggcactaagcacaagttgcagaagcttcagcttaactatccaaggaatccccagatattccatggttgtccaagtacctgtgaagtttacacttgcagcggttgtactttcccagcatttcattcatctactcctggagttggagagcaacgatcgcaactacttgcccttgatcagcaaagtttgaaggccatctag

SEQ ID NO: 11337 - DNA, 711 bp, Oryza sativa
  Clone ID: TFbOSC101747j.C1.o25.fg
atggcgaagtcgcggccgcccaagcggatcctcgagtcctacaccatcaagggctccgacaaagtcatcaagcgtgaggctccccctcccacctccccaaccgattatgggagttcagtctctggggactgtgtgctaatgagggcatctgatacatcaaagccaccctatgtggcaagagttgaggctattgaggctgcagggtcacgaggcacaaatgtgagagtacgggtgcggtggtactatcggccagaggagtccatgggtggaaggcgtccatttcatggtgccaaagaggtgttcctctcggatcactatgacgtacagagtgctgacaccatagagggaaagtgcaacgttcacagcttccgtagctacacaaagcttgattctgtcaatgctgaggacttcttctgtcgctttgagtacaaatcagccacaggaagcttcgtgcccgaccgcattgctgtgttctgcaagtgtgagatgccatacaatcctgatgaccttatgatccaatgtgaggaatgctctgattggtttcacccttcttgcattggaatgactattaaagatgcaaaaaaactagagcattttttctgccagagctgtactgcggaaaatggaaagatggctgagaattctcatgaagctacagcgcaatccgaagaaaaggtaagttttgatgtgatggaaaagttgaaagtttaa

SEQ ID NO: 11338 - DNA, 747 bp, Oryza sativa
  unsure (1)..(747): unsure at all n locations
  Clone ID: TFbOSC16028j.C1.o4.fg
atggcgaagtcgcggccgcccaagcggatcctcgagtcctacaccatcaagggctccgacaaagtcatcaagcattatgggagttcagtctctggggactgtgtgctaatgagggcatctgatacatcaaagccaccctatgtggcaagagttgaggctattgaggctgcagggtcacgaggcacaaatgtgagagtacgggtgcggtggtactatcggccagaggagtccatgggtggaaggcgtccatttcatggtgccaaagaggtgttcctctcggatcactatgacgtacagagtgctgacaccatagagggaaagtgcaacgttcacagcttccgtagctacacaaagcttgattctgtcaatgctgaggacttcttctgtcgctttgagtacaaatcagccacaggaagcttcgtgcccgaccgcattgctgtgttctgcaagtgtgagatgccatacaatcctgatgaccttatgatccaatgtgaggaatgctctgattggtttcacccttcttgcattggaatgactattaaagatgcaaaaaaactagagcattttttctgccagagctgtactgcggaaaatggaaagatggctgagaattctcatgaagctacagcgcaatccgaagaaaagttgacaaatttccaatacttaatgacacaaagcaccagttgggaaacagtaccaatttattcatatggcagtanaaagtctggtgtgattttacaactataa

SEQ ID NO: 11339 - DNA, 681 bp, Oryza sativa
  Clone ID: TFbOSC423524j.C1.o14.fg
atggcgaagtcgcggccgcccaagcggatcctcgagtcctacaccatcaagggctccgacaaagtcatcaagcattatgggagttcagtctctggggactgtgtgctaatgagggcatctgatacatcaaagccaccctatgtggcaagagttgaggctattgaggctgcagggtcacgaggcacaaatgtgagagtacgggtgcggtggtactatcggccagaggagtccatgggtggaaggcgtccatttcatggtgccaaagaggtgttcctctcggatcactatgacgtacagagtgctgacaccatagagggaaagtgcaacgttcacagcttccgtagctacacaaagcttgattctgtcaatgctgaggacttcttctgtcgctttgagtacaaatcagccacaggaagcttcgtgcccgaccgcattgctgtgttctgcaagtgtgagatgccatacaatcctgatgaccttatgatccaatgtgaggaatgctctgattggtttcacccttcttgcattggaatgactattaaagatgcaaaaaaactagagcattttttctgccagagctgtactgcggaaaatggaaagatggctgagaattctcatgaagctacagcgcaatccgaagaaaaggtaagttttgatgtgatggaaaagttgaaagtttaa

SEQ ID NO: 11340 - DNA, 4224 bp, Oryza sativa
  Clone ID: TFbOSC101037j.C1.o10.fg
atggaagcttcagtttctcaaatccgccgctctcctcctcgaatcgaaaaaagaaaaaagaaaaaccacaattctctttcgggcaaagcccccccgactcgtggcaactgcgactccctccctcccgtgtggaacgcgaagtcagcaagtgaatgccactggacacgccgattgacttccaactacctttcgctggtggtggtggtggttggggaggaattgcccccgtgctttgctcctcctcccatggagaccccgccccccgaccccgtctcgcctccgccgcccgccgccgacgagggctcgccgggaggcgacgacggggcggaggacgcgggggggttcagcgccgggctggattcgctgtggacggccctgttcggctccccggaggagctggagcccatgtggtccccgccgagggggttcggcgtgggggccgagttcgccgcggcggaggtggagcccgagatcatggacgtcgcggggggcccatgggacggcgcgccctggaggtcctccggggtcgtcgccggcgagggcgcggccaccgcgctcgttccccccacggccgccgcggggttcgcggagttcgagcccgcggcgccgatcgattcgtatccggcgggggcggcggcggcttcgttgggcgacgttcctgaggtgagtgcgctcgattccggcgttgattgttcgcctgacccgccgccatcgtcgtctcctccggtggattttgatgcgcgggggtttgaccccgtcgccgactccgccccggcgatggagtctccactaccgccgtctgtcgcttcctcggaagccaatttagacgggagaatgctcgattgtacgctcaactccgtgccatcgccacctcttgcttccccatatgaggtcggtttgggggctgaggatcctatcaaggattcttccccttcggttgcttggggaacaaccatggatgcgaaggatcccgaggtggatgctacttgtgcaaatggtacagctctgcggagatcacggaggatcatgaaaatcaagtcagcggcgagctccatgcctttgaatcagaatggagactcatctagagcttccaagcgacgagttgcggattcaaggaagagtagaagcagtgaagggagcaaactccctgcgttcacagggccaatttcagtaaacacagttgatttgattaacggggtgaaggttcaaggattgcaagaaattgttgccgtggaaaacgtaagttcctcttacgacaataatcagaaagcaggtggtctctacaatcaggttgtggtggctttaccagcagcgagtaatagtttgttgaaagacaaaggagcttctgttcttcctcgaaggaagactaggttagcctcaaaggtattggtgaattcagacagggtgtcagctatatcaccagtggtaaatggtggacctcctgtgcagaaatcagatgtttgtatacctactaaaaagcataagcttgctgttgaagagtgcttgacaagtctggatggagtggatggtggtggtattgtgttgtgcaactcaaagttgaaaagtgcaaaatcacgagtggtcagcaagacgcctcaagggagaggaagaagatcccctcaacctccaaagacacagagggccaggacgttgtcggttaaatacttggaaaaattaaagagggcagaaaacaataataataatggctcaatgtccaaatcaccaagagttccaatgataccagaaaataatggctcaatgtccaaatcaccaagagttccaataataccagaactgagcactaagcacgaacttgttttggacaagcacatggttgattcagtgatgttggaaacggacgatggttcctgtttctttgtgggggatgcagttcctgatgatgaggctaggaagcagtggcctcaccgttacgaaataaatgatcaaatcatgaaaaaggataagaggaccagcagccaaacatttgccaaactagttaccgtatctttttgtgtagtctttatgtatgtttatctacagatgcttgatttcaggggtccagagggaaaaccaaattatattggcaggttgctagagttcttcgaaacaaaaactggtgaatgttacttcagagtgcaatggtttttcacagctgaagacacggtcataggagagcaagcacaatcacatgacccgaggaggctcttttactcagacctgacagatgacaatttactggactgcattgtctcgaaagtgacaatcgtgcaagttcctcctagtgtagatggaaaatcaaagtcagttccttcgtccgactattactatgacatgaaatactctatcgactatagtacattctctaccatagaaatggaagacacagatgatttaatgcagtcatgttacactagtagaatcaatgacaaaatgaagaagatagatgtcaataagaagcacaagtctcctgtgctagagaagatggagctctctttgctagacctgtattgtggttgtggaggaatgtcaactggactatgccttggtgctcgtggtggtggtgtgaatctttcagcgagatgggccattgatgatgatgaaattgcatgtgaaagcttcaggaacaatcatccagaaacacgggttcggaatgaaaccacggatgatttccttgaactgttaaaagaatgggagaaattatgcaaaacatatgtgaaacatagtaggactaaggcatgtgttgacagtacaacagaatccaataatgaaactccagattgttctaccgtcccacctgaggagtttgaagtatggaagctagttgacatttgctttggtgatccaaataaagtcagcaaacacggcttgtattttaaggtccgttggaagggttatggccctcatcatgacacatgggagccagttgaaggattaaggaactgcaaagaggcaattagggattttgttattgaaggccacaggcaaagaatactaccacgccctcgaagaaacatagctgtgttcttgcttcgaccatcgaagttccctctgggtgatgtggacgttgtatgtgggggtccaccatgccaaggaattagtggctacaaccgcaatagagaattcgaggcaccatttaaatgtgagaaaaacaagcagatcatagtttttatggatgttgtgcaatttttgaagcccaaatatgtgtacatggaaaacgtccttgatatattgaaatttgctgatgcaacacttgcaagatatgctttaagtcggctagttgcaatgcattatcaagcaaggctagggatcatggctgctggatgttatggccttccacaatttcggatgcgtgtatttttattaggctgtcattctaaggagaaattacccccttttccactgcctacgcatgaggcgattgtgaagaatggctgcccgttggcttttgagcgtaatttggttggttggcccaatgacacaccaatgcaactagcaagaccaattgtccttgaagacattctttctgatctcccagaagtggcaaatggggaaagccgtgatgaaatgctgtatgtaaagggtcctcaaactgaattccaaagatacattcggtcatttaatgttgaagtgcatggtcccagagctcatgttacaaaagattccaaatcctcaaaattgtatgatcatcgaccattggtactggataatgataactaccaaaggatattgcaaattcccaagagaaagggagctaattttagagacctttcaggagtcatagttggtcctgacaatgtggctagattagatccaacgaaagaaagagtacttttgccatctggtcgtcctctggtgcttgattgcatactagcttatgagaatggtaaatctttaagaccttttggtcgagtatggtgggatgaggtagtgggaaccgtgctgacagttccaaatgcccgtatgcaggccttgatacatcctgcacaagacagactgcttactattcgtgaaagtgctcggttgcaaggctttcctgacaattacaggtttcgtggaacagtcaaagacaggtatcgccagattggaaatgcggtggccgtacctgttggacgagcacttggatacgccctggcgatggcctacctgaagaagtctggagacgatccccttatgttgctgccgcccaactttgcattctcccatgacttaagagggtttgcctag

SEQ ID NO: 11341 - DNA, 783 bp, Oryza sativa
  Clone ID: TFbOSC419703j.C1.o6.fg
atggccaagacgcggcagccgcagaagcgggtgctggagtcgttcaccatcaaggggcccgacggggtcatcaagcgtgaggacccctttcttgatccttttatctatttatctaggtttttgttgttttgggggaaattttggatcgtagaatcaagatactacctaagatttcgtagcatcgtggaaatgaatactggggatactgtgctaatgatggcacctgactcatcaaagaaaccatatgtggcaagggttgaggaaattgaggcaacaggacctcaagcctctcaagtgaagatcaaggtgcggtggtactaccgcccagaagagtccattggtggccggcggccattccatggttcgaaggaagtatttctttctgaccactatgattcgcagagtgctgacaccatagagggcaagtgttatgtccacacctttcgagattacaccaagcttcgatctgtcagcgctgaggacttcttttgccgctttgagtacaaatctgccacaggcagctttgtgcctgaccgtatagctgtgttttgcaaatgtgagatgccatacaatcctgataaccttatgatccaatgtgaggattgctctgactggtttcatccttcctgtgttgaaataaccatcaaagaagcgaagaaactagagcatttttactgtaaaagctgtattgctgaaaatggaaaggatctacaaaagtccaatggtgctactgtgcaatctgaagaaaagggttttcgtttttacccctacttttttaaatga

SEQ ID NO: 11342 - DNA, 4635 bp, Oryza sativa
  Clone ID: TFbOSC101706j.C1.o3.fg
atgacaggaaagaaaaggtgcagagcaaagccacaaaagaaggacgaagatacaactgataaaggcaaactggatgagggacctctggatgctacaaaagagatgaatggagttggaaagggtgatagtcgtgctgcctgcaagaggccaaggagagcagcagcgtgctctgatttcaaagagaaatctgtacgcttatctgataaatcctctgtggtcgcgaccaatggaaataagatggaagaggaggaaatggatgccgtaaagctgacaaaattaggaccagaagttcagcgaccttgtcggaaattgattgatttcatcttgcatgatgctgatgggaaactacagccctttgaaatgtcagaaattgatgattttttcatcacagctcttatcatgcccatggatgatgatttggaaaaagatcgtcaaaaaggagtgcgctgtgaaggatttgggcgaattgaggactgggcaatatctggttatgatgaaggtactgcagtagtctgggtctcaacagaagttgctgactacgaatgtgtgaagccagcaggcaattacaaatcttactatgaccacttctatgagaaggcacaggtctgtgttgaagtttacagaaaacttgcaagatcagttggtgggaatcctaatctaggtctggaagaattgcttgctagtgttgttcgctctattaatgctatcaaaggttatagtggtacactgagcaaagactttgtgatctccaatggtgagtttgtatacaaccagcttattggattggatgagacagcaaacactgatgatgagaagtttgcgacactaccagttcttcttgctctaagagatgggtgcaaatctagagtggaagtaagcaagctgcagcctaacatttcaaatggaagcctgaagattaatgatgcagagtgtaaagaggtatctgaagatgatgatgagaagttagcaagattgttgcaacaagaagaggaatggaagatgatgaaacagagaggtaaacgtggaacaacttcccagaaaaatgtctacatcaaaattagtgaagctgagattgccaatgactatcctctgcctgcatactataaaccctctagtcaagaaatggatgagtacatatttgacagtgaagatagcttctattctgatgtgccagtaaggatcctcaacaactgggctttatacaatgcagactccaggcttattcctttggaactaatccccatgaaagcaggcgctgaaaatgatatagttgtctttggatctggttttatgagagaggatgatggaagttgctgttctactgctgaatctgcaaaattgtcttcatcaagtagttctaaccaccaggatgcaggcgtttcaatttatctgagccctatcaaggagtgggttatagaatttggtggatcaatgatttgcataaccattcgaactgatgtggcctggtataagctacggcaacctacaaagcaatatgctccttggtgtgagcctgtcttgaaaacagccaggctctctgttagcatcataactctactaaaagagcaaagtcgtgcttcaaagctttcctttgctgatgtcatcaagaaagtggctgaatttgataaagggagtcctgcatttgtatcatctaatgttgcactggtcgagagatatattgtggtccatggacagattattcttcagcagttctcagattttccagatgagactatccggcggagtgcatttgctactggtcttttgatgaagatggagcaaagaaggcatacaaagttggtcatgaagaaaaaggttcaagtgatgagaggagagaatctgaacccaagtgcaactatggggccagcatcaagaagaaaagtgatgcgtgcaacaacaaccaggttgattaacaggatatggagtgattactatacacaccatttccctgaagattccaaggatgcagatgtgaatgaagctaaagaaattgatgatgaactggaagaaaatgaagatgaggatgctgaagaggaagcacagattgaggaggaaaatgtctcaaaaactccaccatcaacacggtctcgaaagttggtatcacaaacatgcaaagaaattagatgggaaggtgaagccattggtaaaacaccttctggagaagctctatacaaatgtgcttatgttcgagagctcagaataaatttgggacggacagttgcactagaagatgattcaggagaactggtcatgtgctttgttgagtacatgtttcagaaacttaatggagcaaaaatggttcatggaaggctacttcagaaaggttcagagactgttcttggcaatgctgcaaatgaaagggatcttttcttaaccaatgaatgtttagaatttgagttagaagatatcaaagaattgatgtctgtcaatctccaatcattgccctggggtcacaagtatagaaaagagaatgctgaagctgacaggattgagcgtgccaaagctgaagataggaagaagaaaggtttgccaatggaatatttatgcaaaagcttgtactggcctgagaagggtgcatttttctcccttcctcatgataagctgggccttggtaatggtttctgtagctcttgtcagcagaaagagccagattgtgatgaattgcaaatactatccaagaacagcttcatttacagaaacattacctacaatgtcaatgactatttgtatattagacctgactttttctctcaagaggaggatcgtgcaaccttcaagggagggcgaaatgtgggtctaaagccctatgtagtttgccatctattggatgtccatgaacctgctggatccagaaaaattcatccagcatcaacaaaaatcagtgttagaagattttacagaccagatgacatttcatcagccaaagcttatgtttctgacattagagagatatttctccttacattggctttgatactttttctggatcaggtatactatagtgaaaatatagttaaagtgcctgtggatatgatagagggaaaatgtgaggtcaaaaagaagatcgacatctcaaactcagatgttccagtgatggttgaacatgaatttttctgtgaacatttctatgatcctgccactggagcattaaagcagttgcctccaaatgttaagctcatgtctgtgcaacaaaaggcaactggcgctttgaaaaagaacaaaggaaagcagatctgtgaaagtgatcaggtggattcagataaatgtacaaaggtgtccaaagagaaccgtcttgcaactcttgacatttttgctggctgtggaggtttatcagaaggactgcagcaagctggtgtatcgtttacaaagtgggcgattgaatatgaggaaccagctggtgaagcatttaccaaaaatcatccagaagctgcggtgtttgtggataactgcaatgtgattttgaaggcaattatggacaaatgtggagatgctgatgattgcatttcaacttctgaggctgctgaacaagcagctaaattttctcaggacaatattatgaaccttcctgtccctggtgaagtagaattcataaatggtggtcctccatgtcagggcttttctgggatgaacagatttaaccaaagcccatggagtaaagttcaatgtgagatgattttagcattcctgtcttttgctgaatatttccgccccagattctttcttttagaaaatgttaggaactttgtttcattcaacaaaggacagacatttcgactgacagttgcatcccttctggagatgggataccaggtccggtttggaattttagaggcagggacttttggtgttgctcagtccaggaaaagagcattcatttgggctgctgcacctggagagactctgcctgattggccagaaccaatgcatgtgtttgctagccctgagctgaaaataaatttgcctgatggtaaatactatgcagctgcaaaaagcactgctggtggtgctcctttccgtgcaataacagttagagatacaataggcgatttaccaaaggtggagaatggcgccagtaaactcctacttgagtacggtggcgaacccatctcctggttccagaagaagattagagggaacacgatcgcgctgaatgatcacatatctaaggagatgaatgaactgaacctcatcagatgccaacgcattccaaagcggcctggttgtgattggcatgacctaccagatgagaagcggaatgttaaccattatgagcgtgtgcaggtgaaactatcatctggccaactggtggacctgatcccttggtgcctgcctaacacagctaaaaggcacaaccagtggaaagggctttatggtaggctggattgggagggcaatttccctacttctgtgacagacccccagccaatgggcaaggttggcatgtgcttccaccctgaccaggataggatcatcacagtccgtgaatgtgcgcgatctcagggctttcctgacaactaccagttcgcgggcaacatccagagcaagcacaggcagattggcaatgcggtgcctccacctcttgccttcgccctcgggaggaaactgaaggaagctgttgatgcaaagcgtcagtag

SEQ ID NO: 11343 - DNA, 5586 bp, Oryza sativa
  Clone ID: TFbOSC419704j.C1.o1.fg
atggtgaggcgggcgagcgtggcggcgtgcctgacctgcccgctctgcggccgcctcctccgcgacgccaccaccatctccgagtgcctccacacctcttatggtattttcaattgtgttttgttcagagttgatcacagtatgcaattcgtaaggtcaaggatatttcctttcaaacgaaggaaggttgagaacccagaaatcatttgtccagttgcgtcacctgtcaagaggaaagaaagatcactatcttcacttacaatccctgctcctcaggtgtctatacagaaatgtttgacaaagaggagaacgaaagcttcgtgcttacgcaactttcctttgcattctacctcgaggggcagtaaagatacatcaaagaaacttgggggttggagaccattgggttgtcaacttaagcttggcaaagacaaaaaatctctcaaatcaagtgtaaaagatacaaacagaaccaaaagtaagtctggtgatacagatgatggtgctcctgctagtaaagcaaaggctagagaaccctttacaagatatgggcgtgcagctaagaggactggaagaaagaaattgctcatgttgaagaacaaaaagaaaaggttcaaggcaaagcagcccagtaaaaagaggagattccgagcactatggttttatctacttgctgcttttgaccagagaggagtaccaactttaccacaactaccagcaaagtatttgaggatcaaggatgttgatttgcctgcttctattatacagaagtaccttgcacagaaacttaacctctcaagtgaaactgaggtagaagtgttgtgtggtggcaaagtagtgaaccaagggatgacactgcatgatctagcagattgctggcttgagaaaggaccaaagagccgaatgcgctcatcgttttgtctctgccttggttgcttgtgggggttcgtcgctgatcgtggtgtcgtggggagagctgatcgcggtcgcgtgatgcggggagctatggcgaaaagtccacgttctgttgttaccacaggaacaaaaaggcgtagagcaaaggttcataaagaagatgagcctgttgagaatgaaaacttggagagtgaatttgatgtttccaagaaagagagcaatggtgccactgaacctggtaatgagcctgttgccagcaagagaccgaagagagcagctgcctgttctaacttcaaagagaagtcattggacttatcagaaaaagattcaattatcacaatcaaggaaagtcgggttgaagagaaggaaatagaggctgttaatttgacaaggacgggacctgaagatggtcaaccttgcagaaaaatcatcgatttcatcttacatgatggagatggtaatctgcaaccctttgaaatgtctgaagttgatgacattttcataacagctcttatcatgcccttggatgatgatctggaaaaggataggggaaagggaatatgttgttcggggtttggacgaattgaaaactgggcgatttctggctatgatgaaggtgctgcagtaatttgggtctcaacagaaacatcagattacaaatgtgtgaagccagcaagcagttacagatcttattttgaacactttagtgagaaggcacgtgtctgtgttgaagtctataagaagttagctagatcagttggtggaaatcctcaggtggacttagaagaattaattgctggtgttgtccgttccattaattcaaacagaagcttcaacggaacagtaaccaaagactttgtgatctcctctggtgagttcatatataaacagcttattggattagaccatacagctggcaatgatgatgagatgttggccacactgccagttcttgttgcactgaaagatgaatgtaaatcaagagcaggattcacacatttgccagctatgccctcgaatggaactctgaggattaaggatgggcaagacaagggactgactgaggatgaggatgcaaaattagcaagactgttgcaggaagaggaagaatggaaaatgatgaagcagagaggcaagcgtggaacttcacagaaaaatatctacatcaagatttgtgaaactgaaattgccaacgactacccacttccagcctactataaaccatataaccaagaaatggatgagtacatatttgatagtgatattggtatgtattctgatgatgtacctgtaagaatccttgacaactgggctctatacaattcagattccagactcatttctttggagctcatccctatgaaagctggtgcagaaaatgatattgtggtatttggatctggttttatgagagaggatgatggtagttgctgttcaacagctgagctagcacagttacattcttcctcaagtaaatctggccgggaagatccaggagttccaatttatttgagcccaattaaagagtgggttgtagaatttggtggttcaatgatctgcataaccattcgaactgacgttgcttggtacaaattacgccagccaacaaagcaatatgctccatggtgtgagcctgtgctgaaaacagcaaggctagctgttagtatcatcacccttttaaaagagcaaagtcgcgcttcaaagctttcttttgctgaagttatcaagaaagtagcagaatttgacagtagacaccctgcatttatatcatcgaaagcaccaaccgttgaaagatatgtcgtggtgcatggacagataatacttcagcagtttgcagactttccagatgaatctgtcaaacggtgtgccttcatcacaggtcttctagcaaagatggaggaaagtaggcacacaaagttggccatcaagaaaaaatctcaacagatgagaggggagaatctgaacccaagcgcaaaaatgggtccaatactgagaaagaagcttatgcgtgctacaactacaatgttgatcagcaagatatggggtgaatactatgccacttatttccctggggatacaaaggaagaagatcagaatgaaccaaaggaaattgatgatgatcaagaagaaaatgaagacaatgatgctgaagaggaggtaaatgttcaagatgagaaggccacaaggactccaccatcaacacggtctagaaagtcgtcagcagatactcgcaaggaaatcaaatgggaaggtcaaacagctggaaaaacagtgtctggagaagttctgtacaaatgtgttattgttcaagacctcagtatttctgttggtgcgacagtcacaacagaggatgattcaggagaaaccatcatgtgttttgttgagtatatgtatgagaaacttgatggtaaaaatatgattcatgggataattctgcaagaaggttcacagactgttcttggcaatgctgcaaatgatagagaggttttcttgactaatgactgtttagaatttgaagcaagtgacatcaaagagttggtgactgttaatatccaatcactgccttggggccacaagtacagaaaagagaattctgaagctaagagaattgaaaaggccaaggcagaggagaggaaaaggaagggcctgccagtggaatatatttgcaaaagcttatactggcctgagaaaggtggattcttctcccttccgtatgataaaattggaaatggcacaggcatctgtagctcctgtgagagaaaaccagttggcaatgaattcaagttactttctgagagcagctttgtctttgagaatattacgtataacatccatgactttctgtatatcaggcctgaatttttctcccaaggggagggccatgagacctacaaggctggaaggaatgtgggtctaaaaccttatgcagtctgccatctgctgagtgttcatggtcctgctggatcaaggaaagctaatccagaatcgacaaaagtgaaagtaagaaggttttaccgacctgatgacatttcatcaacaaaagcctactcatcagacatccgagaggtgtactacagtgaagatataataagtgtacctgtggtgatgatagagggaaaatgtgaggttcgactgaaggatgaccttccaaattcagatcttccagcggtggttgaacatgtcttttgttgtgaatatttatatgatcctgctaatggagctctcaaacagctaccgcccaatgttagacttgtgacactgacaaggaaggtacctgcttcaaaaaagaacaaaggaaagcaaatttgtgacattgagctaggtggttcagacaaaccaaaggatgggcaatcagagaactgtcttgcaacacttgacatttttgctggttgtggaggtttatctgaaggattgcagcgatcaggattgtcacttactaaatgggctattgaatatgaagaacctgctggggatgcatttggtgaaaaccatccagaagctgcagtatttgtcgaaaactgcaatgtgattctgaaggcaattatggacaagtgtggtgattctgatgattgcatctccacttctgaggctgctgaacgagcagctaaactttctgaggacaagattaagaatctgcccgtgcctggcgaagtagaattcataaatggtggccctccgtgtcagggtttttctgggatgaacagattcaatcaaagtccctggagcaaagtccagtgcgagatgatcttagcattcctgtcatttgcggagtatttccgtcctagattctttctcttagaaaatgttaggaactttgtctcgttcaacaaaggacagaccttcagattgacactggcatcactcctggagatgggataccaggtccgatttggaattttagaggcaggggcttatggtgttgcgcagtccaggaaaagggcattcatttgggccgctgcacctggagagactcttccagagtggcctgaaccaatgcacgtctttgctagccctgagctgaaaataactctacctgatggcaagttctacgccgctgtcaagagcaccgctgcaggagcccctttccgctcaattacagttcgagatacaattggggatctaccagctgtggaaaatggcgccggcaaaccaacaattcagtacggaagcggtcctgtgtcttggttccagaagaagattagaagcgacatggcttcactgaatgaccacatatctaaagagatgaatgagctgaacctcataagatgcaagcacattccaaagcgcccaggttgcgactggcatgacctgccagatgaaaaggtgaagctgtccacagggcagatggtggacttgatcccttggtgcttgcccaacacagccaaaaggcacaatcagtggaaaggactgtacggtaggttggactgggagggcaatttccccacttctgtaacggatcctcagccaatggggaaggtcggcatgtgcttccatcctgagcaggacaggatcattactgtccgtgaatgtgctcgatcccagggcttccccgatagctaccgtttcgctggcaacatccagaacaagcacaggcagatcgggaatgccgtgccaccgccccttgcctatgccctcgggaggaagctcaagcaagccatcgacgccaagcgttga

SEQ ID NO: 11344 - DNA, 4845 bp, Oryza sativa
  Clone ID: TFbOSC400546j.C1.o3.fg
atggtgcggcgcggcgccgggggacggcgaggagggatcggcggcggggatgatgcaaggctatgcatgggtggcgcgaaggcggcggacgggcgtgaattccgtgttggcgactgcgctctttttcaggctgttgaagttccccctttcattgggttgatacgttggattgagaaaaaggaggaaggctttcccaagttacgtgtaagttggctgtatagaccagctgacatcaagcttaacaagggaacacagctgtgcgccgcaccaaacgagatcttctattctttccaccaggacgagacatccgctgtctcactgctgcatccttgcaaagttgcttttttgcgtaaaggcgttgagcttccagctggaatttcttcatttgtgtgtcggcgcgtgtatgatattgacaacaagtgtttatggtggcttaccgaccaggattatataaatgagcggcaggaagaagtaaatcggcttctacacagaacaaagctagaaatgcatgcagcagttcagtcaggtgggcgctcaccaaagcggctcaatggaccgtcgtctgcccagcaaaagtctggttctgatggtgcccaaaactgcggtctttccaaagggaagaagagggacaggggtgagcaaggaactgatccagctaagcgagaccgtgagcgtcccctaaaggctgaggatggcgaatcaggcaactttaaggtggagaatctaaagtctgaaattacaaagataacagaaaaaggtggacttccacatgctgaagctgtagagaagctggtacatctcatgcaacttgatcgaactgagcgaaagatagatttgcctggccgggtaattctagctgatattattgcagctacagaaagtcctgactgccttggtaggtttgtgcaactgcgaggccttcctgtgtttgatgattggcttcaagaagctcataaagggaagtctggtgaagctggtagtcctaaagaaactgataagcctatggaagatcttgtcctggccctgcttcgtgcactggcgaaattgcctattaatcttactgctttacaaagttgcagtattgggaagtctgttaatcatctgcgaagccataaaaatccggagatacagaagaaggcaaagtgtcttgtcgaaaattggaagaagcgcgttgatgctgaaatgaagtcaaatgatgtgaaaccagtggtatcaggtcaggctgtatcctggccaggcaaacctgggtttccagaaatttctagtgctggaaacagacgaagtggctcaagtgagtctagtctgaaaagcccagtgtctcagctttcttcatcgaaggccttgacttctaaacctgtagccgccgatgctgctgcgaaatcgagtccagtgatatctggttcttcaaaattgcaacatatgcaaccaggaaatgctgtaaccaacttgaaggagcaaccctccaaatcaactggtggcacttgtggctctgagctgcctgcagtgaaagaggagaaaagcagcagttcaagccagtctctgaacaacagccagtcatgttctagtgaacatgcaaaaacaatcggttcttcgaaggaggatgcccgaagctcaactgcagcttctggtgttgcctataaaacttccggtagttcttctcgtgtgcatcgaagaacaaacaatgggcttcttggttcagggatccagaaagaagctgccgtggcaagatcgtcttcacttgatcactcttcagtgcaggaaaaagtgtcacaatctggcacagcatgtgagaaaggagctgacatacaatcagatcagggtaacagccatagattgattgtccggttcccaaatcctggtcgaagccctgctaggagcgcaagtggcggttcttttgaggacccatcatttactgggagtagagcttcatctcctgtggcagacaaacatgaacaaagtgaccgtagagtgaaaatgaagactgaaaattccaatcctcatttaggcaatgatacaaatgctgagtcttggcacagcaatgatgttaaaggagcttcagtttctgaggaaggcgataaatcacctcgtgctatgttgactgatgacagcaagacaactgaaggagctggcagagatgtacctgtttcacgagttgcttgttcatcatatgcaaatgaaaagggaatctgttcaagtgagactgggctgactaaattgttcaaccctatgaatgctttgattgaaatcaagtactctgaagctagtcattccttgcaagctggggatgatacagcaatgaatcttcttgccagtgtcgctggagaaatatctaaatctgagttgatttcctcatctccttcgcctagaaattcatcagcaaatgaacagggctgtgaaggagacaacattgggaagctaaaagtggaatgtgatgtgagcttgccacagcatgcagggccatcaaatgaagttgagaaagtcatctctgagaagagtgaaaaaagtggtgtaggtttggttggaaaggagctgcaccgggaggatgttaatatgctgtctgtaaacaacttgttgtcacagggtgacaagggcacaacatctgctggatcgtcccctctaccagaaatagattctaaagcgaagactgaaaatcgtgaagtagaggacaccgataaatgttcacatccaccttcacgtggtgatgatggtgtaaagtcaaatgccaaacaacctattggtttcaagattgatacaaactcaaatataaaatcatctactacgagtgaatataggtctgcatttactgttcgaggtaaagttgaagatggttgtacaaccagttctgatgtgggctccacattaggtgatcaatgtaagctggctgtttcaaatagaaaaatgctccctgccgaggaaccattatgtggtggtgacaaacaagctcatggtttgttaaagccaacagatcaaaagcatcttctgggtctaccatattattcagaacacattgataaatctggtgacagtactgcaaataaattgaaattgaagccttcattttcatcatcgactgtggaggtgaataaggctgatggtttgctggttggtagtaacacggtgctgaaagaggatgaaaagaaggaacatccagctgatgttacaaaacttgctgtagcaactggagtcaaacatggtccagaaaatgggattagttctaaagaatcaaaagacaattccagtgaatcaagcagtcacacaagacctggaggcactgtctcacaggaaactgaacatagtgcacaacgcagctcaaagaaatctagcgatgatgcaggtgggaaagacgaccttgtctcatctgatgatggttcttcattctctgccaagaccaggtcaaatgccactgccaagcttgactttgatttgaatgaaggaatacctggagacgaggggcatctgtctgagccagctacctctcctgctgtgtgttcttcagcgattcatttacctcgtccttctccgtttgtatcacctatttcaagtgggctgcctgctccaatagctgctccagctaaaggcccctttgttcctcctgagaacctaataaggttgaagtctgagactggctggaaaggttcagcagccacaagcgcatttcgcccagcggagccaaggaaaatttttgagatgactctcagtgcatctggcattctggtttctgatgctgcagggaaaaaccgcccagcacttgacattgacttaaatgttgcagatgagcaatttcttgaggaagacgtctctcagagttctgttcagacaactggttctgaatctggcaacactagaagaagcaatggtcctgtacgtagtgttggctttgagcttgacttgaatagggccgatgaagttgcagagaatgggcaaattgtgtctaacactaaccacagggttgaagtcccattattatcaagaccattacctggagttttctctagttccgatgcaaatagctcaagggattttgatcttaataatggaccaactcttgatgaagctggtacggaacatgcaccaaggagtctgtcatctaaaaataccagtagcataccattcctacctcaagtcgctagcatgagaatgaacagtgctgaaatgagtaacatatcaccatggtttgcttctgccaatgcttgtgctcctgtagctataaagtcgtttttaccttctagaggagaacagcctcacccagtcgagacagcagctggaagtggaacccagaggatcatcacatcgatggcagatggtgtccaacatggaagtgatcccagccggactccagttatttcaacttcaccgactatgatgtttcaccctcctgcttatcagtatgcaggattcccttttactcctagtgtccaccttcaagcaccggggttttcaattgggtctacatcatatgcgaattctgcacctggaggaattccttatttccctacaattgctccgacgcttgttggcccagcaggtgcattacctgctcagcatactcgacaatatgcaataaacctccctgaaggaagcagcactgttggacatgacaataatcggaaatggggaagacagggtcttgatcttaattctggccctggaagtgtggatgtagaagtgaaggacgatagagtaactttaccagttagacaaaattttattgcgccaccacatgcctttgtggacgagcatacgagaatgtatcaaatgcctccaggtgttggaataaagaggaaggaaccagagggcagttgggatgccgaacgatcttcatacaaacaattgtcatggcaatga

SEQ ID NO: 11345 - DNA, 636 bp, Oryza sativa
  Clone ID: TFbOSC900107j.C1.o10.fg
atggccaagaccaagcagggcaagaaggacgtcgaatcctacaccatcaagggcaccaccaagatcgtccgagtgggggattgcgtgctgatgcgggcgtcggacacggagaaggcgccgtacgtggggagggtggagaggctggagacggacgggagggggagcgtgcgggtgcgggtgcggtggtactaccggccggaggagtccaagggcgggaggaggcagttccatggcgccaaggagctgttcctctccgaccacttcgacacccagagcgcccacaccatcgagggcaagtgcgtcgtccactccttcaagaactacaccaagctcgacaacgtcggccccgaggacttcttctgccgcttcgagtacaaggccgccaccggcgccttcacccccgaccgcgtcgccgtgtactgcaagtgcgagatgccgtataacccggatgatctaatggtgcagtgcgagggatgcaaggactggttccatccatcttgtatgggaatgaccattgagcaggccaaaaaattagatcatttcctgtgcgcagattgtgtcaaagaaaatggcacgaagagaccttcaaattcatatccagcatcatcaaattctgattctaaggtcattatttga

SEQ ID NO: 11346 - DNA, 5286 bp, Oryza sativa
  Clone ID: TFbOSC401817j.C1.o11.fg
atggaggccgaggcggaggcggtggccgacctcgacgagatcgaccgcgagatgtcgcgcgccgagtcgcgcaagcgccagcgcaggacggcgaaggagaagcctggtgcccgtaagggagcgaccgaatggaagccggaggacgtggagaaggcggcggcggcggagggggtggccgagctcgacgagatcgaccgcgagatgccgcgccccgagttgcgcaagcgccagcgcaggacggcgaaggagaagcctagtgcccatgagggagcgaccgaatggaagccggaggacgtggagaaggcggcggcgcaggagcccgaggggaccgagctcgacagtgggttgtcgcccgcagagtcacgcggcaagcggcagcgcggggtggagaaggtcaagcgtcgtacccgtaagaagacggccaaggagaagacgaaggagacgaccgagaagtcggcggctcaggcgcccgagaagatgaaggtgaacgatgcgggtggcgcgctggccgaagacgtgtgcgcggatgagccggacgccgaacagatggccatggaggaggaggaggaggcagccgacgtgctggaagcagaggagaggatgggtaagtgtgtcggagaaggatcagccgagaaggctgcgacgaggaagagggtggcgcggccaagcactgcgagaagggtggaggactcagatgaccactttgtgggcgatccagtaccggatgatgaagcgcgacaacgatggcccgtgaggtacagtagaaaggggtctgattcgcttcttaagcaggagcctgacgaagatgaagaaatgaaggctcgatgtcactacctggctgctaatgtggatgatgaaatctatcatcttgatgatgatgtctatgtcaaggctggtcctgatgaggaaaattacattggacggattactgaattttttgaaggagtcgaccgtggatcatatttctcttgtcagtggtttttccgtacagcagatacggtcatctcatcaaagttgttaaaggtgcatgatcatagacataaccataagcgtgtttttctttcaaaggagaagaatgacaacttgattgagtgcatagtctcaaaagtaaagattgcccatgttgatccaaatatgacgcctcaagcaagagctcatgctatatctgattgtgacctgtactatgacatgtcttactctgttgcatattccacgtttgcaaatcttccagcagataatgatggtgcattggggagtgaggcaacatcaaatatttcctgcgatgatgctgacaattcttctaagggaaaattgtcggctgatattgtggcaccatatagtgaacaaacagagacagcttctctgcttgatctttactcaggatgtggcgctatgtcaactgggctttgtttgggttttgcattttctggcataaatttagagactaggtgggctgttgacataaacaaatatgcttgtgcttgtctcaaacataatcacccatactcgcaggtgcggaacgagaaaactgaggattttcttgcccttattcagcagtgggatgcactttgtagaaaatatgttgtccacaaaaacgatacactagaacctagtatagatatgcccttaaatgatgctgacgatgtaaatgagcctcttccagaagatatattcgatgtagaggagctccttgagatatgctatggtgatccaagtaacacaggaaaaaatggcttgtggtttaaggtgcggtggaaagggtatgatccaagttatgatacatgggagccaattgatgggctcagtgattgccctgagcgtattaaagaatttgtagagaaaggacacaaggaaaatattttgcccttgcccggtgctgtggatgtcatatgtggtgggcctccatgtcaaggcatcagtgggttcaaccgattcagaaagcataatgatccacttgaggatgaaaagaacaaacagttggttgtttttatggatatagtgaagtatctgaggcccaaatatgtcctcatggaaaatgttgtggacatattgaaatttgcagatggattccttggacgctatgcaatgagttgccttgtggctatgaattatcaagctaggcttgggatgatggcggcaggatattatgggctaccgcagttcagaatgcgggcatttctctggggagcccttccatcaatggtattaccaaaattcccacttcctacccatgatgctgttgtgcgtggaatagtaccaactacattttcgcaaagtgttgttgcatacaatgaggtagacacccgttgcctacgaaaggctcttctccttgcagatgccatatctgatttacccaaggttggaaatgatcaacctaaagatgtaatagagtatagtgttgcccccaaaactgaatttcaacggtatatccggaacaaccgtaaagacattcaggattactcttttcgtggagatgatccttctgaagaaggtaaattgtttgatcatcaacctctaaagctaaacaaagatgattatgagcgtgtgcagcggatacctgtaaaaaagggagcgaactttcgtgatctaaagggcgtcatagttggcccagataatactgtgcggctggatccaaacatttcccgtgaacgactgtcatctgggaagcctttggtgcctgactatgccatatctttcgtcaaggggaagtcaactaaaccgtttggacgcctgtggtgggatgaaactgttcccactgtagttaccagagctgagcctcacaaccagattattttgcatcctagccaagaccgagttctgactattcgcgagaatgcaaggttgcaaggttttcctgactattacagattgatcggcccactaaaggagaaatatatccaggttggcaatgcggttgcaattccagttgctcgagctttggggtatgctcttgggctggcctaccggggtgaatctgatggagatcgagcagtactcaaattgccagagagttttatttatgctgatcaagagacggttgttaaatcttcggcaggaactcctggaagtgaaatagctgattcggaacagttgtttgaatatttcataaaccccaatttcttttgcatgatgtttgcttttcttaaagtgaatgtggttattcccttgatcctagattctaagatgggtttatcgcgacgaggagccgaggagggggaggcgcgccgcgccgttccattccagaacatcctctcgtgggaggggtggaatcgtcttgatcatcgccggggcgagatccgtctcgacgtccggcgggaaatggacgattccccgctagataatctgtttgatggaaatggattggattcatcggcaggcgcggacagctctagctccacgggatcaccgccgagctccacgtcgtcgtcccctccgtcgtcgcagtcacctcctccggggtcatcgccgcctcctgccagcccgccaccgtccacaccgtcggccccaccgaccaattcctcgggctcagcaccgtcgccaccttccccgtcgcagtcggcgccaccggcgaataccggcggcggcgggtccccaccaccatcgcatggctcgccgccagcgccaaaggccgtccagtctcaacccgctccgaagcgtagcggcgacggtggctcctcctcggacagtgggagctccaaggagggaggcagctcgagtgaccgtggcaagagcgaaagcaacggcaacaggccggggccagaggctgccatcatcgccggcatggtcatcgggttcttcaccttcgccctgctgctggccatcgtcgcctgcgtgtgctgctccaagaagaagaagagacctccccacatgcacatgccgtactacaccgacgagaacgggaaagtgtactacgcgaacagcatgcccaggtggcagaacagcgtggaccaaggcggcggctggcacgcgcagtactcgccaggccaggcgccgccgagcagcgagatgagcgggtcgcacggggcggggccgctgccgccgccgtcaccgggcatggcgctggggttctcgaagagctccttctcgtacgacgagctggcgctggcgacgggcgggttctcgtcggcgaacctgctggggcagggcgggttcgggtacgtgtacaggggcgtcctcgcgggcagcggcaaggaggtggcggtgaagcagctcaaggccgggagcgggcagggcgagcgcgagttccaggccgaggtggagatcatcagccgtgtccaccaccgccacctcgtctccctcgtcggctactgcatcgccggctcatcccagcgcctcctcgtctacgagttcgtccccaacgacacccttgagcaccacctccacggtctccatatctttcctgctcttttcccagccatcgtaacgcgccattcggaagggcgtgccggtgatggcctggacgacgaggctcgccatcgcgctcggctcagccaagggcctcgcgtaccttcacgaagatttctgcagggacaaatcctgtctgtacgtccttctaacgatctgatttgttgcattgtggttgtcacgtacgaaggccatcctaggatcatccaccgtgacatcaaggcggccaacatcctcttggacgagaatttcgatgctaaggttgcggatttcgggcttgcaaagctaaccacggacaccaacacgcatgtctcaacgcgcgtcatggggactttcgggtatctggctcccgagtacgcgtcgagcggcaagctgacggacaaatcggacgtcttctccttcggcgtcatgctgctcgagctgatcaccggccggcgaccggtcgacccaacgaactacatggaggacagcttggttgactgggcgaggcccctcctggcgcgcgccttgtcggaggacggcagtttcgacgagctgatcgaccagcgcctggagaacaagttcgaccggctggagatggagcgcatggccgcatgcgctgccgccgccgtccgccactccgccaagcgccgcccaaagatgaagcagattgtccgtgcgctggagggcgacgcgtcgctggacgacctgaacgaaggggtgaagcccgggcagagcatgatgttcagcacggggtcggagtacgactccggcaactacgcttccgacatcaacaggttgaggaaggtggccttcgagagcagcatcgaggacagcagcgagtacgggacccactccagcgccgactcgggggagccaccccggcggcaacagcatcgctag

SEQ ID NO: 11347 - DNA, 4611 bp, Oryza sativa
  Clone ID: TFbOSC400546j.C1.o2.fg
atggacggacgtgagttcagagtgggtgattgcgctctttttcgggctgtcgatgtaccccctttcattggattgatacgctggattgagaaacaggaagaaggttatcccaagttgcgtgtaagttggctttacagacctgccgacattaagctcaacaagggcttacaactcgacgctgctccaaacgagatcttctattcttttcaccaggacgagacatcggctgtctcacttctccatccttgtaaagttgcctttttgcgaaaaggtgcagagctgccagctggaacttcttcattcgtatgttggcgcgtttatgatattgacaacaagtgtttatggtggcttactgatcgtgattatataaatgaacgacaggaagaggtaaatcggctactgcacagaacaaggcaagaaatgcatactgccgtgcagcaaggtgggcgctcaccgaagcggctaactggcccatcagcttcccagcaattaaaggctggttcagatggggcccaaaattgcggttcatctaaaggaaagaagagggaaagaggtgaacaaggaattgatcaaattaagagagaccgtgatcgcacccttaagactgatgacactgagcctggaaacctgaaaggagacaatatgaagtctgaaattgcaaagattacagaaaaaggtggacttcctcatgctgaagctgtggagaagctagttcatctcatgcaacttgatcgaactgaacggaagttagattttgctggtcgagtaatgcttgcagatgttataacagctacagaaaaccctgattgccttggcagatttgtgcaactaaggggccttcctgtatttgatgattggcttcaagaggctcacaaagggaagtctggtgaaggtggtagtcctaaagaaactgataagcctatggaagaacttctcctagcgctgcttcgtgcattggcgaaattacctattaatcttaatgccttacaaagttgcagtatagggaaatctgttaaccatctgcgaagccataaaaatccagagatacagaagaaggcaaagtgtcttgttgaaaattggaagaagcgtgttgatgctgaaatgaagtcaaatgatgcgaaaccagttgtatctggccaagctgtatcctggccagggaaacctgggtttgcagaaatttctagtgctggaaacagacgaagtggctcaagtgagcctaatctgaaaagcccagtgtctcagctttcttcatcgaaggccttgaccgtcaaacctggagcgtctgatactactgtgaagtcgagtcccttgatatctggttcttcaaaactacagcatattcaaccaggaaatgctgtaaccaacttgaaggagcaaccctgcaaatcatctggtgggacttgtagccctgagttgcatacggtgaaagaggagaaaagctgtagttcaagtcagtctctgaacaacagccagtcatgctctagtgaacatgcgaaaacaattggttcttcaaaggaggatgcccgtagttcaactgcagcttctggcattgctggtagaacatctggtagttcctcacgtgtccatcgaagaacaaacaatgggattcttagttcaggaggccaaaaggaagctactgtggcaaggtctacctcacttgaccgctctctgttaccggaaaaagcatcacaatctgtcacagcatgcgagaaaggaactgacacaccatcagatcagggtaatgggcatagattaattgtccggtttccaaatcctgtccgtagccctgctagaagtgcaagtgggggttcttttgaggatccatcatttactgggagtagagcttcgtctcctgtgcttgcagataagcatgaacagagtgatcgcagagtaaaaatgaaaactgagaattcaaatcctcatttaggcaatgatacaaatgctgaatcttggcatagcaatgatgttaaaggagcttcagtttctgaggaaggtgataaatcaccttatgctatgctgaccgatgatcgcagtaggacaactgaagaagctggcaaagatgcatgtgcttcccgagttgtttgctcagatgctaatgaaaaggcggcttgctcaagtgaaaatggggggagaaattcgttcaaccctatgaatgctttgattgaaatcaagtactctgaagctagtcattccttgcaagctggagatgatacagcaatgaatcttcttgccagtgttgctggagaaatatctaaatctgagttgatttcttcatctgcttcacctagaaattcaccaggaaatgaagagggctgtgaaggagataacattgggaagctaaaagtacaaagtgatatgggcttgtcacggcatgcagggccaacaaatgatgctgagaaaatcatctctgataagggtgagaaaattggtgcaggtttggtcgcaaaggaggaacaacacctaggggatgcaaaggacaataaggtcacatcttctgggctaccctctccacctggaatagatgttaaggctgttgaatctcctgctaagactgaaaatcatgaagtgaggactacagataaaggtggtgatggtgacaagtcggtcacaaaacagccagttgatatcaagattgacgcaaaattgaatatatatccatctactacaagtgaattacgtggtggagataaacaatctcatggtttgttaaagtcaacagatcagaagaatcgccagtgtctaccagataattcagaagccattgaccgatctggtgacagtgctgctgttaaattggatgtggagccttcattttcatcttcgaccgtggaggtgaataaggctgatggtttgctggttggtaacgcagtgctgagagaggatgaaaagaaggaacaaccttcttccacttcagctgatgctacaaaactagctgtaccagcaggtgtaccatttggtccagaaaatgggattagttctaaagaattaaaagacaattccagtgaatcaagtagtcatgcaagacctggaactactgtctcacaggatactgaacgtagtgcaaggcgcagctcaaagaagtcgagtgatgatgcaagtgggaacgaggaccttgtctcatcagatgatggttcttcttttgctgccaagatcaggccaagtgctacagccaagcttgattttgacttgaatgaaggaatacctggagacgacgtgcatcagtctgaggcagaaacctctcctgctgtgtgttcttctgcaattaatttaccttgtctttctccatttatatcacctatgtcaagtgggctacctgctccgataaaagtagctgctacagctaaaggtccctttgttcctcctgagaacctactaagatttcagcctgagactggctggaaaggttcagcagccacaagtgcatttcgtcctgcagaaccaaggaaaatttttgagatgactctcagcgcacctggcattccagtttctgatgctgcagataaacaccgcccagcacttgacattgacttaaatgtagcagatgagcaatttcttgaggaagatatctctcagagttctgttcagacaactggttcggaatctggcaacactagaagaagcaatggtcctgtacgaagtgttggtattgaacttgatttgaacagagctgatgaagttgcagagaaccattttgtgtcgaacactccccacagggtcgaagtcccattgttatcgtcaagaccgttacctgcaattttctctagtgctgatacaaatggctcaagggattttgatctcaataatggaccaactctagatgaaactggcacggaacatgcagcaaggagtctatcatctaaaaataccagcagtataccattcatacctcaagttgctggcggtagaatgaacagtgccgagatgagtaatatctctccatggtttgcttctgcacacccttatgctcctgtagctgcacagccatttttaccatctagaggagaacagcctcacccagttgagacagctgctggaagtggaacccagaggatcattacatccttggcagatggtgtccagcgtggaagtgatccctgccgtgctccagttatttctacttcaccaaccatggtttttcatcctcctgcgtatcaatatgcaggattcccttttactcctggtgtgcaccttcaagcaccggggttttcaattggctcgacatcttatgccaattcagcacctgcaggagttccatattttcctagcattgctccaacactgttagggccagcaggtgcattacctgctcaacatactaggcaatatgcaataaaccttcctgaaggaagcagcactgttggacacgacagtaatcggaaatggggaaggcagggccttgatcttaattctggccctggaagtgtagatgcagaaataaaggacgaacgagtatctttaccagttagacaaaatttaatcacgccaccacatgcctttggggaagagcatacaagaatgtaccaaatgccaagtgttggaataaagaggaaggaaccagaaggcagttgggatgcagaacgttcttcatacaagcaattatcatggcaatga

SEQ ID NO: 11348 - DNA, 2163 bp, Oryza sativa
  Clone ID: TFbOSC420016j.C1.o9.fg
atggagtcgggaggcggaagccacgtcgcggagatgccgcgcgtccccaagtccgcgaggggcaagagatcaattcggaagaaggagagccagggtcaggtgatgtgcgcgttcgacctgctcgcgactgtggccggaaagctgcttgatgagggggagggttctctggggaacgcgagctcaggcaccccggccgtggacgcgtcgcccaaggatgtccgcgtgaagcaggagcagtgcgatgaggaggcgaagcatttcaagaatgaggtgatggatcaggatagctgcaatgagagtgcattggtctcccacattgcgtttcagcggccggtgaatcaccatgggcggaagggggaagatccggaggggagtcatgctgtgattgaggaccccaaggccaagtccgaggcactggacaaggaatcctcaatgataagctgcaccaaggctgaattgggttgtaattttgcagcgatcgctgataggtggtcgcctgaatccgtggagtcaggggccttcactggggatgcagctgcaattgcgatgccggctaccacatcaggcttccacaagaatgctccagatatgtataatctgctcgatccaatggatgtggatgtaaagccgcctcctttggtcagctctgacagcaccggcgaaatgccgttgtatggcaataaaattcgccgatcgacctctttcccgagggtccccaagggaggggcggggtttactgtagatagagatgaagatgatgatgataaatcttccgggtgcactcatccgagcaccgctactaacaggggtttcaggcccaattgtacagctggtcatagtagggtaaagaagttgctcgcctgtaagcacaggaaagttgctccagccaggatgcacaaaggagatctttcctatagtggtgagcattgtgagatcccattcaccttttccttttttgaggagcactgcattgatggcactcatattcaaacctgcttactctattcttacttgagttcgttgatcctgctagatgttgaccggaagccttctttccgcaacaagaaaatgtattatacacgacaaaggacacaaaggagcacattcaagcggaggaagatgtttgatcgtcattcagcccaagtttctgaagaatatgcaaaggcaaacacaaagtttgctgcaagagactcgcacgcggtttctttggaagcaaacaaggggaccaattcaacagcattccagaaatcacaagagtcaagtgactgccacgtaaaacttaggatcaagtctttcaaggtgcctgaacttctaattgagatcccagaaactgcgactgttggttcactgaagaaaactgttctggaggcagtaaatgccatacttggaggtggtctgcgtgtcggtgtgctccatcatgggaagaaagtcagagatgataataaaaccttaatgcaggctgggatttctcatgatgaggtactggacaacctgggtttttctcttgaacccaattgtgcaccgcatccgtcacaactctcacctcccgaagataatgaattcatggaaactgttgatactactgaacccctagctaggattgcacctgctgactcatcttccaagcatggtgaagttgatgcttcacaggagcttgcattggcacccttatcagcaaactaccaagggagtgatcatgactttgtgcactctcctgggggcatgtcttcacctgataaggcatccacaaactcgcgagctattgttccagttactcctgcagattccaatgctggggctatagttccagcaaacaaagcaaagaggtcacctgaacaagggcaacgccgaatcaggcgtccgttctctgttgccgaagtggaagcccttgtgcttgcagttgaaaagcttggaaccggaagatggcgagatgtcaaacttcgggcctttgataatgcaaagcaccggacttacgttgatcttaaggacaaatggaagacgctcgtgcacacggcgagcatctcgccccagcagcggcgtggcgagccggtgccacaggagctgctcgacagggtcctggcggctcaggcctattggtctcagcagcaagccaagctccagcctaagacgcccccgctggctgaggctctcctgctcacctaa

SEQ ID NO: 11349 - DNA, 1976 bp, Oryza sativa
  Clone ID: TFbOSC400887j.C1.o25.fg
atggtgttgcagaagaggttggactatggatcccatggccatcgtgctcccattaagccacgtgtcgcaacattggcgccggttaaacgctccacaagaataaggaaaaagcagatgtatgcacttgatttgcttgcgacagctgcagaaaaattgttggctgatcaagacaatttatctagtggacctaacataaatgaaacaccagaaggttatgttacaagcatgaaaccagttaaagcagaacagtttgatgaagcgtttccgttgagaagcgtggctgtgaaaaaagatgactgcaaaggttgtacagtaggctgtgcaggcatctgtggctttctcagacaagctaatatgtgcttggctgaaaactcgtcgactcaaaatctagctgattcagtactagagtcactaacagcaaagcctgatgtgttggctaaggactcatttgttagcagtaaaaaatcatgtcgattgggttttggtcttggcacaattccggagtatggatctgttggagtatgccaaccttggtccacaagatcagcagaggttaaacaagtgcatcgggcgagaccaacagcaatcagaagtcaagaagatagtgatgctgcagctctatgtgctttggtcgagaccatggatttggacaccaaacctcttgctgaggctagctctggtagtaactcaggagtgcacatctgcggccctgacagggggcataactcccatccctcgtgtttggctaaagtgcagcatgctgcagacagagatgatgacgaaaattcttctgggtgtgtacatccaagcacctcaggaaataaccgtggttatattccacattatataggtgaccgcaggataaggagattgtttgcctccaggttaaggaaggcagctcgcaacaggatatgtggagagatgtcttgtaaaggtaacaagctgagtttgtgtgaaaagaagatgcccactacgcgccgaagagtgcaacaaacaactttgaagaggaaaagacttgctcaactttactccgaaaaatcatctgatgaagtcaagttaaccatcaaatctttcaacatccctgaactactaattgagatccctgaaaatgcaacagttggttcattgaagaaaactgtgtcagatgctgttactactataattgaacgcggtctccgtgtcggtatacttcttcaaggaaaaaatattcaaaatgacaacaagacgcttcgtcaggctgggatttgccgtggtaaaaaactaaatgacataggctttactctggaatgtgaagctgggcaagattctcaccctggtgtaatagtgccagaagaaatggattttgttggtgcatctgttgtggacaagtctgctacaagtttcggaaactacacgaccatagatttttgctgtatgtggtcatctaagggttttaatattccatttccagggtgaaatgcgaagaacctgctgagaaccagcagcttatgcaagattttccaggctgcagcttgagtgatcctggttctgttgattatcccgtggaatggagcacacaagaaacatcagcaagctcccaagccatcgtcccttttgcagatccaaactcactggcgctggccaatgtgccgctttctaggtcaaagcgaccagattttgggcaaagacggataaggaggcctttcactgttgctgaagtggagttgctggtggaagccgtcgagcaccttggaacaggaaggtggagggacgtcaaattccgcgcatttgaaaatgttcatcataggacctatgttgatctgaaggacaagtggaagaccctggtgcacacggcgagcatagcgccgcagcaaagaaggggagctccagttccacaggaactcctggaccgtgtgctcgccgcacaggcctactggtcggagcagcaggcaaagctccatggcgatccccctgttcctgaaatctgccctacctga

SEQ ID NO: 11350 - DNA, 94 bp, Oryza sativa
  Clone ID: TFbOSC24168j.C1.o1.gm
aatatgaatgagcatcctgatgcttggccattcaaagagccagtggattcacgtgatgttcctgactattatgacattatcaaagatcctattg

SEQ ID NO: 11351 - DNA, 1677 bp, Oryza sativa
  Clone ID: TFbOSC19148j.C1.o1.fg
atgtctggaaaagggaagaggcgaagtgctagattactgaagcttgaagagcagaagaacgatgacactactgccactggttgtctcctagatccttggcagataatccgaaacagcattgctggtgttcgagggaagagaaaaaggaatgaagaaatccagcatttgcagggagaagcttcttctagccaagcactgtgtgcaacaaccgatatcaataatttgtcaagcaaaagttcagcagtacaaatcattgagtacattcttgatacactagagatgagagacactcatgagttatttgcaatgcctgatgacatccaagtaactgattatgcagaacgggtgaacaggcccggtgactttgcaacattaaggcagaagaacaaggatggcatgtacaacacactggagcaattcgagaatgatgtttacatggtgttccagaaagcaatgtccataaacagcgaggacactataccttacagagaggcaatgtcactgctacatcaagccaagcaggtattcctgtccctgaagagcaaccagatgtactcggagtcagagctcgcagcgtggcgccagaaaaatctggtgagccagtcgccggccaagctaaacgggaaattcgatggcagcaaagtaggctccggctccggcgccggcggcgccgctccgaccacaccacagcggccgagcgcgccggcgaggaagaagatcgccgccaaaaccggcgctgtcgccgccgccacctcggttaagagcacaacgaggcagcgggcagcgagggagagcaacggtgcgccgggaagaagagcaagaaaagctgcatcggtgacgccggggacggcggagcacggtggcgccggcgccagcgccaccgtggagcagagacggttagcctacgccgacgaggctgatcacggcggctggcggccagtgcccgtcgtctccactggccagcacgccactctcgtttaccggccgcagacggcggcgcacacgtaccaggatagcctccggcgattcgtccggcacgccgggcttaaggcgcgcgtcgccgccgagttcaggaacctcgagtgcgacgtacgggccaggcaggcccgcccggcgccgggctactgccgaactgtggtttcgcttccagctccggcgccggcacggccagcaggtcgttcctcccgcaacggccgctgcccgccgccgtctcctccgagcgcggcgttcggaggcggcggcgctgccgctgcatcatctgccgacgctgccggcaacaaggcgccaccgcggtgcaggctgaagacggacgaggtgctcaagctcctcgtgctgatcggcaggccggcgttcatggagagagccaggagagtgctcggccatgagcgccaggagagcagctcaaagcagggacacgatcagaaaccagctgtgaccagagccggtgacgacgacggcggcgcgaaggccggcgtaacggcggccaagccagggaagaagaagggcagtgccagcaagccagccgccgtcgagttcgggccattcgcgccgcccaagctggtcatccccggccggcagctgggcttcagccagttcgccggctcgtcctcccaaccgttcaaagtgacgcctaccactccaaatgttcctgacaagaagaagaagaaacgaggttga

SEQ ID NO: 11352 - DNA, 6702 bp, Oryza sativa
  Clone ID: TFbOSC401731j.C1.o13.fg
atgcagcccggcgaggcacccccctcctccgggggctcgccggcgacgtcgccgcggccgccgccggcggtggcgcaggggcagcagcagctagggtttaggaatcaggcaatgatgcatcaccatgatcagcagcagcagcagcagcaagggtacccatcgggcgcgccgcatggtatgatgggaggtggtggcagcagtagtttccctccgtcctcaggcccaatgcccccgttccagggccagaggaacatgccgctacccggtggaccgcagggtctggctggaggccagcagcataacccgacggcgatgcagcaagcatacctgcagtacatgatgcagcagcagcagcagaaggcccatgggatgctcctccagcagcaacagcaggccaagatgaatatggcagggccatctacaagggaccaggatgtggctgccaacactgcaaaaatgcaggagcttatgtcccttcaggctcaggcccaggcccagatgttcaagagacaacaatctgagcatcttcaacaggcagagaagcaggcggagcaagggcagccgagcaatagcgagcaaaggagtggtgatatgaggccaccttcgatgccaccacaaggggtccctgggcagcagttgtcatcggcgggtatggtgaggccgatgcagccaatgcaagggcaagctggcatgagcaatgctggagctaacccgatggcaatggcccaacttcaagctatccaggcctgggccaaagagcacaatgttgacctgtccaatcctgcaaatgtgactctcatttctcaaatcctaccaatgttgcagtcaaacagaatggctgccatgcagaagcagaatgaggtaggcatggcgtcacagcagcagtctgtaccctcacagatgaacaatgatgcaccaggacatagtaattttcctagtcagggtgccccatcgaagccccgacagcctcttccaccaagcacctctgtttctggtggggcagagcctaagatgatgaatatgagcaacatgcagatgcaacaacagttagcagctcataacagagatagctcgaatgacagggctgcgaggccagccatgtcaatgggcaatggtggacaaatgatgcatatgccccaaagttctggacatgcaaacaagattcctgagcagcccaatccaaaaaatgcaaattccgaagcaatgcagatgcaatatgcaagacagttgcagcaggctaaccgagctactgccccttcagcaaattctggtgaaacaggaggatcacaggccccaaatcaagctgcccgaccacctatgggtttcaccaaacatcagcttcatgtacttaaagctcagatattagcttttcggcgtctgaagcgtggtgataagaagctaccaccagaagttcttgatttaatcatgtctggaccaccacctgattcacaagcgcagcaggtttctggacctccagtaacaaaccgtgaaagatctgctacaagcagcgctgatgaacatggaagacctgtggagagtggtggtatagctcctgaaagatcttccctgttgaaggcgccctgtttaccaaaggtggaggtttctgctccagaagacaaaactattcctgctagtggtcccatgcaagtgatgaaagcttcacccaaggaacctcttagaattggaccagtttcaatgcctgaacaaaccaacaccaccctgattaaatctgagcaggatccagaaaggggtatccagagaacacctgggagaagtgattacaatggtgaaagggggaaatctttgccagcagaaagtggttcagcagacgctgagcaggcaaaaagagctgcctcatcaagtagcgtgcctactcccaacagagatgtttcaagaaaataccatgggccactatttgactttccatcctttaccaggaaacatgattccatggtgtctgcaaattacaacagtaatctagcactcggttatgacgtgaaggatttgttagctcaggaaggcatgatagttcttggcaagaaacgggaggataatttaaaaaagatcagtggcttgcttgcaattaatctagagaggaaaaggatccaaccagatcttgttttaaggctgcagattgaagaaaagaagctgaaactccttgaatttcaggctcgtatgagggatgaagttgaacaggagcaacaagaaataatggcaatgcctgatagggtgtacagaaagtttgtcagacaatgtgaacgccagcgtgttgagcttacaaggcaagttcagcagatgcagaaagcctcaagagaaaagcagctcaaatccattttccagtggcgcaagaagcttttggaggcacactgggccattcgtgatgcacggattactcgtaaccgaggggtagccaagtaccatgaaaggatgctgagggaattctcaaagaaaaaggatgatgatcgaaacaaaagaatggaggcactgaaaaacaatgacgtggaaagatatcgtcaaatattattggaacaacaaaccagtgttcctggcgatgcagctcaaagatacaatgttctatcttctttcttgacccagactgaggagtatctctataaacttggagggaaaataactgctgccaagaatcatcagcaagttgaagaggcggcaaatgctgctgctgctgctgcccgagcacagggtctttctgaagaagaagtgaaggctgctgcacaatgtgctggtcaggaggttatgataaggaacacattctctgaaatgaatgcgcccagggaaaacacatctgttaataagtactacacattggctcatgctgtgaatgagagagttacaaggcagccctcactgctgcgagcaggaacgttaagggactaccagctggtgggccttcaatggatgctttccttgtacaataataagttgaatggtattttggctgatgagatgggtcttggcaagaccgtacaggttatgtctctgattgcatacttgatggaatttaaagggaattatggaccacatctcataattgtaccgaatgctgtcttggtcaactggaaggaggttctggctgtgaaattcaatgttcttgtaacaacatatgaatttgttatgtatgaccgttccaagctttcaagaattgattggaagtacattattattgatgaggcccaacggatgaaggacagagagtcagtcttggcgcgagatcttgatcgttatcgttgccaacggcgtttgcttctcactggcactcctctacagaatgatcttaaggagctttggtccctcctaaatttgttgctaccagaagtatttgacaaccgtaaggcatttcaagattggttctcaaaaccttttcagagagatgttcctacacatagtgaagaagaagatgattggctggaaactgagaaaaaagtaattattattcataggctgcatcaaattttggaaccttttatgctacgaaggcgtgttgaagatgttgaaggctcacttccaagaaaggtcgattgttctgcccttgtcacactcagtgatgctatttgtcactcagctctttttgtttgctacattgttaactcgtcatgtcatttgcaggagtcaattgttttgaggtgcagaatgtctggtattcaaggtgctatatatgattggataaaatccactggcaccatcagggttgatcctgaagatgagaaagcacgtattcagaggaatgcaatgtaccaggctaagacatataagaatctcaataacaaatgcatggagctgaggaaagtttgcaaccatccattgctgtcatatccttttatgaattactatggaaaagattttataatcagatcttgtgggaagttgtggaatcttgataggattttaattaagcttcataggtcaggtcaccgtgtactccttttcagcactatgacaaaacttcttgacatcctggaagaatatttgcaatggaggcaacttgtttacagaagaattgatggaacaactagcttggaagatcgtgaatcagcaattgttgacttcaacaggcctaattctgattgttttatattcttgcttagtattcgggctgctggcaggggtctgaatcttcagagtgcagacactgttgtaatttatgaccctgatccgaatccacaaaatgaagagcaagcagttgctagggcccatcgtatagggcagactagggatgtaaaagttatttacatggaggctgttgttgataacatctcaagttatcagaaagaggatgagttgaggaatgggggaagtggagatctggaggatgatcttgcgggaaaggacaggtacatgggttcaatagaaagtctcatccgcaataatatccaacagtacaaaattgacatggcagatgaagtcattaatgctggtcgatttgatcaaagaacaacccatgaggaaaggcggatgactttggaaacactcctgcatgatgaagagagatatcaagaaactgttcatgacgttccttcactacagcaagttaaccgcatgattgctcggactgaagaagaagttgagctatttgatcagatggatgaagaatttgattggacaggagatatgatgaaacacaatcaagctcccaagtggctccgtgttagctccacggagcttgatgctgttgttgcgagtttatccaaaaagcccttgagaaatatggcggctgggggaatttctcttgacactaatgaaaaacttgagaaacgaagggggcgacctaaggggtctgggaagtactccatctacagggagattgatgatgacgattttgaggaatctgatgatgattctgaagagaggaatacctcatctctgcctgaagaaggggaaataggagaatttgaagatgaagaggacaatgatgattcagtgcctgataataaggatcaatcagaggaagaagagcctatcaatgatgaagggtatgatttttcacatgggatgggacgcagaaaagcccatagatctgaagaagctggttcaacaggatcttcatctggtggccgtagattgccaccacctgcaccttcctcctcttcaaaaaaattgcggtctttgtctgcattagattcccgcccgggtgctttgtcaaagagaactgcagatgacctagaggaaggagaaattgcattatcaggggattcacatctggatctccagcagtcaggcagctggaatcatgaacgagatgatggtgaggatgaacaggtagtacagccaaaaataaagcgcaagcggagtatccgtattcgtccaagacctaatgcagaaaaactggatgatagatccggtgatgggaccgtccctcaacgtggtgttcatcttgcatttcaaggagatggtgattatgattcacaatttaagtctgagcaagcctttgctgatcctgcttccaggcagcaagacacagttcatcggacagtaaaacaaaagcgtaacatgccatctagaaaggctccccctgccactaaggctgggaaaatgactcagctgtctggatctggtgagggatctgctgaacattctaaggaaaattggagtaacaaggtgatagaatctgctggtccaaattcaagtggaacaaagatgtctgacagtatgcaaagaaaggtaaatctcgactgctatctgcttgcattagcaaaagagccaagtatgacgccgcttatttcatgtggtgttttcacattgttctacaatcataacaactgcaagaacgtgataaacaagctttggaggaggattgacaaagagggtcatcaaatcataccaaatatatcttcttggtggcgtaggaacgagaattcctcattcaaaggtttggctagcagcacccttgatctacagaaaattgaacaacgagttgatggatttgagtatggcggtgtgaatgaattcatagctgacatgcagcagatgctgaaaagtgtggttcaacatttcagctataggcatgaggtccgagtagaagctgagaccctccacaacttatttttcaatataatgaagattgcctttccggactcagacttcagagaagctaagggtgctatgtcattttcgaatcctggaggaggtgcaagtggctctgctgcgcaatcaacaaagcaatctgcttcaggccagaaacgtcgttcaagcaccagtgaagcggagcagcatggttcaagcactagcagacacaatcagcatgcaccagttggtgaggtttcaggccgggcccacacttcaaaatctgagaaggactcccggcattctggaccaggtagcagggaacagttcacggatagcgcagggctgttcaggcaccctacagatatgttcatagttaagaagaagagagatcgaaggccgagcctggggtctccatccagttcaggccgaactggaccgctctccccgaccaacgccgggcggatgggaccggcgccatcacctagaggtgccaggacgcccttccaaagagatccacacccttctcagcagtctatgcattcagctggatggggtgctcattctgtgcagcaatctgatcgtggggggagttcatcacccggcattggagacatccagtgggctaaacctaccaagagatcgaggactgatagtggcaaaagacggccaagccatatgtga

SEQ ID NO: 11353 - DNA, 6633 bp, Oryza sativa
  Clone ID: TFbOSC411283j.C1.o10.fg
atggcgttgggattcgaattttttttgtgtggtttgggggcaatgatgcatcaccatgatcagcagcagcagcagcagcaagggtacccatcgggcgcgccgcatggtatgatgggaggtggtggcagcagtagtttccctccgtcctcaggcccaatgcccccgttccagggccagaggaacatgccgctacccggtggaccgcagggtctggctggaggccagcagcataacccgacggcgatgcagcaagcatacctgcagtacatgatgcagcagcagcagcagaaggcccatgggatgctcctccagcagcaacagcaggccaagatgaatatggcagggccatctacaagggaccaggatgtggctgccaacactgcaaaaatgcaggagcttatgtcccttcaggctcaggcccaggcccagatgttcaagagacaacaatctgagcatcttcaacaggcagagaagcaggcggagcaagggcagccgagcaatagcgagcaaaggagtggtgatatgaggccaccttcgatgccaccacaaggggtccctgggcagcagttgtcatcggcgggtatggtgaggccgatgcagccaatgcaagggcaagctggcatgagcaatgctggagctaacccgatggcaatggcccaacttcaagctatccaggcctgggccaaagagcacaatgttgacctgtccaatcctgcaaatgtgactctcatttctcaaatcctaccaatgttgcagtcaaacagaatggctgccatgcagaagcagaatgaggtaggcatggcgtcacagcagcagtctgtaccctcacagatgaacaatgatgcaccaggacatagtaattttcctagtcagggtgccccatcgaagccccgacagcctcttccaccaagcacctctgtttctggtggggcagagcctaagatgatgaatatgagcaacatgcagatgcaacaacagttagcagctcataacagagatagctcgaatgacagggctgcgaggccagccatgtcaatgggcaatggtggacaaatgatgcatatgccccaaagttctggacatgcaaacaagattcctgagcagcccaatccaaaaaatgcaaattccgaagcaatgcagatgcaatatgcaagacagttgcagcaggctaaccgagctactgccccttcagcaaattctggtgaaacaggaggatcacaggccccaaatcaagctgcccgaccacctatgggtttcaccaaacatcagcttcatgtacttaaagctcagatattagcttttcggcgtctgaagcgtggtgataagaagctaccaccagaagttcttgatttaatcatgtctggaccaccacctgattcacaagcgcagcaggtttctggacctccagtaacaaaccgtgaaagatctgctacaagcagcgctgatgaacatggaagacctgtggagagtggtggtatagctcctgaaagatcttccctgttgaaggcgccctgtttaccaaaggtggaggtttctgctccagaagacaaaactattcctgctagtggtcccatgcaagtgatgaaagcttcacccaaggaacctcttagaattggaccagtttcaatgcctgaacaaaccaacaccaccctgattaaatctgagcaggatccagaaaggggtatccagagaacacctgggagaagtgattacaatggtgaaagggggaaatctttgccagcagaaagtggttcagcagacgctgagcaggcaaaaagagctgcctcatcaagtagcgtgcctactcccaacagagatgtttcaagaaaataccatgggccactatttgactttccatcctttaccaggaaacatgattccatggtgtctgcaaattacaacagtaatctagcactcggttatgacgtgaaggatttgttagctcaggaaggcatgatagttcttggcaagaaacgggaggataatttaaaaaagatcagtggcttgcttgcaattaatctagagaggaaaaggatccaaccagatcttgttttaaggctgcagattgaagaaaagaagctgaaactccttgaatttcaggctcgtatgagggatgaagttgaacaggagcaacaagaaataatggcaatgcctgatagggtgtacagaaagtttgtcagacaatgtgaacgccagcgtgttgagcttacaaggcaagttcagcagatgcagaaagcctcaagagaaaagcagctcaaatccattttccagtggcgcaagaagcttttggaggcacactgggccattcgtgatgcacggattactcgtaaccgaggggtagccaagtaccatgaaaggatgctgagggaattctcaaagaaaaaggatgatgatcgaaacaaaagaatggaggcactgaaaaacaatgacgtggaaagatatcgtcaaatattattggaacaacaaaccagtgttcctggcgatgcagctcaaagatacaatgttctatcttctttcttgacccagactgaggagtatctctataaacttggagggaaaataactgctgccaagaatcatcagcaagttgaagaggcggcaaatgctgctgctgctgctgcccgagcacagggtctttctgaagaagaagtgaaggctgctgcacaatgtgctggtcaggaggttatgataaggaacacattctctgaaatgaatgcgcccagggaaaacacatctgttaataagtactacacattggctcatgctgtgaatgagagagttacaaggcagccctcactgctgcgagcaggaacgttaagggactaccagctggtgggccttcaatggatgctttccttgtacaataataagttgaatggtattttggctgatgagatgggtcttggcaagaccgtacaggttatgtctctgattgcatacttgatggaatttaaagggaattatggaccacatctcataattgtaccgaatgctgtcttggtcaactggaaggaggttctggctgtgaaattcaatgttcttgtaacaacatatgaatttgttatgtatgaccgttccaagctttcaagaattgattggaagtacattattattgatgaggcccaacggatgaaggacagagagtcagtcttggcgcgagatcttgatcgttatcgttgccaacggcgtttgcttctcactggcactcctctacagaatgatcttaaggagctttggtccctcctaaatttgttgctaccagaagtatttgacaaccgtaaggcatttcaagattggttctcaaaaccttttcagagagatgttcctacacatagtgaagaagaagatgattggctggaaactgagaaaaaagtaattattattcataggctgcatcaaattttggaaccttttatgctacgaaggcgtgttgaagatgttgaaggctcacttccaagaaaggtcgattgttctgcccttgtcacactcagtgatgctatttgtcactcagctctttttgtttgctacattgttaactcgtcatgtcatttgcaggagtcaattgttttgaggtgcagaatgtctggtattcaaggtgctatatatgattggataaaatccactggcaccatcagggttgatcctgaagatgagaaagcacgtattcagaggaatgcaatgtaccaggctaagacatataagaatctcaataacaaatgcatggagctgaggaaagtttgcaaccatccattgctgtcatatccttttatgaattactatggaaaagattttataatcagatcttgtgggaagttgtggaatcttgataggattttaattaagcttcataggtcaggtcaccgtgtactccttttcagcactatgacaaaacttcttgacatcctggaagaatatttgcaatggaggcaacttgtttacagaagaattgatggaacaactagcttggaagatcgtgaatcagcaattgttgacttcaacaggcctaattctgattgttttatattcttgcttagtattcgggctgctggcaggggtctgaatcttcagagtgcagacactgttgtaatttatgaccctgatccgaatccacaaaatgaagagcaagcagttgctagggcccatcgtatagggcagactagggatgtaaaagttatttacatggaggctgttgttgataacatctcaagttatcagaaagaggatgagttgaggaatgggggaagtggagatctggaggatgatcttgcgggaaaggacaggtacatgggttcaatagaaagtctcatccgcaataatatccaacagtacaaaattgacatggcagatgaagtcattaatgctggtcgatttgatcaaagaacaacccatgaggaaaggcggatgactttggaaacactcctgcatgatgaagagagatatcaagaaactgttcatgacgttccttcactacagcaagttaaccgcatgattgctcggactgaagaagaagttgagctatttgatcagatggatgaagaatttgattggacaggagatatgatgaaacacaatcaagctcccaagtggctccgtgttagctccacggagcttgatgctgttgttgcgagtttatccaaaaagcccttgagaaatatggcggctgggggaatttctcttgacactaatgaaaaacttgagaaacgaagggggcgacctaaggggtctgggaagtactccatctacagggagattgatgatgacgattttgaggaatctgatgatgattctgaagagaggaatacctcatctctgcctgaagaaggggaaataggagaatttgaagatgaagaggacaatgatgattcagtgcctgataataaggatcaatcagaggaagaagagcctatcaatgatgaagggtatgatttttcacatgggatgggacgcagaaaagcccatagatctgaagaagctggttcaacaggatcttcatctggtggccgtagattgccaccacctgcaccttcctcctcttcaaaaaaattgcggtctttgtctgcattagattcccgcccgggtgctttgtcaaagagaactgcagatgacctagaggaaggagaaattgcattatcaggggattcacatctggatctccagcagtcaggcagctggaatcatgaacgagatgatggtgaggatgaacaggtagtacagccaaaaataaagcgcaagcggagtatccgtattcgtccaagacctaatgcagaaaaactggatgatagatccggtgatgggaccgtccctcaacgtggtgttcatcttgcatttcaaggagatggtgattatgattcacaatttaagtctgagcaagcctttgctgatcctgcttccaggcagcaagacacagttcatcggacagtaaaacaaaagcgtaacatgccatctagaaaggctccccctgccactaaggctgggaaaatgactcagctgtctggatctggtgagggatctgctgaacattctaaggaaaattggagtaacaaggtgatagaatctgctggtccaaattcaagtggaacaaagatgtctgacagtatgcaaagaaaggtaaatctcgactgctatctgcttgcattagcaaaagagccaagtatgacgccgcttatttcatgtggtgttttcacattgttctacaatcataacaactgcaagaacgtgataaacaagctttggaggaggattgacaaagagggtcatcaaatcataccaaatatatcttcttggtggcgtaggaacgagaattcctcattcaaaggtttggctagcagcacccttgatctacagaaaattgaacaacgagttgatggatttgagtatggcggtgtgaatgaattcatagctgacatgcagcagatgctgaaaagtgtggttcaacatttcagctataggcatgaggtccgagtagaagctgagaccctccacaacttatttttcaatataatgaagattgcctttccggactcagacttcagagaagctaagggtgctatgtcattttcgaatcctggaggaggtgcaagtggctctgctgcgcaatcaacaaagcaatctgcttcaggccagaaacgtcgttcaagcaccagtgaagcggagcagcatggttcaagcactagcagacacaatcagcatgcaccagttggtgaggtttcaggccgggcccacacttcaaaatctgagaaggactcccggcattctggaccaggtagcagggaacagttcacggatagcgcagggctgttcaggcaccctacagatatgttcatagttaagaagaagagagatcgaaggccgagcctggggtctccatccagttcaggccgaactggaccgctctccccgaccaacgccgggcggatgggaccggcgccatcacctagaggtgccaggacgcccttccaaagagatccacacccttctcagcagtctatgcattcagctggatggggtgctcattctgtgcagcaatctgatcgtggggggagttcatcacccggcattggagacatccagtgggctaaacctaccaagagatcgaggactgatagtggcaaaagacggccaagccatatgtga

SEQ ID NO: 11354 - DNA, 1312 bp, Oryza sativa
  Clone ID: TFbOSC11640j.C1.o1.fg
cggcggcagcttgcgtcggagctcgaccaggtgcgtgggctttccaagcggctgaaggcggccgctgaggccatcgcggctgagtctgcagcggcccttgctttgcctgtggtggtgccgccgcctcagcttcctgttgggtatgcgcactcgcagttcgcactcgctgatcctgtgacgcccatacctggtcaagttgctggtgctattgttccggtccgctcagtgatgcagcgcgggccactaaccgtgtcagtgactcacacagagtccttcgagaaggagaagcggacaccaaaggcgaatcagttgtatcaaaattcagagttcttgcttgccaaggataagtttccgccttcagattcacatggtcgtaagaaacccaagcaccacaagaagaagcatcgttccttagcatctcatggtgctggttatgatgctgagcagaggctatactctcatgcttttaagaaatctatgtcgctgctttctaggctaatgaagcacaaatttggttgggtgtttaacaagcctgtagatgctgttgcgcttggtttgcatgattattttgctattatcaagcacccaatggatcttggcacgataaagacccgactcacgcatggccagtacaggaacccgagggagtttgctgatgatgtacggctgacgttccataatgccatgacctataatcccaaggggcaggatgtgcatttcatggctgagcagttgttgggaatctttgaggcgcagtggcccgaaattgaggctgaggttcagtaccttgcctcatgtccgccattgccaaataagtttccacctccaccaattgacgtgcgcttccttgatcggtcagattctgtaaaacaccatatggtgttggactccaagtcaaggccattaagtcatactcccacttatagtgccaggactccatcgatgaagaaaccaaaggccaaggatccggataagagagatatgacaatagatgagaagcggaagcttagtaacaaccttcagaatttgccaccggagaagcttgatgttgttgtgcagatcattaagaacaagaatctgtctgttagacagcatgatgatgagattgaggttgaaatagatagcatggatactgagacactttgggaacttgatagatttgtggccaactacaagaagaacctgagcaagcaaaagaggaaggctgagcgagccatgcttgcaaggcaggatgcagagttgcatgcacaacatgttgccccacaacaaccaagtcaagagcctaatattggtgtaaaatctccaaagcaaa

SEQ ID NO: 11355 - DNA, 1971 bp, Oryza sativa
  Clone ID: TFbOSC401036j.C1.o32.fg
atggcctcgtcccctcctggcgccggcgccggcggggaggagcggcccgcggcgagccccgcggccccggccgtggcggaggcggtggaggaggggccggtgacgtcgcggtgggcgccggagatcagggtgtaccggcgcaagtacccacgcaaaaaccctaaaccccctccgaaccctagccctagctccagccccctcgcgcaaaccctagcctcgattcggaggtcgattcgccgccccgaggatgggcctgcggcgcctcggcctgatccgcccgccgcgcccgcttcctccccccatccccctccgccgagcgccccggttgcccccgcgcagcagggggagcccgccgcgcccgcttccgacgacgtctccgcggggcctaatcgggacggcggggccgttcccaacggccatggagacgtccgggcggccgccgaggagaaggcgcggaagcggagggcgcggagcgagctgcggcggcagcttgcgtcggagctcgaccaggtgcgtgggctttccaagcggctgaaggcggccgctgaggccatcgcggctgagtctgcagcggcccttgctttgcctgtggtggtgccgccgcctcagcttcctgttgggtatgcgcactcgcagttcgcactcgctgatcctgtgacgcccatacctggtcaagttgctggtgctattgttccggtccgctcagtgatgcagcgcgggccactaaccgtgtcagtgactcacacagagtccttcgagaaggagaagcggacaccaaaggcgaatcagttgtatcaaaattcagagttcttgcttgccaaggataagtttccgccttcagattcacatggtcgtaagaaacccaagcaccacaagaagaagcatcgttccttagcatctcatggtgctggttatgatgctgagcagaggctatactctcatgcttttaagaaatctatgtcgctgctttctaggctaatgaagcacaaatttggttgggtgtttaacaagcctgtagatgctgttgcgcttggtttgcatgattattttgctattatcaagcacccaatggatcttggcacgataaagacccgactcacgcatggccagtacaggaacccgagggagtttgctgatgatgtacggctgacgttccataatgccatgacctataatcccaaggggcaggatgtgcatttcatggctgagcagttgttgggaatctttgaggcgcagtggcccgaaattgaggctgaggttcagtaccttgcctcatgtccgccattgccaaataagtttccacctccaccaattgacgtgcgcttccttgatcggtcagattctgtaaaacaccatatggtgttggactccaagtcaaggccattaagtcatactcccacttatagtgccaggactccatcgatgaagaaaccaaaggccaaggatccggataagagagatatgacaatagatgagaagcggaagcttagtaacaaccttcagaatttgccaccggagaagcttgatgttgttgtgcagatcattaagaacaagaatctgtctgttagacagcatgatgatgagattgaggttgaaatagatagcatggatactgagacactttgggaacttgatagatttgtggccaactacaagaagaacctgagcaagcaaaagaggaaggctgagcgagccatgcttgcaaggcaggatgcagagttgcatgcacaacatgttgccccacaacaaccaagtcaagagcctaatattggtgtaaaatctccaaagcaaaatttgattgtggatgagaaattagctacttctgtgccagaacaagctgataataatggacaaaatgcaagtagatcgagcagctctagcagctccagcagtgatacaggatcctcttctagtgactcagacagtgatagctcctcttcagatggatcagatgccgccaattcatcttga

SEQ ID NO: 11356 - DNA, 1371 bp, Oryza sativa
  Clone ID: TFbOSC400239j.C1.o45.fg
atggcctccgccctgctcgccggccggggcggggttaaccaccaccaccaccaccaccagtggggggagacccgtgccccgctcgcgcccgtggcccccaattccgatcccaaccaccctctccagcagcgcgccaacggctcggccacgaggccgccgccgtcaagctacgtggcgctgcggccgggggcaatggctcaccgcgaggcccgcgcgctgcgggaccgcctcgccggcgagcttggccaggtccgcgccctcatcgcccggatcgacacgtggcagcagggtcaggtgaagcgccatggctcgcctcgccgggacctccccacgccgccggcgaagctcagggcggcgatgcggaagcgttgcgagcagatcctggcgaagctgcggaaggacaagcggagcatctggttcaacgcccccgtcgaggtcgaccgcctcgggctccacgactaccacgcagtcatcaagtgccccatggatctcggcacggtgagggcgaacctcgccgccggaaggtacccctcacacgacgacttcgccgccgacgtccggctcacgttcagcaacgcgctgagatacaaccctgcggggcacgaggtccacaccttcgccggcgacctcctggcgtcctttgagaagatgtacaaggcatctatgtcttggttcgagcaggaactcaagctccttgagccgccgatgccagtgccgccaccggaattgccaccggcgacagctccggtgcaggtgaaaccaagggcagcgaatgtgaaaatgcggaagccgaaggcaagggagccgaacaagagggatatgacgctggaggagaagaacttgttgagggttgggttggagagcttgccagaggagaagatgcataatgtgctgcagattgtgcggaagaggaatggcaatcctgagctggttgggggtgagatcgagctggatattgatgagatggatgtcgagacacagtgggagcttgatcgattcgtcaacaacttcaagaaggcgctcaacaagagtcgacgggctgccattgttaatggtgaaaatgccgatgtcattgatgcttccgtggctaatgatagtgatatgctggtgaatggcagtaccgctacgatggtggacaacggtgatgtgacaatggcaatagagagcaaggatcctgacaagatcactacacaggccgagcagttggatgagtatgtagatatcggggatgaaatgccaacagcaacttaccaatcagtggagattgagaaggatactgaggccgcgagcagtgggtcctcatcatccagtgattcagggagctcaaaggacagtgtctcagaatctggcaatgcccattctctggtgtaa

SEQ ID NO: 11357 - DNA, 3720 bp, Oryza sativa
  Clone ID: TFbOSC400938j.C1.o9.fg
atgccgcggtcgccgtcgccgccgcctgacaggcaccaccaccaccaccacccggcgcgccggagggggcccgccggggcggcggcgccgccgccgcggtcgctgcggccgaggagggcggcggcgccgtcgtcgaggccgctggtggacgacttcttcccgttcccttcctcgccgtcgtcgtcgccgtcgaggccgccgccgccgcagcagcagcagcagcggaggccgtcgccggagccgtcgagctccgactcggacggccatggcggcggcggcgggggtgggggtgggggctcctcggcctctgaccgacggcggcggaagctcaagctcgtcgtgaagctctcacagctcgcccccgaccagaaccaccaccggcggggcccgcctcccccctcgtactcggactcctccggcggcgagcaggagcaggaggaggaggaggaggccggcggcaacggcggcgacgacgtcagcggcggcgaggagcgggtcaagccgcccaagaagcgccggatcgagccgcgcggcgacagatctcgccatcgggaggtgcggggagagaccgccaaccccaagctggttggtgggaggagcgacgccgccagcgcgccgaggacgaagcgcctcccggtgccagggatggcgaggacgacgccgctgcctgaccggaaggcgctggacatgattctcgacaagctgcagaagaaggatacttacggagtgttcgcggagcccgtcgatccggaggagttgcctgactaccatgatgtgattgagcacccaatggactttggcaccgtcaggaggaagcttgccaggaatgcatatcgctcgttcgagcaatttgagttacagcccaacagatgcaatggcatagcattatatcaaattaatcacaggtttacaattacatctgtagatttcgtctttctactggatgatgtattcttaatttgcagtaatgcgatgcagtacaatgcacctgatacaatctacttcagacaggcccattccatacatgaattggcaagaaaaaagtttcaggaactgagagatgaaggcattcccactgaaaacctaataaagagtgaacagaaaattagaccacaccctagcaatagagaaccaattaagaagcctgttttgaggtattcagatgatgatctaggcttcatgtcccacaaagagcaagttagtagaccaaattccaaagacttagaggatgatcgaaagttcaaagatcaagttaagaagacaatttcaaggaattctgaggatgtcttaagttcctctttccagaaagaacgagttaagaaatccagtgtcaggaattcagacgatgatttaagttcctccttccaaaaagaacaagttaagaggcccatttccagaaactcaggggatgatataagctcttcattccacaaggagcaaggaaggaaagtcatctccagaaattcagaaaatgatagagttgcatctttccacaaacagcatgacaagagacccacttcccggagttcaaaagatgaattgccatcgcagaaaaaacacataagaaagcctgtttgcacgaatggtgaagaaccagatttctcatcacaccgagattcagtagagaatccagtttgcacaaatggagaacatgtaggcgtcttgtccccgaaaaggctagttgagaagcccatttgccgaaatagagatgacctaggtcactcccacaaaaaagggttgaataataagtctatttgtggagatggacaggatgatatgggttactcctgcaatggagagactgttaagaagccagtgcgtatgaatagccaagatgctttgggttcagatgtttctgctgcaaccattgcttctgcaggagatgattctaatggtttaagcatgtcgcaggcaaatgctgttgagccccaagattgtattgcagccaacgggtttatggacaaagatatcagttccccacttgatgaaataagatctgagaagccagatgatatttcagctagggaaagttcagtgaagccaagctacaagtcaattgtagtagatgagacacgacgcaaaacatatgatacatatgaagaacagccttcatcggaatctgacacaattttcgacgtattctgtgaggagccaaaagagcttgttaatgttggacctcattctgagcactcatatgcaagaagtcttgctcgttttgctggctcacttggtactcaaggctggagacttgcttctgaacgcattcaacgggtattacccactgatgtaaagtttggacgtggttgggttggagaatacgagccaccattaccacctattctgtttgtgcaaaaccaaccgagaagtctggttagctcagaggctaatgtacaaaggagtgcttcaatgactaggaataatgaaaggatcagaccaacagaaagtgtcaatccaaaggatatgagtttgagtctacttaatcgaataaccactggtaataatgtggttggagttcctggccctcttgaaagtccagaaattaagccaagattattcggtgttacagctgagccccagcagaggagcactgaagcaccatctctgcatgaaaatcatcgggcgcctggaagtgttgcaaagaccaaaagggcacccagtgaacaaacaaggaaagggagctcgtcctccagttctcgccctcttcaaaagcaaccacagaggcctgaaatttcaaaaggagcttccaatgtgcttgatatgccttctttgaacaaaatgactggccagcccagacccttcttccaaccagcagaagcagctataactcagcaaatgagaaaaagcgagacacctaaaagttctcatccacttgaaatggcacaccagaggcttgagtgtgcaaaaggtgcttctggtgttcatgatatgccttccttaaacaatacaagtgggcagcctaaacccttcttccagtcgcaagaagcagctgttccacaacccagaaatgaaaatacatgggtataccatggacgacctggtgatgggaagtatgggacaaccgacaaaagcagaccaatgagcagcatgggttttatcactaaaaatcaacaagtaaatgcggccagctttgcaatgaatttgaacgggcaaaagaatgtcaatgacaatgtaaaatcagtgggatcaactgtaatgcctgtgcaggtaaatacaacaaacagagggcctgattcttcccggaatattttctcagcatttccaccagctgtcagggagaatcagagcattccatctgctccagtggctcaatcttggatctcatttggtgcttcgtcagagagcaaaccaaccattgtcagtccaactttccatgatagtaattctggctggaagatgccatttgcaaatgcccgtcctgatgaagcaaagatgactgctgttccacagttctttaggcaacccgttcagatggttagagaaagtccagggcaaaacaagggtttggtaatattcccccagttggtccagacagacttctcaagatcacagggccaaccacaatggcaaggcctggttcccccgatgcaacagaaaccaaacaaggatatgcttcgcccagacttgaacatcgggttcccttctcctggttcaccaccagctcgacagtcttcgggcatcaatttggaagcacaacagccagaccttgctttgcagttgtaa

SEQ ID NO: 11358 - DNA, 2254 bp, Oryza sativa
  Clone ID: TFbOSC24127j.C1.o1.fg
atggggaagacgcagaagttctccaaggggcacccgctcggcttcgtgccggattaccggcacggcgtggagacggtgggggagtcgaagggctgtatcgggagcccggagcggatcgtatcggggagctcgtgtgctgtgccgaagaggaaatgcggaatcctgaagacagaggatggaggggagcttccggggttcaatgtgccgcgggacgtcttcatgctgccgaggatgtcgccttcggataaaaaggacctcgagatgaggctccgcaaggagcttgagcaggttaaggccctacagagtaggctgtttttgaggccggctgcggtgagcatgaatggcggggcggcgtcagcttctggagacgtagttgcaaagagaaacgatgcgaagcttaaacggagcaattcagtgcagtctggcagaggagtgccaccatcagcagccacacctgtggtcaggtctgcaaactacgcagaagcttttaaacaatgtggcaaccttctgaagaacctcttcaagcatcagtgggctggtccgttccttgcgccggttgatgttgtacagttgaacattcctgattattttgacataatcaagaagccaatggatttgggtaccatcgagaaaaagttgaatgcaggcatgtactctacaccttgggattttgctgcagatgtgaggcttacttttgacaatgccgtgacttataacccagtcggtaatgacgtgaatttaatgggcaaagctttgacatgtatttttgaaactagatggaagtttatcgaaaagaagcttccttcactagatgatagattctctgtgagaagagagccatctcaaaagggtgcagttaagaaagataccattgagaaagattacccttctgagaaaaagcactcgacaaaaggtgtacacaagaaagatatgtttaaaaaagaggatgcttcaactaagccagctttgcaaccaaagaagagaaaagcttctcccttggttcagggttctcttgaaatacctgtagtagaagctgataaggtcattgatgatgctcaagtggtacagccttctaaggtgattgatgatgcccaagtggtgcaggcttttaaggtgattgatgatgctcaagtggtacaggcttctaaggagattatgacggacagacaaaagtatgagctaagcgtaagacttcaatcatatggtgggttgattccaaatcatgtagttgatttcataaggagccaccttcctgatgataatgagggtgatgaagatgagttagagcttgacatgaatgtcctaagtgatagtacattgtttgaacttcagaagcttcttgatgactatgatagggtaaatcagtcaggaaaccctacaaaagatgagcatcgtgaggttgagtttgaaagtgaatatgggcttagcaactcatcgatgcatcatgaagaaggtaatgagctcgttgaagaagatgttgatattggtgggaatgatcttccacctttgacgtatcctcctgcagtatttgaaagtgaaactgcagaaagaagcagcaagcatagcacttctagcagttctagtagtgattcagaatcatcctccagtgattcagattcaagtagctcttctggaagcgatctggatgtcaatgttcctccatcaacaagtggggccaaggacaacacgcaatctgcggttaggttggatcaggaaaacgatccactgagctcgaccaatctaccacaacaaagtagtgatcctgtacctatttctgccgaagatgagggggagaatgtgtctgagaaacaggtcccccctgcaaagcaataccgagctgctgttttgttaaaccgctttgctgatacaatttttaaggctcgtgagaaaactcttgatcagagagctcggatacaagctgaggcaaaagcagctgaagatgctcgcaagagagctgaggcagcagcagctgctgaggctgctgcagaagctaaacgccaaagagaacgtgagagggaagcggctcgtaaagccttgcaacagatggagaaaactgtagacatcaatgaagggaacctctttttgaaagatcttgaaatgcttggaactgttacatcaggtgaacagtttcccagctcggttggtgagacgagtccaactcatacgcctgaaggccttggatttcagctaggtagcaaccctttagaacagcttggtttgtatatgaaaaatgatgatgaagaggatgaggaag

SEQ ID NO: 11359 - DNA, 502 bp, Oryza sativa
  Clone ID: TFbOSC12766j.C1.o1.fg
gtaactgattatgcagaacgggtgaacaggcccggtgactttgcaacattaaggcagaagaacaaggatggcatgtacaacacactggagcaattcgagaatgatgtttacatggtgttccagaaagcaatgtccataaacagcgaggacactataccttacagagaggcaatgtcactgctacatcaagccaagcaggtattcctgtccctgaagagcaaccagatgtactcggagtcagagctcgcagcgtggcgccagaaaaatctggtgagccagtcgccggccaagctaaacgggaaattcgatggcagcaaagtaggctccggctccggcgccggcggcgccgctccgaccacaccacagcggccgagcgcgccggcgaggaagaagatcgccgccaaaaccggcgctgtcgccgccgccacctcggttaagagcacaacgaggcagcgggcagcgagggagagcaacggtgcgccgggaagaagagcaagaaaag

SEQ ID NO: 11360 - DNA, 1518 bp, Oryza sativa
  Clone ID: TFbOSC400795j.C1.o14.gm
atgggtgccgcgagcgagcgaaagtgcacggcgtgcggcggcaccggtggcgacgaagtgcagatcgacatcgatcggcgaagaacgtctcactggtgctcctcctggagtacatcatccgcccgcccgccccgaccccgttcctcgtcctcgcccgcgccgacgggctcgacgacaccaccggcgcccccggcgttccgcctcgagatgggcgtggtcggcctcgccgagaactaccacgcgtgcgtcggagggggcggctccgtgcttgaggtgtcgtaccacggcatggccgtcgccatgggccgcgtgccgcggttctgcgtccacgggaagcgggcgggcggcgagcgggccgacggcgtggccagcgcggaggcgacgtcggtgcgcgaggagctgcgcggcctgatccggagcgagcggcagatcgtgggggcggccgagttcagcgtggaaggggagatcaagggcttcggctatctccgctgcaaggcgctctgtgttgttggtcgccgtggcctcggccggcgcgagcggcaagtcggcgcggttcgagctgctccggccgacctgacgcgcatgcaccgggagcggatggcattcatctcgtcgcgcgggaggcgccgcgtggcggagaccgcgtccgccttcgtgatgctgctctcctccggcgtgtacaccgggacgggccagtcgcatcccgccacctccagccctactatgcctcgcccaaagcgccgccggtcgcccttgccgccgccggcgccgcctggcttccccacggagcggaaacaccatctgccggagctgcagcctccagcggtggccgcggcgtctcctggcgtcgctggagttcccgccgatcttggcgacgcgctcctgcgctgcggcaagctcctggacaagctcctggagcacgaggacgggtgggtcttcgccgagccggtggacgcgcgcgccctccgcctcgtcgactactacctgcgcatctccgaccccatggacctcggcaccgtccgccgccgcctcgagcgccgccgctacgcggacccgtgggcgttcgccgccgacgtccggctcaccttcaacaacgccatgtcctacaacagcgcgggcgaccccgtgtacgagagcgccgccgagctctccgaaatcttcgaggccgggtggccctccgttctcgcggcgccaccgcgcccgcccgacgccgagcgcaagcggaggctcagtggtttgctcccgcggctgccggtgggtgcacaggtgacggtggccgagatcatgaagaagcgggacgggtgcctgcgggaggtgaacgggatgatggaggtggacctggacagggcggactccgcgacgctggacgagctcgaccggatggtcgcggagcacggggccgccctcgccggcgtggttaaggtgaagcagggtgcgttggtgatcactgatcaggagcacaatgcaaatttcagtggatggactatcagtctattcacagttgggctcctaggatga

SEQ ID NO: 11361 - DNA, 1026 bp, Oryza sativa
  Clone ID: TFbOSC400239j.C1.o49.fg
atgcggaagcggtgcgaccagatcctggcgaagctgcggaaggacaagcggagcatctggttcaacgcccccgtggaggtcgaccgcctcggactccaagactaccacgccgtcatcaagtgccccatggatctcggcacggtgagggcgaacctcgccgccggaaggtacccctcgcacgacgacttcgccgccgacatccggctcacgttcagcaacgcgctgcggtacaaccctgctggacacgaggtccacaccttcgccggcgacctcctcgcgtcctttgagaagatgtacaaagcgtcggtgtcttgtgccgccccggaattgccaccggcgaaagctccggcgcaggtgaaaccaagggcagggaatgtgaaaatgcggaaaacgaaggcaagggagccgaacaagagggagatgaccctggaggagaagaacttgttgagggttgggttggagagcttgccagaggagaagatgcataatgtgttgcagattgtgcggaagaggaatggcaatcctgagctggttgggggtgagatcgagctggatattgatgagatggatgtcgagacacagtgggagcttgatcgattcgtcaacaaattcaagaaggcgctcaacaagagtcgacgggctgccattgttaatggtgaaaatgccgatgtcattgatgcttccgtggctaatgatagtgatatgctggtgaatggcagtaccgctacgatggtggacaacggtgatgtgacgatggcaatagagagcaaggatcctgacaagatcactacacaggccgagcagttggatgagtatgtagatgcagtggcggacccagaatttttgtcctggccctgggtccgcccctgtgtagatgtcggggatgaaatgccaacagcaacttaccaatcagtggagattgagaaggatactgaggccgcgagcagtgggtcctcatcatccagtgattcagggagctcaaaggacagtgtctcagaatctggcaatgcccattctctggtgtaa

SEQ ID NO: 11362 - DNA, 1077 bp, Oryza sativa
  Clone ID: TFbOSC404150j.C1.o1.fg
atgcggaagcggtgcacgcagatcctgacgcggctgcggaagcagaagatcagcgtgtggttcaactcgccggtggacgtcgagcggctgaagctgcacgactaccacgccatcatcaggaaccccatggatctcggcaccgtcaaggagaacctcgccttcgggaggtacccctcgcatgaggcattcgccaccgatgtccgcctcaccttcagcaacgcgctgcggtacaatccggccgaccaccatgtccaccgctacgccagtaacctcctcgccaccttcgaggggttgtacaaggaggccttgtcctggttcgagcaggagtgccagcgtctcgagccgccaatgccgctcgctttgccgccgccgccgcagcccccggtgcctatgccgatgcaggcgccgccaaggattgggggtggggggaggaggccgaagcccaaggcgagggagcccaacaagagggagatgagcgacgaggaaaagcacaagttgagggtggagatcgggaatttgcccgaggagaaaatggggaatgtgctacagattgtgcagaagaggaataccgatccggcgctaatgggagaggtcgttgagcttgatttcgacgaaatggatgtcgagacgctgtgggagctcgatcgatttgtggtcaattgcaagaaggcgctcagcaagagccggaggactgtcgcgatgaacggtgatgctgttgatgcgactgctattgttccaactgaggacgataccgtgcaggagaatgacacgccggagaagagggtttcagaggttgatatggttgatgagtatgttgatattggcgatgagatgccgacggcaaattaccagtcggtggagattgagagggatgcccaggtgactgaggtccattttggcaacgtatttttagtagcgtggtataggaaattggatgggttcttgttcaagttgttggtaatccattcaaattgctatgggacatacaccttttgggttgaaggtgttttcccctatgctgactccattgtcattgcaaccaaaccaaacatccttatattctgtcttgactcttga

SEQ ID NO: 11363 - DNA, 1851 bp, Oryza sativa
  Clone ID: TFbOSC900093j.C1.o5.fg
atgtcggcgccaccgcggaagcggaagaagaaggggcggccctccctcctcgacctccagaagcggaccctccgcctcgagaagctgcaggagccgccgccgccgccaccgcccccgcagccgcggcggtccacgcggaggaaccccgccggcgtcgactccggcgacgaggggacggcacccggcggccgccgcgagaagaagctccgcctcgtcatgggcctccccgacggatcggccaagggagaaaagacgaggaaagcgacggatgggagtgaagagccgtcagattccgggcccacgacacctttgccggacaaaaagttgttagtcttcgtccttgataggctgcagaagaaggacacatatggtgtattctctgaccctgttgaccccgaagagctgcctgattaccatgatattatcaagcatccaatggatttttcaacaattcggaagaagctcaataaaggggcttatggcaacttggagcaatttgaggtcagtgtcagagcgtatggtgatttttgttggcctttcctgtgctgtttcgattttccttcgttaacagtcagtacatattcaagtcacactcaaaagaaatcacaagtacttaatatgaaaatgctgctaagtgctaacacatcaactgttataaagtgtgttgagcctcaggatgatgtattcttgttaacctcaaatgcgatgtgctacaattcaccagatacaatatactatcgacaggcacgggcgatccaagagcttgccaagaaggactttgagaaccttaggcaggatagtgatgcaagtgagccagaaccagaaccggaaattaaaccagatcctgaaccaaagccacaaccacggaggggcaggcctccaaataagaacactatcaaacagaaagttgggaagccaccggtagaacgcgctactgcagacttttctggagcaacactcgctagtgttggaaataatggacatcgtacgcagccaccatttgatctgcaacggcaagtaatgaatggatcctttatcgcagatgtactgagagcttcttttgccagtcgaaataatggatacaattggtctaacgagcgcaaattggaaagaattgaagattactcagggtctatcggtaaatggtcagcaaaaagtgggagaaaaccaattctgacagaagaaagtagccgaagcacttattgtcagcctcaaccttcgagttcaatatatgagctgccggttggggttcagttgcagcagtcctatccccgcagcttggcacgttttgctgcgcagctaggtcctgtcgcttgggagattgcgtccaaacgaattgaacgtgcccttcccccaggaacaaagtttggccgtgggtgggtaggagacggtgaagcaccgaacgcaactcagccaccagtgcttactacatcttcaacagccttgatacacccaagtagtacagaaacatcaagtgaacagccaactcataacggtacggccagcacaagccattcagcaggacctcagccatcttccgcaccatatgcctcttctacaatcacaactcatagggtcaattgtcagtcattaccaagccagcaacacggatcagtgccacaggtttcagcagaaagaggtgaacatggtgctgaggtgaagggcaaccataataatcttcatgaacggccagccattcagcacactgttaatggcttcagtgctgtttcagagaagggtattttttacccggtctctatatccaaccggatatatacggccattgaaataggaaacttagccccacaaacaacccaatctgaaattcgctccatagaagatttgaactaa

SEQ ID NO: 11364 - DNA, 1851 bp, Oryza sativa
  Clone ID: TFbOSC900155j.C1.o11.fg
atgtcggcgccacccgcgaaaacggaaaaaaaggggcggccctccttcctgacctccaaaagcggacccttcggctcgaaaagctgcaggagccgccgccgccggccacggcccccgcagccggggcggtccacgcggaggaaccccgccggcgtcgactccggcgacgaggggacggcacccggcggccgccgcgagaagaagctccgcctcgtcatgggcctccccgacggatcggccaagggagaaaagacgaggaaagcgacggatgggagtgaagagccgtcagattccgggcccacgacacctttgccggacaaaaagttgttagtcttcgtccttgataggctgcagaagaaggacacatatggtgtattctctgaccctgttgaccccgaagagctgcctgattaccatgatattatcaagcatccaatggatttttcaacaattcggaagaagctcaataaaggggcttatggcaacttggagcaatttgaggtcagtgtcagagcgtatggtgatttttgttggcctttcctgtgctgtttcgattttccttcgttaacagtcagtacatattcaagtcacactcaaaagaaatcacaagtacttaatatgaaaatgctgctaagtgctaacacatcaactgttataaagtgtgttgagcctcaggatgatgtattcttgttaacctcaaatgcgatgtgctacaattcaccagatacaatatactatcgacaggcacgggcgatccaagagcttgccaagaaggactttgagaaccttaggcaggatagtgatgcaagtgagccagaaccagaaccggaaattaaaccagatcctgaaccaaagccacaaccacggaggggcaggcctccaaataagaacactatcaaacagaaagttgggaagccaccggtagaacgcgctactgcagacttttctggagcaacactcgctagtgttggaaataatggacatcgtacgcagccaccatttgatctgcaacggcaagtaatgaatggatcctttatcgcagatgtactgagagcttcttttgccagtcgaaataatggatacaattggtctaacgagcgcaaattggaaagaattgaagattactcagggtctatcggtaaatggtcagcaaaaagtgggagaaaaccaattctgacagaagaaagtagccgaagcacttattgtcagcctcaaccttcgagttcaatatatgagctgccggttggggttcagttgcagcagtcctatccccgcagcttggcacgttttgctgcgcagctaggtcctgtcgcttgggagattgcgtccaaacgaattgaacgtgcccttcccccaggaacaaagtttggccgtgggtgggtaggagacggtgaagcaccgaacgcaactcagccaccagtgcttactacatcttcaacagccttgatacacccaagtagtacagaaacatcaagtgaacagccaactcataacggtacggccagcacaagccattcagcaggacctcagccatcttccgcaccatatgcctcttctacaatcacaactcatagggtcaattgtcagtcattaccaagccagcaacacggatcagtgccacaggtttcagcagaaagaggtgaacatggtgctgaggtgaagggcaaccataataatcttcatgaacggccagccattcagcacactgttaatggcttcagtgctgtttcagagaagggtattttttacccggtctctatatccaaccggatatatacggccattgaaataggaaacttagccccacaaacaacccaatctgaaattcgctccatagaagatttgaactaa

SEQ ID NO: 11365 - DNA, 1692 bp, Oryza sativa
  Clone ID: TFbOSC401369j.C1.o14.fg
atggcctcagggccgccgtcgtcgccctccagcaaggcgttctcccgcaaatcccacgcccacgcctccggccccaactcctccaaggcggcggcggcgggcggtggcggcgggggtgtcgcggcggccttcgatgctcacaacgggacgcacgtccgcaccgtcaccttctcgctgtcgtcctcgccggccgcccgcagggagctccgccgccggctcaccgccgagctcgcgcaggtgcgcgccacttgcaagcgcctcagctccctcccggcccccgcgccttcctccgcgctctccgccaccgacccttccaccccgctgcccccgcacccgccggtctccaagcacaagtcgaagaaggggaacccctcctccaacccgggcctctccgcggaggcgcggcggaagctctacgcgcccgtgttcaagagctgcggcgcgctgctcgctaggctgatgaagcacaagcacagctgggtgttcaacacgcccgtcgacgccagcgcgcttggcctccacgactaccacaccatcatcaccaagcccatggacctcggcactgtcaaatcgcggctggccgctgggcactacaagtcgccgcgggagttcgccggtgacgtgcgccttacctttcagaatgccatgaggtacaaccccaaagggcaggatgtgcacttcatggcggagcagctgttgaacatgtttgaggagaagtggccagaaattgaggccgaggtagcacagctgtcaccacagccgccaacgccatcatcggctgcacccaggaagccgaaggagatagataattctaaggtgttagagaggtcggactcaacagtacatgctgcggggatggaggccactccaaagcagaacactggtcggcccccagttttaaagaagcccaaggcaagggagcctaataagagggagatgaccttctgggagaagcagcggcttagtaataatctccaggagttgccaccagagaaacttgacaatgttgtgcagattataaagaagagaaacttgtcactcagccagcatgatgatgagattgaggttgatatagatagctttgatgttgagacattatgggagctcgataggtttgttacaaactacaaaaaaagtataagcaagaacaagcggaaggctgagaatcccgtggcagggcaggatgagatgaatcatgatatagagctagagaagacagagcatgcaaggttggatgaagtagagcaggatcagatgcctccagtacaagagacgttacataatcctgagccagaatcaattgatatcgaaccacctaaagaaaacacagcagatgataatgagaggtatgtaggctcatcatcacctgttcatttggaagatcagaagggggagaatgcgggtagatcaagtagttctggaagttctagtagcgattcaggctcttcgtctagtggtaaatgctctcatcctttgcagaaatttatattagcagcatttctgtttgcaattaactctataaaggatattttcatatacatctgcataacatatgaaatttaccgtgagaagcatatgcagatacagacacagatagttcatcagcagatggctctgatgctgcacagtcacccagaacgtaacatctataggccaggggatggctttggtacggtttatttggttttttaa

SEQ ID NO: 11366 - DNA, 1579 bp, Oryza sativa
  Clone ID: TFbOSC3556j.C1.o1.fg
gtcgttgcaatcaaaagtgaaacggctcaaggaggagagggaaaagagcatctccggcgagacgaagccgccgccggcggcggcggcggtgaaggaggaggaggaggatgtacggaagggatcaccggaggaggccggcgccgtggaggacagggtctccggccacgaatccggccggtcatgcaaggagtcgaactcgtcagatctgaagcggccggagaacgaccccgcggtcgccgacgacgacgaccgggaggcggaggaggaggaggaggcggcggcggcgcccgcggccggcgacatcgccgtgaaggaggaggcgtcgggcgagtcggtggctgggtcgaaggaggcggacgtcgagaaggagagcagcgacgtgcagagctccgccagcccgtcccgccgccggcgacggaagggcggaggcggcggcgaagaggcggaggcggcgtcgccgtcggtgtccgtgcccctccccgccgccgaggccgagccgctcgtcgccttcctcgagtcggtccggaccagcaaggccggcgccgtgttcgagcggcggctcgatagccaggatggggagaggtacagtggcacgatcaggcgccatgtggacctggagacggtcaggtcgaggctggtgggtgcaacggcggcggcggcggcggcggcgtgctacgcgtcggcgtccgagttctaccgcgacatgatgctgctctgcgccaacgcgctcgtcttcttcccgcgcggctcgccggagcacgccgccgcgctccagctgcgcgcgctcgtctccaagcaggtctccaaggaccggcagcctcacgccggggcgaaggcccccgcggcggcggcggaggaggaggagaagaagaagccggccaaggccgacgccgacatcgctgggccgctgctcgagaaggcgccgatcatcgtctgccggaagcggagctccatcgcgaaggccgcggcggcggctgccaagggggagaaggcggagaaggcagagacggacaagaaggagaaggacggcagcgaggagaagaagaaggctgcggcggcagcgacgacggcgacggcggcggccactgccaaggacaagaaggctcggggcatgaggacgaacaagagccggggacccgcgaggaatcagaagacggcgaagctctcggagaccggcgaggggaccaagaagtccgacaagaagggcggcggcggaggcggcagctcttcggcaggggcggcggcgggcgaggttgccaagaagcgaaacgccgtggatttcctgaaccggatgaaccagaacggctcgccgtcgacggagagggtgtcgttgctggagacgctgaagctctccgcggcggcgacggaacagcaagagacagtcgtagtcgtcgtcatccgggaagggcgacggccggaaggaggccggcggctcaggctccaagaagggcgccgcgcctcgacgccaccagggaggaggatcggtcggccaccgaagcgggcggccgcgccgcagacgccgccccgttccaagagggccaaggacgacaagccgaccaggaagcgcgggaagaagtga

SEQ ID NO: 11367 - DNA, 1815 bp, Oryza sativa
  Clone ID: TFbOSC407198j.C1.o1.fg
atgcagtcgaggtgcccttccgccgccgtgttcacccccaccacctgccgcctccggttccgcgtcctccaccgccggttctccggcggcgtcaccgccgagaacgaggacgccgacggcggcgaggaggaggaagaggccgacgccgccgccgtcgccggctgggtggaggaactccgcgagctgcgcgtcgccgagctccgccgcgaggtcgagaaatacgatctctcgatcgggtcgttgcaatcaaaagtgaaacggctcaaggaggagagggaaaagagcatctccggcgagacgaaaccgccgccggcggcggcggcggtgaaggaggaggaggaggatgtacggaagggatcaccggaggaggccggcgccgtggaggacagggtctccggccacgaatccggccggtcatgcaaggagtcgaactcgtcagatctgaagcggccggagaacgaccccgcggtcgccgacgacgacgaccgggaggcggaggaggaggaggaggcggcggcggcgcccgcggccggcgacatcgccgtgaaggaggaggcgtcgggcgagtcggtggctgggtcgaaggaggcggacgtcgagaaggagagcagcgacgtgcagagctccgccagcccgtcccgccgccggcgacggaagggcggaggcggcggcgaagaggcggaggcggcgtcgccgtcggtgtccgtgcccctccccgccgccgaggccgagccgctcgtcgccttcctcgagtcggtccggaccagcaaggccggcgccgtgttcgagcggcggctcgatagccaggatggggagaggtacagtggcacgatcaggcgccatgtggacctggagacggtcaggtcgaggctggtgggtgcaacggcggcggcggcggcggcggcgtgctacgcgtcggcgtccgagttctaccgcgacatgatgctgctctgcgccaacgcgctcgtcttcttcccgcgcggctcgccggagcacgccgccgcgctccagctgcgcgcgctcgtctccaagcaggtctccaaggaccggcagcctcacgccggggcgaaggcccccgcggcggcggcggaggaggaggagaagaagaagccggccaaggccgacgccgacatcgctgggccgctgctcgagaaggcgccgatcatcgtctgccggaagcggagctccatcgcgaaggccgcggcggcggctgccaagggggagaaggcggagaaggcagagacggacaagaaggagaaggacggcagcgaggagaagaagaaggctgcggcggcagcgacgacggcgacggcggcggccactgccaaggacaagaaggctcggggcatgaggacgaacaagagccggggacccgcgaggaatcagaagacggcgaagctctcggagaccggcgaggggaccaagaagtccgacaagaagggcggcggcggaggcggcagctcttcggcaggggcggcggcgggcggggttgccaagaagcgaaacgccgtggatttcctgaaccggatgaaccagaacggctcgccgtcgacggagagggtgtcgttgctggagacgctgaagctctccgcggcggcgacggagcagcagaagaagtcgtcgtcgtcgtcatccgggaagggcgacggccggaaggaggccggcggctcaggctccaagaagggcgccgccgcctcgacgccaccagggaggaggatcggtcggccaccgaagcgggcggccgcgccgccgacgccgccgccgtccaagagggccaaggacgacaagccgaccaggaagcgcgggaagaagtga

SEQ ID NO: 11368 - DNA, 2205 bp, Oryza sativa
  Clone ID: TFbOSC402265j.C1.o12.fg
atggagtttgggcagcagaggcagattaagcggggctacgatgaaatggcgttccggggcatggcgtcagcggcgccacggggttacgcggagaccgttggcgagtcggagggcgcggcaggcagccccgttcgtgttgactccgaggactcttcggcccccaagcgcaagtgcatcagcctaaacagcgacggcttcgatgtcaagcgggagattttcgtcccagccaagatgtcctcctccgagaggaggcatctccggaagaggttccgcacagagcttgattcggtccggaatctcctcaagaagccggagtttgctgtccctgtccctgtcaatagagctcccgcgctctcgtcctcggctgcccctcgaggtaagaagggacagcgtggtaaccatgtggtccgtggtgccaaggggcgtttcttgcctacaaagccccgacctgaggcttccacggtgttgactgaggatgcgatttttaagcaatgcgatgctattctgaaaaagctgatgactcagaaatgtagtaacatattcgactccccggttgatgctgttaagctgaatattccagattattttcaaatcatcaagaaaccgatggatcttggaactatcaggaataagcttgactctggttcctacacgagtccatctgaatttgcagccgatgtacggctgaccttttcaaatgcgatgacttacaatcctcgtgggcatgtagtgcatgattatgccattcaactaaacaagatgtttgaatcaagatggaggacaattgaaaagaagctggcttccattgccacagaggcgcacgtcgaggttgacagggctgactcaaagaggaggaagactccccctgtggactgcagtgaggtgtcaacagagtgtgtgaggccaacagagtctgttagaccaacagagtctgtaaagccaaaaatgacattcgaggagaaagaatcatttgggaactgtttggcatctttgtctgaggatccggaggtaccttcacacatcattgatttgttgcagcaatgcattgacaacaacacagatcagcttggtgatggagagatagagattgatatccatgctgtcagtgatgacctactattcgagttgaagaaacatgttgacaagtatttgcaagagagagagcagagccagcaggcaaaatctgagccttctgagaatgaggctgctaatgtatctggccttagccactcctctacaaatccctgcaaaggtggtgatccagttgaggaggatgtagatatttgcgggaatgcatcccctatattgatagaaaaagatgcacacaacaatcctaacaagtgtggtagcccaagtagttccagcagtgactctggatcttcttccagcgattctgagtcgggcagtgacagtgaaagcgaacaagaaaaaggtggtagcccaggaaagccgaagggaagtaagagatctgaacaactggtggagcaagaaaagagtgatgttataagtccagtcgatgccatccgtcctgctgatgatgtggagctccgtgagcaggataacgagtcaaagcctgccccagagggggagaattcaaaacccgacaggcaagtctccccagacaagctcttaagagcagccctccttaggagtcgttatgctgatgtgattgttaaggcacaggggattctcagccagggtggagacaaacaggaggagctggaaaagctccagaaggaagagaaagcaaggctgttggctgaaggaaatgcagctatggaagctcgaagagctgaagctgaagctgaagccaagcgtaaacgggaccttgagagggagaaagctcgccaggccctgcaggaggctagtgaaaaaaactgcatttactggtgtcgagctttctttttcccgctaaaatttgagtggtttaacttaatgcagatggagagaacggtggaaatcaatgacaacctccatctaaaggatttggaaatgcttggaacggcaaccacagaacatattgtgagttctgttgatgagactagtcctgagcattcccaggatggcatgcccagttttcttcctggatcaggcaatccattggaacagctgggactcttcatgaaagcagatgaggaggaagaggaagaagatcctagcagtgtccccagcactaaagatgcagaggaaggagagatcaactag
